United States Patent Application Publication US 2017/0114356 A1 - sequence listing, part 9

SEQ ID NO: 10508 - DNA, 2502 bp, Zea Mays
cacgtcccgacccaactcacgtctcgtcgccctccttccattttttttttccttttcactcgtggcggttgtacccccgtgcatgtttgtgtgactgtggtgtgatctgtggctgactggctgtggtgtcaagtgtgatacagagagagagagagaggcaggcagctgcgtctgcgtcgtggccggcgcggcgctgcgctgcgcggaaaccaaatcctcagctccggtgttctctccaatctccatccatccatcctcctcgcggctcgcgccccgaaaaatggcgccaacccctccccagtctcccgcgcggcgctgccccagctatttccccctcccctgaattgaccccagccgcgcctcccaaaccctaacctaacccccgccccctgggccccggccatggcgtcactgcccaagccgccgccgccgccacgccccaagacgcggggcaactacaactgcggccgctgcggccagcccaagaagggccacgtctgcgtcggccccggccccggccccggcggcgctgcgtcgccctcctcctcgtccggggccggaggggagcacgggctgcgccgcgccctctccttcgacgaggccggcacgccgtcctcgccggagaagaagcccaaggtggaggacgtcgacgaggcggagctggacgaggaggccacggtggacgtgggcgcccgcgcggtgtccagggaggtcatggcggaggttctgcaccgcctcggtccccgcggggtcatggccgccgccggggtcagccgaggctggcgggactgcgcgggccgggtctggcgcgcggccgaggagctccgccttcgcgtcctcgcctcctctggcgccggcctcctcgccgcgctgctcccccgctgccccgcgctctcccgcctccacctccggatggaaagtgatgttgatggcactaccctggcttgtattgcattttcctgcccaagtttaagaactctcgagattaccatggctgctgatgctgtcaacaggatgactggggaggatctaagtcgttttgtttcggagaagtcttctctctcagccctcaaaattggtggttgctctaatttggatattcttaatctgtgctcttcaagcctttcaattctttggttgtcagatctttgttccctttcgaaatcggttatgaactgtcctaatatgagcgagctatcactgtgcttcacagaacatagtagtgattgtaccaatctgattactttgatggatggcctaggtcgtacatgtcctaacttggaaaaaatgcacatatcatcaaaacaattatctaatgaagctgtatgtgctctagagaatgctaatctcaggggactgttcatgctatccctgattctaggttcaaaaataactgatgcagctgttgcatctattgttcggtcatgtgcaagcttggagttacttgatttaagtggatctagcattagtgacaatggtgttgggatgatatgtaaagcataccctcgtactttatcaaggctgctccttgctctttgcccaaatgtgaccacacgtgggatccagctagccacagcacagttgccatgtcttcaactcatggactgtggaatgagcctatgtgctaatgtgaagaatgaaaaagagggtccatattttggtgaaatcaatggaggtattagaattattcgaaaactgtccatcttaaagaggcaacctattcaccaaaagcttattataaagcatgggaatttgaagaagctcagcctgtggggctgttctgcattagatgctctatatctaaattgtccagagttaaatgatctcaatcttaactcttgcacaaatctacatccagaacgtctgcttcttcagtgcccaaatttaaagaatgtctatgcatccggatgccaagatatgttgattggagcaatcagaaatcaggttctgaatgagttcgctgcagttgaaccatctcttccatgcaagcggctagcggatggctccaaacgggttcaactccctcagttcctaaagcagcagccgtcgaaggacaacaaattaattgaattgagccagacccagtgcactgtgcatcttggttcataataacaccaccagagccagttaacggagcattgtacacaccgaattatgtgaatcatgcaccacataacattatcaattcgttgtatacttctgtattgcatcagaacctgtagtgattgttgtataagctgctaattgctgcatggacatgtctgaatccatcatggatttcttgcgaccgttagtctgttctaggaaacattatataggaataattcgtaaccatgacccgtattctctagggaaaaaaaataatgatcctaggtcactcattttggttggtgttattctgttattcttccgcatgagctatctatggactttggttcttcaatctctacttttaaataggccccgtttggatcatttgaagatcatttgaatcgaattcca

SEQ ID NO: 10509 - DNA, 2830 bp, Zea Mays
gcgagccaggggagagaggcagcatcggtcccgcgccaactggccagtctggctggccgcagccctagtggctagtgcagtaccgcctccgggaccgcgacccgggggaattggttccacttccacccatccccgtgtgtttccgattccccccgttcgggagcagagcatccgcgcgcgatggccaaagatggtggcttcgccaaggcgctgctgctccacgtcgccgcgctgtcgacggccggcgccttcgcggccgccgctgccgccctggcgcggcgccggctgtggggaggagacaggcggaagaagcagctgccggcgccggccatggccgagatgccccggctccagctggcggagtccggccgcctggagtacctcgagaagttctcgcactacgtgggtcagtcgtcgtcatcctcctcttcctctcttcctcctcttctccgttgcctggtcaatcgttcgacgaatgagtgagtgagtggatccaaaacagactatagcttgcgttccacgcgcgcgcgcgcacgcacataaaaaacacacaaagaaaaagaagcagcattaaacaaccgatcgacagccctggtttatgagaaacaacggccacgtcgccatcgatcaagctaggtggctactagtagcgtgtcgtcgtgaaagtctagcggccgcaggagaaatgcaataatctactgctactaataatgtcattatttctgctctctgctctactacctaccgtggcgcgtcgcatgcgcatgaatgcagctaggcagctgggtttccaggacgtgagcgagtgcccacagctctgcaggctggcgaacaactacctcagcagcagcaagacatgcatggaggacatctacgggttcttcgccggcgccaaggacgacgccgccgagtgcctgctttatgtcaagctcatagaggagctggacagatgcatcctcggatattttgcgttccactgggaccatgccacctacctcatcacctcggccttgaccgcggacaccggcagcaaaaggaagctcaggaacatggtcttggaagcaacaaggaagcagcgtttcgagcgcgtgacgcgtgacctgaaggtgacgcgggtgttctcgacgctggtggaggagatgaaggcgatcggcatcatagcggcgggcggcgaggcgtcgcagtgcacggacgtgatggcccccgtggcgcactcggagcgcagcccggtgctgctgctgatgggcggcgggatgggcgccggcaagagcacggtgctcaaggagctgaagcaggaggcgttctggaccaacgcggaggccaacgccgtggtggtggaggcggacgcgttcaaggaggcggacgtcatctaccgcgccatcagctccatgggccaccacaacgacatgctccagacggcagagctggtccaccagtcgtcgacggacgcggcgtcgtcgctgctggtgacggcgctgaacgaggggcgggacgtcatcctggacggcacgctgtcctgggagcccttcgtggagcagaccatcgccatggcgcgcgccgtgcaccgccagcgctaccgcatgggcgtcggctacaaggtggccgacgacggcaccgtcaccgagaactactgggagcccgcgagcgacgacgccaccgagcaacccccgcggaggccctaccgcatcgaggtggtcggggtcgtctgcgacgcctacctcgccgtggcgaggggcatccggagggccatcatcacccggcgggccgtcagggtcaggtcccagctgcagtcgcacaagcgcttcgccgccgcgttccagcggtacagccgcctcgtggacggcgccaggctctacagcaccaactccatgggctccgccaagctcatcgcgtggaaggacgggatcggaaacagcctgctggtggagccccgggagttcgactgcctggagaaggtgagcgggctcaacgagcacgccacctccgtccacgacctctaccccgacggcaccaccacctgcggatcgcgctccatctgggaggacatgatcgtctccacggcccgtgccgacacccagcgcgagctcagggaggccatccgctccgtcgagtccggcggcgggcagccggacacaccaccaacaacgccccagcgcgagctcctgggcttcatccgctccctggaggccgccaacgccgagccagctgcagttgacaatggtctctaaattttaaaccataagatttaagaatcgaatcagataatcggaccatatttctatttatttttgaaaccaacatttaattgagactattttattttgtgaaaaagtatttggatcgtgatccattaccacccttagctgcagcaggtcagacaccgacaactacctcttagctagtgctggaaaaatacgggacatgctttttggtcagcacaaacacaacccaaaaacaataggttaaagcacggaccgacacgaaataatatggaccgagttagtacggtccgaaggcgggcctaaaccgagcctcaaattctggcccgtcgagccccggcacagcccacacagataggttgggcttgagccggcacggtctgatgaaactcatgtgtttaattttatttaatttagtaagtgatagactttatattgttatggtatttagagtttatgtggtcaaataatgatgtgattgtttaacatctttaattgagtaagttatgtattttatatgattgtaatattttgattttatgcggttaaatatatgtgtcgggtttgtgccgacacggcccaataaaaacacgacgtgatttaatgctata

SEQ ID NO: 10510 - DNA, 804 bp, Zea Mays
aactgaagttgcactttgaggagagacgagatcatgaggaagcaatactcccctgtgctctccttgtgcctgatggcccttgtcgtagctgctatggtctgtgtcatgtacaccacctcggcacaagcaggtaaggtcgtgtttggaagtgtagttacagttttgaaacaatattatggtatttagtgatactatagtattgtaactcaaaagatgtttgttttgtacaggtaaaacatagttttaaatactatggtttacctaaaaccattatatttttggaattttcgaaactccactcatcattttaatgttcttttcttctctttacaaatactttgtttttctaatagaaccaaacagatctcggttttgagtaatactgtagttttatatatgcatgcgtgtttcatacgtacgtggtagctacagtttacgtctaattacccaatcgtctttaccttcttcaccacaggaaggagtggctacaactcgtacgaacctgatggaaggagtggatacaactctgttccaataaacggcggtggcagcccctagccaggcggtggagcctgtatcagaaatcaaaaaaatataaaggctcatcggatgaaaactgtgtgtgtattctgtcatgtcatgtgtgttggtatatgatggcttggtcgtcgtaattaatgtaatgtgtggacaataaatatgcggggttgcacctcaacgtaactctagtacttgctattgcgatatatatgtactttattattattattattatatgtgttagaagtcaaaaaagattgcgcg

SEQ ID NO: 10511 - DNA, 499 bp, Zea Mays
tgatgctataaataaagagcagcagggtggaaccaaaccaaggaaactgaagttgcactttgaggagagacgagatcatgaggaagcaatactcccctgtgctctccttgtgcctgatggcccttgtcgtagctgctatggtctgtgtcatgtacaccacctcggcacaagcaggaaggagtggctacaactcgtacgaacctgatggagtggatacaactctgttccaataaacggcggtggcagcccctagccaggcggtggagcctgtatcagaaatcaaaaaaatataaaggctcatcggatgaaaactgtgtgtgtattctgtcatgtcatgtgtgttggtatatgatggcttggtcgtcgtaattaatgtaatgtgtggacaataaatatgcggggttgcacctcaacgtaactctagtacttgctattgcgatatatatgtactttattattattattattatatgtgttagaagtcaaaaaagattgcgcg

SEQ ID NO: 10512 - DNA, 2106 bp, Zea Mays
cagcccacagggaggaggcctgcaactgcaacggtccagccgcacccgcgctcggcatacggcgcctctcggcctacgttctccgtgggccgtggcggcgtgccgcccatccgccctctgccctcgccccacccggccacccgtcgacgacggtcctccgccctcgccccacccgtcgacgacctcgtctcctccgtgcgcgggcctcggctagctcctgcttggcgctgggtagcgggctcgtcggtgctgggtagcgggctcgtcggtgctgtgcagatccacccgcgccccgccttgttctgtgctgccgcttggcgctgcgtcactgaccaagtgcgtgcctgccagccgaccgacggccagcaccacatttcgcagagccgttggtgctctctcttggctgtcagcaccagaagcacagcgcagagtcgccccagccccctgcgcctgctgcatagtctgccactgcccctcagttgttgtggtggccaagggacgaatcactctctcattctcaatgtggcacagtttcttttcgatgcaccggatagcctctcgctcgggtttgcttggtaggagatgttacagctatgccatgaaagggggcacttcgatcgccggagtaggcgacatcattgctgtcgcatcagggaaaggaggcgtaggcaaatccaccactgcagttaacattgctgtagcacttgccaaggagtttaagcttcaggttggtttgctagatgctgacatatatgggccatccattcctacaatgatgaacctccatgctaagcctgaagtaaatgaagacatgaagatgattccagttgagaaccatggtgtgcgatgcatgtccattggttttcttgtagacaatgatgcaccaattgtttggagaggtcctatggtaatgagtgctcttgagaagatgacaaggggagttgcttggggggaccttgatattcttgttgttgatatgcccccaggcactggcgatgctcaactatcgatgtcccaaaggcttcggttatctggtgctttaattgtttcaactcctcaagatattgctcttattgatgctagaagaggagccaacatgttccgcaaagttcaagttcctgtacagtctgtttaacttattctatcttttttctctccatagctgtttatctgcatcacattttaaatttctatttcaagttatagttcttcaggttattctcttaaatttgttttgttcttctagacttcttcagttactgttttgtaatcggttgcatgtcaaccctgaaataagggtatcacttatccaccttaagaatatgcgcatttcattttactgatgcaaaattcttcatgatgcctttcccatgctccagtaatatatctagttttcacatcacagctgagtattttggtttcacagattctgggattggtagagaatatgagttgttttaagtgcccaaaatgtggtgagaaatcttacatcttcggggaaggtggagcgcagagaactgcagaggaaatggacatgaaattacttggtgatgtacctcttgaaatcagcatcagaacaggttcagatgaaggcagccctatcgttatatcatcacccaactctgcatcagcacaagcgtacgtaaatgttgctgagaaggtgactcaaaggctcaatgagctagcagaggagcggcgtatgggcccagaaatcttactttgagacattcaagccacttttctacacaccttctcctgtttgacgtcatgatgatggtcggtcgaaaagaggatatgtggtgttagcgggttgacaccgggctgatgctattctagcaggctggaccgttcggtggcagctttttcgtttttattttttaaaaataatcaaaatttcaactttacatctcgcttcctaagtgtttgtttatcccaatctccttccatccgcatagaatggaaataatcgaacatggtctaagggctagtttgaaaactcaagtccccttcgggattgaaggagattgaaaaagaaattagttcattttgaactcaatccccaatttggaaggggattcgaggtttctaaagtagctccaccgttct

SEQ ID NO: 10513 - DNA, 1792 bp, Zea Mays
cagcccacagggaggaggcctgcaactgcaacggtccagccgcacccgcgctcggcatacggcgcctctcggcctacgttctccgtgggccgtggcggcgtgccgcccatccgccctctgccctcgccccacccggccacccgtcgacgacggtcctccgccctcgccccacccgtcgacgacctcgtctcctccgtgcgcgggcctcggctagctcctgcttggcgctgggtagcgggctcgtcggtgctgggtagcgggctcgtcggtgctgtgcagatccacccgcgccccgccttgttctgtgctgccgcttggcgctgcgtcactgaccaagtgcgtgcctgccagccgaccgacggccagcaccacatttcgcagagccgttggtgctctctcttggctgtcagcaccagaagcacagcgcagagtcgccccagccccctgcgcctgctgcatagtctgccactgcccctcagttgttgtggtggccaagggacgaatcactctctcattctcaatgtggcacagtttcttttcgatgcaccggatagcctctcgctcgggtttgcttggtaggagatgttacagctatgccatgaaagggggcacttcgatcgccggagtaggcgacatcattgctgtcgcatcagggaaaggaggcgtaggcaaatccaccactgcagttaacattgctgtagcacttgccaaggagtttaagcttcaggttggtttgctagatgctgacatatatgggccatccattcctacaatgatgaacctccatgctaagcctgaagtaaatgaagacatgaagatgattccagttgagaaccatggtgtgcgatgcatgtccattggttttcttgtagacaatgatgcaccaattgtttggagaggtaatgagtgctcttgagaagatgacaaggggagttgcttggggggaccttgatattcttgttgttgatatgcccccaggcactggcgatgctcaactatcgatgtcccaaaggcttcggttatctggtgctttaattgtttcaactcctcaagatattgctcttattgatgctagaagaggagccaacatgttccgcaaagttcaagttcctattctgggattggtagagaatatgagttgttttaagtgcccaaaatgtggtgagaaatcttacatcttcggggaaggtggagcgcagagaactgcagaggaaatggacatgaaattacttggtgatgtacctcttgaaatcagcatcagaacaggttcagatgaaggcagccctatcgttatatcatcacccaactctgcatcagcacaagcgtacgtaaatgttgctgagaaggtgactcaaaggctcaatgagctagcagaggagcggcgtatgggcccagaaatcttactttgagacattcaagccacttttctacacaccttctcctgtttgacgtcatgatgatggtcggtcgaaaagaggatatgtggtgttagcgggttgacaccgggctgatgctattctagcaggctggaccgttcggtggcagctttttcgtttttattttttaaaaataatcaaaatttcaactttacatctcgcttcctaagtgtttgtttatcccaatctccttccatccgcatagaatggaaataatcgaacatggtctaagggctagtttgaaaactcaagtccccttcgggattgaaggagattgaaaaagaaattagttcattttgaactcaatccccaatttggaaggggattcgaggtttctaaagtagctccaccgttct

SEQ ID NO: 10514 - DNA, 1820 bp, Zea Mays
cagcccacagggaggaggcctgcaactgcaacggtccagccgcacccgcgctcggcatacggcgcctctcggcctacgttctccgtgggccgtggcggcgtgccgcccatccgccctctgccctcgccccacccggccacccgtcgacgacggtcctccgccctcgccccacccgtcgacgacctcgtctcctccgtgcgcgggcctcggctagctcctgcttggcgctgggtagcgggctcgtcggtgctgggtagcgggctcgtcggtgctgtgcagatccacccgcgccccgccttgttctgtgctgccgcttggcgctgcgtcactgaccaagtgcgtgcctgccagccgaccgacggccagcaccacatttcgcagagccgttggtgctctctcttggctgtcagcaccagaagcacagcgcagagtcgccccagccccctgcgcctgctgcatagtctgccactgcccctcagttgttgtggtggccaagggacgaatcactctctcattctcaatgtggcacagtttcttttcgatgcaccggatagcctctcgctcgggtttgcttggtaggagatgttacagctatgccatgaaagggggcacttcgatcgccggagtaggcgacatcattgctgtcgcatcagggaaaggaggcgtaggcaaatccaccactgcagttaacattgctgtagcacttgccaaggagtttaagcttcaggttggtttgctagatgctgacatatatgggccatccattcctacaatgatgaacctccatgctaagcctgaagtaaatgaagacatgaagatgattccagttgagaaccatggtgtgcgatgcatgtccattggttttcttgtagacaatgatgcaccaattgtttggagaggtcctatggtaatgagtgctcttgagaagatgacaaggggagttgcttggggggaccttgatattcttgttgttgatatgcccccaggcactggcgatgctcaactatcgatgtcccaaaggcttcggttatctggtgctttaattgtttcaactcctcaagatattgctcttattgatgctagaagaggagccaacatgttccgcaaagttcaagttcctattctgggattggtagagaatatgagttgttttaagtgcccaaaatgtggtgagaaatcttacatcttcggggaaggtggagcgcagagaactgcagaggaaatggacatgaaattacttggtgatcggttgtttttcttcaataggtacctcttgaaatcagcatcagaacaggttcagatgaaggcagccctatcgttatatcatcacccaactctgcatcagcacaagcgtacgtaaatgttgctgagaaggtgactcaaaggctcaatgagctagcagaggagcggcgtatgggcccagaaatcttactttgagacattcaagccacttttctacacaccttctcctgtttgacgtcatgatgatggtcggtcgaaaagaggatatgtggtgttagcgggttgacaccgggctgatgctattctagcaggctggaccgttcggtggcagctttttcgtttttattttttaaaaataatcaaaatttcaactttacatctcgcttcctaagtgtttgtttatcccaatctccttccatccgcatagaatggaaataatcgaacatggtctaagggctagtttgaaaactcaagtccccttcgggattgaaggagattgaaaaagaaattagttcattttgaactcaatccccaatttggaaggggattcgaggtttctaaagtagctccaccgttct

SEQ ID NO: 10515 - DNA, 1834 bp, Zea Mays
attgaggttccgatgtgatgtaaattgaaatgtacagcccacagggaggaggcctgcaactgcaacggtccagccgcacccgcgctcggcatacggcgcctctcggcctacgttctccgtgggccgtggcggcgtgccgcccatccgccctctgccctcgccccacccggccacccgtcgacgacggtcctccgccctcgccccacccgtcgacgacctcgtctcctccgtgcgcgggcctcggctagctcctgcttggcgctgggtagcgggctcgtcggtgctgggtagcgggctcgtcggtgctgtgcagatccacccgcgccccgccttgttctgtgctgccgcttggcgctgcgtcactgaccaagtgcgtgcctgccagccgaccgacggccagcaccacatttcgcagagccgttggtgctctctcttggctgtcagcaccagaagcacagcgcagagtcgccccagccccctgcgcctgctgcatagtctgccactgcccctcagttgttgtggtggccaagggacgaatcactctctcattctcaatgtggcacagtttcttttcgatgcaccggatagcctctcgctcgggtttgcttggtaggagatgttacagctatgccatgaaagggggcacttcgatcgccggagtaggcgacatcattgctgtcgcatcagggaaaggaggcgtaggcaaatccaccactgcagttaacattgctgtagcacttgccaaggagtttaagcttcaggttggtttgctagatgctgacatatatgggccatccattcctacaatgatgaacctccatgctaagcctgaagtaaatgaagacatgaagatgattccagttgagaaccatggtgtgcgatgcatgtccattggttttcttgtagacaatgatgcaccaattgtttggagaggtcctatggtaatgagtgctcttgagaagatgacaaggggagttgcttggggggaccttgatattcttgttgttgatatgcccccaggcactggcgatgctcaactatcgatgtcccaaaggcttcggttatctggtgctttaattgtttcaactcctcaagatattgctcttattgatgctagaagaggagccaacatgttccgcaaagttcaagttcctattctgggattggtagagaatatgagttgttttaagtgcccaaaatgtggtgagaaatcttacatcttcggggaaggtggagcgcagagaactgcagaggaaatggacatgaaattacttggtgatgtacctcttgaaatcagcatcagaacaggttcagatgaaggcagccctatcgttatatcatcacccaactctgcatcagcacaagcgtacgtaaatgttgctgagaaggtgactcaaaggctcaatgagctagcagaggagcggcgtatgggcccagaaatcttactttgagacattcaagccacttttctacacaccttctcctgtttgacgtcatgatgatggtcggtcgaaaagaggatatgtggtgttagcgggttgacaccgggctgatgctattctagcaggctggaccgttcggtggcagctttttcgtttttattttttaaaaataatcaaaatttcaactttacatctcgcttcctaagtgtttgtttatcccaatctccttccatccgcatagaatggaaataatcgaacatggtctaagggctagtttgaaaactcaagtccccttcgggattgaaggagattgaaaaagaaattagttcattttgaactcaatccccaatttggaaggggattcgaggtttctaaagtagctccaccgttct

SEQ ID NO: 10516 - DNA, 1958 bp, Zea Mays
cagcccacagggaggaggcctgcaactgcaacggtccagccgcacccgcgctcggcatacggcgcctctcggcctacgttctccgtgggccgtggcggcgtgccgcccatccgccctctgccctcgccccacccggccacccgtcgacgacggtcctccgccctcgccccacccgtcgacgacctcgtctcctccgtgcgcgggcctcggctagctcctgcttggcgctgggtagcgggctcgtcggtgctgggtagcgggctcgtcggtgctgtgcagatccacccgcgccccgccttgttctgtgctgccgcttggcgctgcgtcactgaccaagtgcgtgcctgccagccgaccgacggccagcaccacatttcgcagagccgttggtgctctctcttggctgtcagcaccagaagcacagcgcagagtcgccccagccccctgcgcctgctgcatagtctgccactgcccctcagttgttgtggtggccaagggacgaatcactctctcattctcaatgtggcacagtttcttttcgatgcaccggatagcctctcgctcgggtttgcttggtaggagatgttacagctatgccatgaaagggggcacttcgatcgccggagtaggcgacatcattgctgtcgcatcagggaaaggaggcgtaggcaaatccaccactgcagttaacattgctgtagcacttgccaaggagtttaagcttcaggttggtttgctagatgctgacatatatgggccatccattcctacaatgatgaacctccatgctaagcctgaagtaaatgaagacatgaagatgattccagttgagaaccatggtgtgcgatgcatgtccattggttttcttgtagacaatgatgcaccaattgtttggagaggtaatgagtgctcttgagaagatgacaaggggagttgcttggggggaccttgatattcttgttgttgatatgcccccaggcactggcgatgctcaactatcgatgtcccaaaggcttcggttatctggtgctttaattgtttcaactcctcaagatattgctcttattgatgctagaagaggagccaacatgttccgcaaagttcaagttcctattctgggattggtagagaatatgagttgttttaagtgcccaaaatgtggtgagaaatcttacatcttcggggaaggtggagcgcagagaactgcagaggaaatggacatgaaattacttggtgatgtgagtgaatcttgtgattgcaattggcaccaattcttaagttatgatgaatatgctcgaatgttttatatctgagaaaaggttgaatctttttcgagcattagacttcaatttctagatatcatgaatgtgagacgtagagaacactctgtcagtaatgaacaccccaaatttggttttactgcagatggatgattgacatatcggttttctatgtttatacatgtccttatgatcttatgctacacagcggttgtttttcttcaataggtacctcttgaaatcagcatcagaacaggttcagatgaaggcagccctatcgttatatcatcacccaactctgcatcagcacaagcgtacgtaaatgttgctgagaaggtgactcaaaggctcaatgagctagcagaggagcggcgtatgggcccagaaatcttactttgagacattcaagccacttttctacacaccttctcctgtttgacggtacggcgcaacaaaaaaaaaatgcactgataaatagtgttgttggaagtaaacttcaagttttatcagttgggttggaaattttactcgaataaaacctctgctgccaaccttgtctttgtcacgcatgtccattatctagtattctagtctctgcattttttcatgactcattgagtgataattatatactagtgattggcatggctctgctccatcccagagcagttctactct

SEQ ID NO: 10517 - DNA, 2264 bp, Zea Mays
cagcccacagggaggaggcctgcaactgcaacggtccagccgcacccgcgctcggcatacggcgcctctcggcctacgttctccgtgggccgtggcggcgtgccgcccatccgccctctgccctcgccccacccggccacccgtcgacgacggtcctccgccctcgccccacccgtcgacgacctcgtctcctccgtgcgcgggcctcggctagctcctgcttggcgctgggtagcgggctcgtcggtgctgggtagcgggctcgtcggtgctgtgcagatccacccgcgccccgccttgttctgtgctgccgcttggcgctgcgtcactgaccaagtgcgtgcctgccagccgaccgacggccagcaccacatttcgcagagccgttggtgctctctcttggctgtcagcaccagaagcacagcgcagagtcgccccagccccctgcgcctgctgcatagtctgccactgcccctcagttgttgtggtggccaagggacgaatcactctctcattctcaatgtggcacagtttcttttcgatgcaccggatagcctctcgctcgggtttgcttggtaggagatgttacagctatgccatgaaagggggcacttcgatcgccggagtaggcgacatcattgctgtcgcatcagggaaaggaggcgtaggcaaatccaccactgcagttaacattgctgtagcacttgccaaggagtttaagcttcaggttggtttgctagatgctgacatatatgggccatccattcctacaatgatgaacctccatgctaagcctgaagtaaatgaagacatgaagatgattccagttgagaaccatggtgtgcgatgcatgtccattggttttcttgtagacaatgatgcaccaattgtttggagaggtaatgagtgctcttgagaagatgacaaggggagttgcttggggggaccttgatattcttgttgttgatatgcccccaggcactggcgatgctcaactatcgatgtcccaaaggcttcggttatctggtgctttaattgtttcaactcctcaagatattgctcttattgatgctagaagaggagccaacatgttccgcaaagttcaagttcctgtacagtctgtttaacttattctatcttttttctctccatagctgtttatctgcatcacattttaaatttctatttcaagttatagttcttcaggttattctcttaaatttgttttgttcttctagacttcttcagttactgttttgtaatcggttgcatgtcaaccctgaaataagggtatcacttatccaccttaagaatatgcgcatttcattttactgatgcaaaattcttcatgatgcctttcccatgctccagtaatatatctagttttcacatcacagctgagtattttggtttcacagattctgggattggtagagaatatgagttgttttaagtgcccaaaatgtggtgagaaatcttacatcttcggggaaggtggagcgcagagaactgcagaggaaatggacatgaaattacttggtgatgtgagtgaatcttgtgattgcaattggcaccaattcttaagttatgatgaatatgctcgaatgttttatatctgagaaaaggttgaatctttttcgagcattagacttcaatttctagatatcatgaatgtgagacgtagagaacactctgtcagtaatgaacaccccaaatttggttttactgcagatggatgattgacatatcggttttctatgtttatacatgtccttatgatcttatgctacacagcggttgtttttcttcaataggtacctcttgaaatcagcatcagaacaggttcagatgaaggcagccctatcgttatatcatcacccaactctgcatcagcacaagcgtacgtaaatgttgctgagaaggtgactcaaaggctcaatgagctagcagaggagcggcgtatgggcccagaaatcttactttgagacattcaagccacttttctacacaccttctcctgtttgacggtacggcgcaacaaaaaaaaaatgcactgataaatagtgttgttggaagtaaacttcaagttttatcagttgggttggaaattttactcgaataaaacctctgctgccaaccttgtctttgtcacgcatgtccattatctagtattctagtctctgcattttttcatgactcattgagtgataattatatactagtgattggcatggctctgctccatcccagagcagttctactct

SEQ ID NO: 10518 - DNA, 2002 bp, Zea Mays
cagcccacagggaggaggcctgcaactgcaacggtccagccgcacccgcgctcggcatacggcgcctctcggcctacgttctccgtgggccgtggcggcgtgccgcccatccgccctctgccctcgccccacccggccacccgtcgacgacggtcctccgccctcgccccacccgtcgacgacctcgtctcctccgtgcgcgggcctcggctagctcctgcttggcgctgggtagcgggctcgtcggtgctgggtagcgggctcgtcggtgctgtgcagatccacccgcgccccgccttgttctgtgctgccgcttggcgctgcgtcactgaccaagtgcgtgcctgccagccgaccgacggccagcaccacatttcgcagagccgttggtgctctctcttggctgtcagcaccagaagcacagcgcagagtcgccccagccccctgcgcctgctgcatagtctgccactgcccctcagttgttgtggtggccaagggacgaatcactctctcattctcaatgtggcacagtttcttttcgatgcaccggatagcctctcgctcgggtttgcttggtaggagatgttacagctatgccatgaaagggggcacttcgatcgccggagtaggcgacatcattgctgtcgcatcagggaaaggaggcgtaggcaaatccaccactgcagttaacattgctgtagcacttgccaaggagtttaagcttcaggttggtttgctagatgctgacatatatgggccatccattcctacaatgatgaacctccatgctaagcctgaagtaaatgaagacatgaagatgattccagttgagaaccatggtgtgcgatgcatgtccattggttttcttgtagacaatgatgcaccaattgtttggagaggtcctatggtaatgagtgctcttgagaagatgacaaggggagttgcttggggggaccttgatattcttgttgttgatatgcccccaggcactggcgatgctcaactatcgatgtcccaaaggcttcggttatctggtgctttaattgtttcaactcctcaagatattgctcttattgatgctagaagaggagccaacatgttccgcaaagttcaagttcctgtacagtctgtttaacttattctatcttttttctctccatagctgtttatctgcatcacattttaaatttctatttcaagttatagttcttcaggttattctcttaaatttgttttgttcttctagacttcttcagttactgttttgtaatcggttgcatgtcaaccctgaaataagggtatcacttatccaccttaagaatatgcgcatttcattttactgatgcaaaattcttcatgatgcctttcccatgctccagtaatatatctagttttcacatcacagctgagtattttggtttcacagattctgggattggtagagaatatgagttgttttaagtgcccaaaatgtggtgagaaatcttacatcttcggggaaggtggagcgcagagaactgcagaggaaatggacatgaaattacttggtgatgtacctcttgaaatcagcatcagaacaggttcagatgaaggcagccctatcgttatatcatcacccaactctgcatcagcacaagcgtacgtaaatgttgctgagaaggtgactcaaaggctcaatgagctagcagaggagcggcgtatgggcccagaaatcttactttgagacattcaagccacttttctacacaccttctcctgtttgacggtacggcgcaacaaaaaaaaaatgcactgataaatagtgttgttggaagtaaacttcaagttttatcagttgggttggaaattttactcgaataaaacctctgctgccaaccttgtctttgtcacgcatgtccattatctagtattctagtctctgcattttttcatgactcattgagtgataattatatactagtgattggcatggctctgctccatcccagagcagttctactct

SEQ ID NO: 10519 - DNA, 1716 bp, Zea Mays
cagcccacagggaggaggcctgcaactgcaacggtccagccgcacccgcgctcggcatacggcgcctctcggcctacgttctccgtgggccgtggcggcgtgccgcccatccgccctctgccctcgccccacccggccacccgtcgacgacggtcctccgccctcgccccacccgtcgacgacctcgtctcctccgtgcgcgggcctcggctagctcctgcttggcgctgggtagcgggctcgtcggtgctgggtagcgggctcgtcggtgctgtgcagatccacccgcgccccgccttgttctgtgctgccgcttggcgctgcgtcactgaccaagtgcgtgcctgccagccgaccgacggccagcaccacatttcgcagagccgttggtgctctctcttggctgtcagcaccagaagcacagcgcagagtcgccccagccccctgcgcctgctgcatagtctgccactgcccctcagttgttgtggtggccaagggacgaatcactctctcattctcaatgtggcacagtttcttttcgatgcaccggatagcctctcgctcgggtttgcttggtaggagatgttacagctatgccatgaaagggggcacttcgatcgccggagtaggcgacatcattgctgtcgcatcagggaaaggaggcgtaggcaaatccaccactgcagttaacattgctgtagcacttgccaaggagtttaagcttcaggttggtttgctagatgctgacatatatgggccatccattcctacaatgatgaacctccatgctaagcctgaagtaaatgaagacatgaagatgattccagttgagaaccatggtgtgcgatgcatgtccattggttttcttgtagacaatgatgcaccaattgtttggagaggtcctatggtaatgagtgctcttgagaagatgacaaggggagttgcttggggggaccttgatattcttgttgttgatatgcccccaggcactggcgatgctcaactatcgatgtcccaaaggcttcggttatctggtgctttaattgtttcaactcctcaagatattgctcttattgatgctagaagaggagccaacatgttccgcaaagttcaagttcctattctgggattggtagagaatatgagttgttttaagtgcccaaaatgtggtgagaaatcttacatcttcggggaaggtggagcgcagagaactgcagaggaaatggacatgaaattacttggtgatcggttgtttttcttcaataggtacctcttgaaatcagcatcagaacaggttcagatgaaggcagccctatcgttatatcatcacccaactctgcatcagcacaagcgtacgtaaatgttgctgagaaggtgactcaaaggctcaatgagctagcagaggagcggcgtatgggcccagaaatcttactttgagacattcaagccacttttctacacaccttctcctgtttgacggtacggcgcaacaaaaaaaaaatgcactgataaatagtgttgttggaagtaaacttcaagttttatcagttgggttggaaattttactcgaataaaacctctgctgccaaccttgtctttgtcacgcatgtccattatctagtattctagtctctgcattttttcatgactcattgagtgataattatatactagtgattggcatggctctgctccatcccagagcagttctactct

SEQ ID NO: 10520 - DNA, 1994 bp, Zea Mays
cagcccacagggaggaggcctgcaactgcaacggtccagccgcacccgcgctcggcatacggcgcctctcggcctacgttctccgtgggccgtggcggcgtgccgcccatccgccctctgccctcgccccacccggccacccgtcgacgacggtcctccgccctcgccccacccgtcgacgacctcgtctcctccgtgcgcgggcctcggctagctcctgcttggcgctgggtagcgggctcgtcggtgctgggtagcgggctcgtcggtgctgtgcagatccacccgcgccccgccttgttctgtgctgccgcttggcgctgcgtcactgaccaagtgcgtgcctgccagccgaccgacggccagcaccacatttcgcagagccgttggtgctctctcttggctgtcagcaccagaagcacagcgcagagtcgccccagccccctgcgcctgctgcatagtctgccactgcccctcagttgttgtggtggccaagggacgaatcactctctcattctcaatgtggcacagtttcttttcgatgcaccggatagcctctcgctcgggtttgcttggtaggagatgttacagctatgccatgaaagggggcacttcgatcgccggagtaggcgacatcattgctgtcgcatcagggaaaggaggcgtaggcaaatccaccactgcagttaacattgctgtagcacttgccaaggagtttaagcttcaggttggtttgctagatgctgacatatatgggccatccattcctacaatgatgaacctccatgctaagcctgaagtaaatgaagacatgaagatgattccagttgagaaccatggtgtgcgatgcatgtccattggttttcttgtagacaatgatgcaccaattgtttggagaggtaatgagtgctcttgagaagatgacaaggggagttgcttggggggaccttgatattcttgttgttgatatgcccccaggcactggcgatgctcaactatcgatgtcccaaaggcttcggttatctggtgctttaattgtttcaactcctcaagatattgctcttattgatgctagaagaggagccaacatgttccgcaaagttcaagttcctgtacagtctgtttaacttattctatcttttttctctccatagctgtttatctgcatcacattttaaatttctatttcaagttatagttcttcaggttattctcttaaatttgttttgttcttctagacttcttcagttactgttttgtaatcggttgcatgtcaaccctgaaataagggtatcacttatccaccttaagaatatgcgcatttcattttactgatgcaaaattcttcatgatgcctttcccatgctccagtaatatatctagttttcacatcacagctgagtattttggtttcacagattctgggattggtagagaatatgagttgttttaagtgcccaaaatgtggtgagaaatcttacatcttcggggaaggtggagcgcagagaactgcagaggaaatggacatgaaattacttggtgatgtacctcttgaaatcagcatcagaacaggttcagatgaaggcagccctatcgttatatcatcacccaactctgcatcagcacaagcgtacgtaaatgttgctgagaaggtgactcaaaggctcaatgagctagcagaggagcggcgtatgggcccagaaatcttactttgagacattcaagccacttttctacacaccttctcctgtttgacggtacggcgcaacaaaaaaaaaatgcactgataaatagtgttgttggaagtaaacttcaagttttatcagttgggttggaaattttactcgaataaaacctctgctgccaaccttgtctttgtcacgcatgtccattatctagtattctagtctctgcattttttcatgactcattgagtgataattatatactagtgattggcatggctctgctccatcccagagcagttctactct

SEQ ID NO: 10521 - DNA, 601 bp, Zea Mays
gttacaaagccgtggcaacaaggtgcttcatatgctgtccaatttgacttttgaggaggcagacacaaagcatgatgggaaaattgacaaagaagaatggcgcaatttagtagtgaggcatccctctttattgaagaacatgacactacaatatctcaaggacatcaccactacatttccgagctttgtcttccattctcaggtcgatgatacctgaatttctgaaaactaatgaatgtcagaaggtggactgcttgctttgctaagcaaactttcagtgcctgtttgatggttcaaaaatctcatcgtcctgaaggcatcaaatcatcgtttgttgttaataatctttttccttgttttttatttggaattcttgctggatcctgtgtgaatcctcttctattttccctctcaattgttcctttattctatttcggttttgatggccagtacttgagtcagttaatgtgtacaaagttgcgtctgatgctgcccgtcattgaattgtatggcatgtgaggaagatttaaattgtatattcaacttttgtggtcatgatagttgcacatatttttaccatcctttctaatttatatttgtt

SEQ ID NO: 10522 - DNA, 671 bp, Zea Mays
ggaggattgtcaccaatcatgagcaaacgcaggaggtaaagcaaatggttgttgctacacttgcggagtcaggaatgaatcttttagatgaggtcatagagagcatcattgataagacttttgaggaggcagacacaaagcatgatgggaaaattgacaaagaagaatggcgcaatttagtagtgaggcatccctctttattgaagaacatgacactacaatatctcaaggacatcaccactacatttccgagctttgtcttccattctcaggtcgatgatacctgaatttctgaaaactaatgaatgtcagaaggtggactgcttgctttgctaagcaaactttcagtgcctgtttgatggttcaaaaatctcatcgtcctgaaggcatcaaatcatcgtttgttgttaataatctttttccttgttttttatttggaattcttgctggatcctgtgtgaatcctcttctattttccctctcaattgttcctttattctatttcggttttgatggccagtacttgagtcagttaatgtgtacaaagttgcgtctgatgctgcccgtcattgaattgtatggcatgtgaggaagatttaaattgtatattcaacttttgtggtcatgatagttgcacatatttttaccatcctttctaatttatatttgtt

SEQ ID NO: 10523 - DNA, 1114 bp, Zea Mays
gtgagttgctgctcccgcccgtcgatgcttggttagcagaagagacggcggcggtaccatgttgcagtgcctggatggagtgaagcagctccttgccgtgctcctcaagtgctgccacatcgacctcaagcagcccaacggcctagatgatccggaggtgctcgctagggagaccgtcgtgagcgaggtcgaggcattgtatgaactgttcaagaagatcagcagtgctgtgattgatgatgggctgatcaacaaggaggagtttcagctggcgctgttcaagactaataagaaggaaagtttgtttgctgatcgggtatttgacttatttgatacaaaacacaatgggattcttggatttgaagaatttgctcgggcgctctcagtatttcatcccaatgctcccttggatgagaagatcgagttttcattccaactttatgacctcaagcaacaaggcttcattgaaagacaggaggtaaagcaaatggttgttgctacacttgcggagtcaggaatgaatcttttagatgaggtcatagagagcatcattgataagacttttgaggaggcagacacaaagcatgatgggaaaattgacaaagaagaatggcgcaatttagtagtgaggcatccctctttattgaagaacatgacactacaatatctcaaggacatcaccactacatttccgagctttgtcttccattctcaggtcgatgatacctgaatttctgaaaactaatgaatgtcagaaggtggactgcttgctttgctaagcaaactttcagtgcctgtttgatggttcaaaaatctcatcgtcctgaaggcatcaaatcatcgtttgttgttaataatctttttccttgttttttatttggaattcttgctggatcctgtgtgaatcctcttctattttccctctcaattgttcctttattctatttcggttttgatggccagtacttgagtcagttaatgtgtacaaagttgcgtctgatgctgcccgtcattgaattgtatggcatgtgaggaagatttaaattgtatattcaacttttgtggtcatgatagttgcacatatttttaccatcctttctaatttatatttgtt

SEQ ID NO: 10524 - DNA, 1039 bp, Zea Mays
ccgtgagttgctgctcccgcccgtcgatgcttggttagcagaagagacggcggcggtaccatgttgcagtgcctggatggagtgaagcagctccttgccgtgctcctcaagtgctgccacatcgacctcaagcagcccaacggcctagatgatccggaggtgctcgctagggagaccgtttagcgtgagcgaggtcgaggcattgtatgaactgttcaagaagatcagcagtgctgtgattgatgatgggctgatcaacaaggaggagtttcagctggcgctgttcaagactaataagaaggaaagtttgtttgctgatcgggtatttgacttatttgatacaaaacacaatgggattcttggatttgaagaatttgctcgggcgctctcagtatttcatcccaatgctcccttggatgagaagatcgagttttcattccaactttatgacctcaagcaacaaggcttcattgaaagacaggagacttttgaggaggcagacacaaagcatgatgggaaaattgacaaagaagaatggcgcaatttagtagtgaggcatccctctttattgaagaacatgacactacaatatctcaaggacatcaccactacatttccgagctttgtcttccattctcaggtcgatgatacctgaatttctgaaaactaatgaatgtcagaaggtggactgcttgctttgctaagcaaactttcagtgcctgtttgatggttcaaaaatctcatcgtcctgaaggcatcaaatcatcgtttgttgttaataatctttttccttgttttttatttggaattcttgctggatcctgtgtgaatcctcttctattttccctctcaattgttcctttattctatttcggttttgatggccagtacttgagtcagttaatgtgtacaaagttgcgtctgatgctgcccgtcattgaattgtatggcatgtgaggaagatttaaattgtatattcaacttttgtggtcatgatagttgcacatatttttaccatcctttctaatttatatttgtt

SEQ ID NO: 10525 - DNA, 824 bp, Zea Mays
aacgctcctgggaaaaaaaacaaaaacacgaagaactccaccgtttcatcctctttccccaatccgttcaacgacggcttcagaaacccttcctccggcggccgccacaacgagcctcgggcaccgcaaagcaaaatgggattcttggatttgaagaatttgctcgggcgctctcagtatttcatcccaatgctcccttggatgagaagatcgagttttcattccaactttatgacctcaagcaacaaggcttcattgaaagacaggagacttttgaggaggcagacacaaagcatgatgggaaaattgacaaagaagaatggcgcaatttagtagtgaggcatccctctttattgaagaacatgacactacaatatctcaaggacatcaccactacatttccgagctttgtcttccattctcaggtcgatgatacctgaatttctgaaaactaatgaatgtcagaaggtggactgcttgctttgctaagcaaactttcagtgcctgtttgatggttcaaaaatctcatcgtcctgaaggcatcaaatcatcgtttgttgttaataatctttttccttgttttttatttggaattcttgctggatcctgtgtgaatcctcttctattttccctctcaattgttcctttattctatttcggttttgatggccagtacttgagtcagttaatgtgtacaaagttgcgtctgatgctgcccgtcattgaattgtatggcatgtgaggaagatttaaattgtatattcaacttttgtggtcatgatagttgcacatatttttaccatcctttctaatttatatttgtt

SEQ ID NO: 10526 - DNA, 2237 bp, Zea Mays
gcatacatgtaacctaaccactcccatggactataaaaggatgatgtagagcagcatttaaggggatccccattcggttccactcaggttctattcagactttagtcttcaccaaacatcaaccaagtatgatcaattcgatccggtcaagataactacaattagagtcggtctggctttccacaatactctcatcttgtaggtggtcttggagtctcctggtgctagagtttgtactctttttgtatcatctacacacatcaatacatgatcagcaagagaacgtagggtattgcactcactgtggccttaacttctatgaaaattcatgtattagactcttaatgccatgacctcacagacatactctacggtgttaggactcgctccctgctcttctagttattgtttatctggtattcttagtaccctggtgtctttgctacgacactagtaattagtagaaataccaaaacaactggttttagattgaaatattagtttatgcatataaggtgtttgaggaaaagcatattcatataagcatggttagttagaactatgaattctaatgctttgtcatttttttattttaattattaaccagataccgggcatcatttagatgaagatgaacagattgcacaggctctgcaagaaaatattggtcataacctagctgaagacgaacagcttgcacgggctctgcaagaaagtatgaatgatggacctcctcgtcagcacattccagttgaagatgttaactcagaaagtactccagcaagcatcttgccctcaaatattttccgcacaagtggcttgagggtttgtgctggatgcagaagtccaattggccgcggtcggtttctcagttgtatggactctgtttggcatcccgagtgcttcaggtgttatgcttgtgatagaccaatatcagagtatgagtttgctgttcatgaaaaccatgcctaccacaggccctgctacaaggagcgtttccatcctaaatgtgatgtttgcagtagctttattcccacagataaaaatggcctcattgaataccgggcccatcctttttggatgcagaagtattgtccttcccatgaaaatgatggtacacctaggtgctgcagttgtgaacgaatggagccaaaggacagtcaatacataacattagatgatggccggagactctgcttggagtgtctgcatactgctattatggagaccaatgaatgccagccactgtacattgatattcaagaattttatgagggtatgaacatgaaagtagagcaacaagttcccttgcttttggttgagcgacaagctttaaatgaagccatggaagcagagaaatctgtgcaccaccttcctgaaacaagaggcctctgcctatctgaggagcagattgtcagaactatattgaaaggaccaattggaccaggcaacagaatcatagatatggtcacaggaccatacaaactcattagacggtgtgaagtgactgcaattcttatactgtacgggctgccaaggctgctaactggctcgattctggctcatgagatgatgcatgcttacctccgacttaaaggataccgaaccctgagtccagaggttgaagaaggcatctgtcaggttctagctcatctttggcttgagtcagaaatcacatcaggttctggtagcatgtcaaccacctcagatgcgtcatcgtcatcttcaacatcttcatcatcgaaaaagggcgcaaagacggaatttgaaaaaagactcggggagttcttcaagtaccaaattgaaacagattcttctgtcgcttatggagatgggtttcgagcaggcatgcgagccattgagcggtacggcttgagaagcacccttgatcatatcaagatgacggggtcttttccatgctgaagctggtttttttttacctcggcttggatatgggtatacatattttttttggagaacttttggttcaggttatacatacgaaaagccgaacttctgtgtcgagaagaggcataaggatttagctatactgtccattgcaggaaaaaaaactgtttcccttttcaattataaaatttcacagtgcagacatgaaggtatgtggtctttagcttggccaaccttgtggaatgctgtcacttgatgcaaaagaaatttcgaatacatatgctttgctgtgcttgaaatgcaatggttggatgctatgctcttcttta

SEQ ID NO: 10527 - DNA, 2270 bp, Zea Mays
aagggagaagcaagcaaagagctgatagtgaaggtgccatgtgtgtttggaacaggcgcaggaagaaggatattgtccctctccaaaactataaacatgggttggttgagtaaaatatttaaaggtccagtaaatagagtttcaagaggacactacaacgggaactcccatgaaggctattcagctcagcacactaaatcatatggtgtgcatggcaatgaggacgaagacatggatcatgctattgcattatccttatcagaggaagatcaaaggaagggaaagaccattgataccgggcatcatttagatgaagatgaacagattgcacaggctctgcaagaaagtatgaatgatggtcctcttcgaatattcattcagataattgttcattaatttcacgttatgactgcaaagtcaaataagcaaccaaaatttcatttcatctcttattgccaactaaataatgcttatgcatgccttgaccgcatatgcaaattcagggactaaatatggagttctcaagttcagggccaaacatagcacaactttattagacagggtgttcctgtaatattaaatttgattctttaatacttaccaaagaattgtaaataacagttcttgtctaacaaatgagtactgctagtcagaaccatgaactttaatgctttgtcttataataatgaaccagatattggtcataacctagctgaagacgaacagcttgcacgggctctgcaagaaagtatgaatgatggacctcctcgtcagcacattccagttgaagatgttaactcagaaagtactccagcaagcatcttgccctcaaatattttccgcacaagtggcttgagggtttgtgctggatgcagaagtccaattggccgcggtcggtttctcagttgtatggactctgtttggcatcccgagtgcttcaggtgttatgcttgtgatagaccaatatcagagtatgagtttgctgttcatgaaaaccatgcctaccacaggccctgctacaaggagcgtttccatcctaaatgtgatgtttgcagtagctttattcccacagataaaaatggcctcattgaataccgggcccatcctttttggatgcagaagtattgtccttcccatgaaaatgatggtacacctaggtgctgcagttgtgaacgaatggagccaaaggacagtcaatacataacattagatgatggccggagactctgcttggagtgtctgcatactgctattatggagaccaatgaatgccagccactgtacattgatattcaagaattttatgagggtatgaacatgaaagtagagcaacaagttcccttgcttttggttgagcgacaagctttaaatgaagccatggaagcagagaaatctgtgcaccaccttcctgaaacaagaggcctctgcctatctgaggagcagattgtcagaactatattgaaaggaccaattggaccaggcaacagaatcatagatatggtcacaggaccatacaaactcattagacggtgtgaagtgactgcaattcttatactgtacgggctgccaaggctgctaactggctcgattctggctcatgagatgatgcatgcttacctccgacttaaaggataccgaaccctgagtccagaggttgaagaaggcatctgtcaggttctagctcatctttggcttgagtcagaaatcacatcaggttctggtagcatgtcaaccacctcagatgcgtcatcgtcatcttcaacatcttcatcatcgaaaaagggcgcaaagacggaatttgaaaaaagactcggggagttcttcaagtaccaaattgaaacagattcttctgtcgcttatggagatgggtttcgagcaggcatgcgagccattgagcggtacggcttgagaagcacccttgatcatatcaagatgacggggtcttttccatgctgaagctggtttttttttacctcggcttggatatgggtatacatattttttttggagaacttttggttcaggttatacatacgaaaagccgaacttctgtgtcgagaagaggcataaggatttagctatactgtccattgcaggaaaaaaaactgtttcccttttcaattataaaatttcacagtgcagacatgaaggtatgtggtctttagcttggccaaccttgtggaatgctgtcacttgatgcaaaagaaatttcgaatacatatgctttgctgtgcttgaaatgcaatggttggatgctatgctcttcttta

SEQ ID NO: 10528 - DNA, 2245 bp, Zea Mays
cacgctttgatcgcttcttttttctctccatcatttctccccgtttcgtctcgcttcttttctgtcgcctcccgtttcgtctatctccggccggcctttctgctgcaaggaaaccaatattgtttgctggatctttcaaaaagggaaaccgaattcccgagagcgagcagcagggaatctctgctgaatccgtaggctccgaattggagctggaagtgtagtgatttcctgattggggacataaggtggggtttgtccctactccccagtgagctccacgcggtccctgctgttcttccagtcaaaattctgtacccttcggtgctggggtcaaggaactaggcgtgttgtcctgaactcttgattcctgcttcatggaaattgtatatgtttttctctgaattcaaaatcgtccctattctcccaaagctttctgaggaagaaggatattgtccctctccaaaactataaacatgggttggttgagtaaaatatttaaaggtccagtaaatagagtttcaagaggacactacaacgggaactcccatgaaggctattcagctcagcacactaaatcatatggtgtgcatggcaatgaggacgaagacatggatcatgctattgcattatccttatcagaggaagatcaaaggaagggaaagaccattgatattggtcataacctagctgaagacgaacagcttgcacgggctctgcaagaaagtatgaatgatggacctcctcgtcagcacattccagttgaagatgttaactcagaaagtactccagcaagcatcttgccctcaaatattttccgcacaagtggcttgagggtttgtgctggatgcagaagtccaattggccgcggtcggtttctcagttgtatggactctgtttggcatcccgagtgcttcaggtgttatgcttgtgatagaccaatatcagagtatgagtttgctgttcatgaaaaccatgcctaccacaggccctgctacaaggagcgtttccatcctaaatgtgatgtttgcagtagctttattcccacagataaaaatggcctcattgaataccgggcccatcctttttggatgcagaagtattgtccttcccatgaaaatgatggtacacctaggtgctgcagttgtgaacgaatggagccaaaggacagtcaatacataacattagatgatggccggagactctgcttggagtgtctgcatactgctattatggagaccaatgaatgccagccactgtacattgatattcaagaattttatgagggtatgaacatgaaagtagagcaacaagttcccttgcttttggttgagcgacaagctttaaatgaagccatggaagcagagaaatctgtgcaccaccttcctgaaacaagaggcctctgcctatctgaggagcagattgtcagaactatattgaaaggaccaattggaccaggcaacagaatcatagatatggtcacaggaccatacaaactcattagacggtgtgaagtgactgcaattcttatactgtacgggctgccaaggctgctaactggctcgattctggctcatgagatgatgcatgcttacctccgacttaaaggataccgaaccctgagtccagaggttgaagaaggcatctgtcaggttctagctcatctttggcttgagtcagaaatcacatcaggttctggtagcatgtcaaccacctcagatgcgtcatcgtcatcttcaacatcttcatcatcgaaaaagggcgcaaagacggaatttgaaaaaagactcggggagttcttcaagtaccaaattgaaacagattcttctgtcgcttatggagatgggtttcgagcaggcatgcgagccattgagcggtacggcttgagaagcacccttgatcatatcaagatgacggggtcttttccatgctgaagctggtttttttttacctcggcttggatatgggtatacatattttttttggagaacttttggttcaggttatacatacgaaaagccgaacttctgtgtcgagaagaggcataaggatttagctatactgtccattgcaggaaaaaaaactgtttcccttttcaattataaaatttcacagtgcagacatgaaggtatgtggtctttagcttggccaaccttgtggaatgctgtcacttgatgcaaaagaaatttcgaatacatatgctttgctgtgcttgaaatgcaatggttggatgctatgctcttcttta

SEQ ID NO: 10529 - DNA, 2724 bp, Zea Mays
cacgctttgatcgcttcttttttctctccatcatttctccccgtttcgtctcgcttcttttctgtcgcctcccgtttcgtctatctccggccggcctttctgctgcaaggaaaccaatattgtttgctggatctttcaaaaagggaaaccgaattcccgagagcgagcagcagggaatctctgctgaatccgtaggctccgaattggagctggaagtgtagtgatttcctgattggggacataaggtggggtttgtccctactccccagtgagctccacgcggtccctgctgttcttccagtcaaaattctgtacccttcggtgctggggtcaaggaactaggcgtgttgtcctgaactcttgattcctgcttcatggaaattgtatatgtttttctctgaattcaaaatcgtccctattctcccaaagctttctgagtttcaaggccacatgggacataagggagaagcaagcaaagagctgatagtgaaggtgccatgtgtgtttggaacagggaagaaggatattgtccctctccaaaactataaacatgggttggttgagtaaaatatttaaaggtccagtaaatagagtttcaagaggacactacaacgggaactcccatgaaggctattcagctcagcacactaaatcatatggtgtgcatggcaatgaggacgaagacatggatcatgctattgcattatccttatcagaggaagatcaaaggaagggaaagaccattgataccgggcatcatttagatgaagatgaacagattgcacaggctctgcaagaaagtatgaatgatggtcctcttcgaatattcattcagataattgttcattaatttcacgttatgactgcaaagtcaaataagcaaccaaaatttcatttcatctcttattgccaactaaataatgcttatgcatgccttgaccgcatatgcaaattcagggactaaatatggagttctcaagttcagggccaaacatagcacaactttattagacagggtgttcctgtaatattaaatttgattctttaatacttaccaaagaattgtaaataacagttcttgtctaacaaatgagtactgctagtcagaaccatgaactttaatgctttgtcttataataatgaaccagatattggtcataacctagctgaagacgaacagcttgcacgggctctgcaagaaagtatgaatgatggacctcctcgtcagcacattccagttgaagatgttaactcagaaagtactccagcaagcatcttgccctcaaatattttccgcacaagtggcttgagggtttgtgctggatgcagaagtccaattggccgcggtcggtttctcagttgtatggactctgtttggcatcccgagtgcttcaggtgttatgcttgtgatagaccaatatcagagtatgagtttgctgttcatgaaaaccatgcctaccacaggccctgctacaaggagcgtttccatcctaaatgtgatgtttgcagtagctttattcccacagataaaaatggcctcattgaataccgggcccatcctttttggatgcagaagtattgtccttcccatgaaaatgatggtacacctaggtgctgcagttgtgaacgaatggagccaaaggacagtcaatacataacattagatgatggccggagactctgcttggagtgtctgcatactgctattatggagaccaatgaatgccagccactgtacattgatattcaagaattttatgagggtatgaacatgaaagtagagcaacaagttcccttgcttttggttgagcgacaagctttaaatgaagccatggaagcagagaaatctgtgcaccaccttcctgaaacaagaggcctctgcctatctgaggagcagattgtcagaactatattgaaaggaccaattggaccaggcaacagaatcatagatatggtcacaggaccatacaaactcattagacggtgtgaagtgactgcaattcttatactgtacgggctgccaaggctgctaactggctcgattctggctcatgagatgatgcatgcttacctccgacttaaaggataccgaaccctgagtccagaggttgaagaaggcatctgtcaggttctagctcatctttggcttgagtcagaaatcacatcaggttctggtagcatgtcaaccacctcagatgcgtcatcgtcatcttcaacatcttcatcatcgaaaaagggcgcaaagacggaatttgaaaaaagactcggggagttcttcaagtaccaaattgaaacagattcttctgtcgcttatggagatgggtttcgagcaggcatgcgagccattgagcggtacggcttgagaagcacccttgatcatatcaagatgacggggtcttttccatgctgaagctggtttttttttacctcggcttggatatgggtatacatattttttttggagaacttttggttcaggttatacatacgaaaagccgaacttctgtgtcgagaagaggcataaggatttagctatactgtccattgcaggaaaaaaaactgtttcccttttcaattataaaatttcacagtgcagacatgaaggtatgtggtctttagcttggccaaccttgtggaatgctgtcacttgatgcaaaagaaatttcgaatacatatgctttgctgtgcttgaaatgcaatggttggatgctatgctcttcttta

SEQ ID NO: 10530 - DNA, 4483 bp, Zea Mays
cacgctttgatcgcttcttttttctctccatcatttctccccgtttcgtctcgcttcttttctgtcgcctcccgtttcgtctatctccggccggcctttctgctgcaaggaaaccaatattgtttgctggatctttcaaaaagggaaaccgaattcccgagagcgagcagcagggaatctctgctgaatccgtaggctccgaattggagctggaagtgtagtgatttcctgattggggacataaggtggggtttgtccctactccccagtgagctccacgcggtccctgctgttcttccagtcaaaattctgtacccttcggtgctggggtcaaggaactaggcgtgttgtcctgaactcttgattcctgcttcatggaaattgtatatgtttttctctgaattcaaaatcgtccctattctcccaaagctttctgaggtaaggataagataatgacgtcgtgacctgtttcaatttattttgtagtctctttctcttttgaaggcgcacttgcattctctctgctgcttcttttagtactggttaccgaaatttggactctactgtttggtgaccagtgatttccacagagtttgaaaaaacatttatagatacagggctgcatatatagttttggtttgtgaggttctcaaaggacaatttcatgtgtagtaaatctaagagacatgttaagccattttgttgaatttggatacttttgatttaaggactccagacgcggcatgcatatctgtgtaggtgatcaattgctggtctcttcattgtaacttacataacaagccactcgcctatcttactgttgttcaaatgcaactgcgaaatcttcagttatctttccattggtctggctgtcctttggggttacttgtgtgcattttgcattctgaatgccgtgcatacagaaccatcaatatttcatcattgtggtggcacaccagcctatttgtttttttatcgcaccactaaaagtaatgtagagtgcactagcgagagtggcacttttctacatagttgataatattcactttcaaagcaaagagcactctgtaaattgtttaagtattgacaaaattttaggactgattaatgctagaaacatgatggtgtttccaacagtctgcattgatgcttactgtgggaatctacattagaagagtaatatggagatagaatcgctacgcaattgcagaatataatttttaaggcatatggattaatttataacctatggatgtgcttgatcatcgaaaattcatgagccttcaccttcacccctgaggtctgtgcttgctattggaatatggcaacatgcattgcaaaagtagtaagaaaaacagagctgctatacatcaatcaatgaaatttttagagaccacatggaatttctagcttgttaatgtgcttgaagattcttccaccttcatcttttgcttagcatgtgtcactagtgcctcacatcatacattcagcaaagctcaatgcctgttttgctggatgtgcttatatttctaagcggtgaatgtttttagatttctctcatattgattccagtttcaaggccacatgggacataagggagaagcaagcaaagagctgatagtgaaggtgccatgtgtgtttggaacagggtaggaactaatagtggagagtgatttttatttgatgtagcactaacatttaagggtcaactactacataagaaatactagtgttttatatagacagaccctcaattgccttctttaagtgtgaagaactcatatgcactcattttctccaaatatggttctcaatgcatcttgttttgcagcgcaggaagaaggatattgtccctctccaaaactataaacatgggttggttgagtaaaatatttaaaggtccagtaaatagagtttcaagaggacactacaacgggaactcccatgaaggctattcagctcagcacactaaatcatatgtactgctcagttgcagcttatcctcttaatctttatctttactggtgcaaattagttaatttaagtagaacctaatataaaaaatgaagaaaagaatcatagtgcactgaaatgtgcccccaatattatatactatgagttgcttagtgcacttgccgtatttgtttacttaatttgaaatgggtccttccctatttctaataaataatttttattaaagtatattgttggcatgcctgcctggaaaaatataagtagtgaacaacttaccaatctgtgcttgactaatgaggatccacagtattttttaatgtatatcaggactcacaacaggttgcatgttcctcagtcggagaggaaaggagtagcactggatgtgctttttgcatacttaaccgttccctgcttttttactgtataattaaaatttaatgtagggtgtgcatggcaatgaggacgaagacatggatcatgctattgcattatccttatcagaggaagatcaaaggaagggaaagaccattgataccgggcatcatttagatgaagatgaacagattgcacaggctctgcaagaaagtatgaatgatggtcctcttcgaatattcattcagataattgttcattaatttcacgttatgactgcaaagtcaaataagcaaccaaaatttcatttcatctcttattgccaactaaataatgcttatgcatgccttgaccgcatatgcaaattcagggactaaatatggagttctcaagttcagggccaaacatagcacaactttattagacagggtgttcctgtaatattaaatttgattctttaatacttaccaaagaattgtaaataacagttcttgtctaacaaatgagtactgctagtcagaaccatgaactttaatgctttgtcttataataatgaaccagatattggtcataacctagctgaagacgaacagcttgcacgggctctgcaagaaagtatgaatgatggacctcctcgtcagcacattccagttgaagatgttaactcagaaagtactccagcaagcatcttgccctcaaatattttccgcacaagtggcttgagggtttgtgctggatgcagaagtccaattggccgcggtcggtttctcagttgtatggactctgtttggcatcccgagtgcttcaggtgttatgcttgtgatagaccaatatcagagtatgagtttgctgttcatgaaaaccatgcctaccacaggccctgctacaaggagcgtttccatcctaaatgtgatgtttgcagtagctttattcccacagataaaaatggcctcattgaataccgggcccatcctttttggatgcagaagtattgtccttcccatgaaaatgatggtacacctaggtgctgcagttgtgaacgaatggagccaaaggacagtcaatacataacattagatgatggccggagactctgcttggagtgtctgcatactgctattatggagaccaatgaatgccagccactgtacattgatattcaagaattttatgagggtatgaacatgaaagtagagcaacaagttcccttgcttttggttgagcgacaagctttaaatgaagccatggaagcagagaaatctgtgcaccaccttcctgaaacaagaggcctctgcctatctgaggagcagattgtcagaactatattgaaaggaccaattggaccaggcaacagaatcatagatatggtcacaggaccatacaaactcattagacggtgtgaagtgactgcaattcttatactgtacgggctgccaaggctgctaactggctcgattctggctcatgagatgatgcatgcttacctccgacttaaaggataccgaaccctgagtccagaggttgaagaaggcatctgtcaggttctagctcatctttggcttgagtcagaaatcacatcaggttctggtagcatgtcaaccacctcagatgcgtcatcgtcatcttcaacatcttcatcatcgaaaaagggcgcaaagacggaatttgaaaaaagactcggggagttcttcaagtaccaaattgaaacagattcttctgtcgcttatggagatgggtttcgagcaggcatgcgagccattgagcggtacggcttgagaagcacccttgatcatatcaagatgacggggtcttttccatgctgaagctggtttttttttacctcggcttggatatgggtatacatattttttttggagaacttttggttcaggttatacatacgaaaagccgaacttctgtgtcgagaagaggcataaggatttagctatactgtccattgcaggaaaaaaaactgtttcccttttcaattataaaatttcacagtgcagacatgaaggtatgtggtctttagcttggccaaccttgtggaatgctgtcacttgatgcaaaagaaatttcgaatacatatgctttgctgtgcttgaaatgcaatggttggatgctatgctcttcttta

SEQ ID NO: 10531 - DNA, 2250 bp, Zea Mays
cacgctttgatcgcttcttttttctctccatcatttctccccgtttcgtctcgcttcttttctgtcgcctcccgtttcgtctatctccggccggcctttctgctgcaaggaaaccaatattgtttgctggatctttcaaaaagggaaaccgaattcccgagagcgagcagcagggaatctctgctgaatccgtaggctccgaattggagctggaagtgtagtgatttcctgattggggacataaggtggggtttgtccctactccccagtgagctccacgcggtccctgctgttcttccagtcaaaattctgtacccttcggtgctggggtcaaggaactaggcgtgttgtcctgaactcttgattcctgcttcatggaaattgtatatgtttttctctgaattcaaaatcgtccctattctcccaaagctttctgagcgcaggaagaaggatattgtccctctccaaaactataaacatgggttggttgagtaaaatatttaaaggtccagtaaatagagtttcaagaggacactacaacgggaactcccatgaaggctattcagctcagcacactaaatcatatggtgtgcatggcaatgaggacgaagacatggatcatgctattgcattatccttatcagaggaagatcaaaggaagggaaagaccattgatattggtcataacctagctgaagacgaacagcttgcacgggctctgcaagaaagtatgaatgatggacctcctcgtcagcacattccagttgaagatgttaactcagaaagtactccagcaagcatcttgccctcaaatattttccgcacaagtggcttgagggtttgtgctggatgcagaagtccaattggccgcggtcggtttctcagttgtatggactctgtttggcatcccgagtgcttcaggtgttatgcttgtgatagaccaatatcagagtatgagtttgctgttcatgaaaaccatgcctaccacaggccctgctacaaggagcgtttccatcctaaatgtgatgtttgcagtagctttattcccacagataaaaatggcctcattgaataccgggcccatcctttttggatgcagaagtattgtccttcccatgaaaatgatggtacacctaggtgctgcagttgtgaacgaatggagccaaaggacagtcaatacataacattagatgatggccggagactctgcttggagtgtctgcatactgctattatggagaccaatgaatgccagccactgtacattgatattcaagaattttatgagggtatgaacatgaaagtagagcaacaagttcccttgcttttggttgagcgacaagctttaaatgaagccatggaagcagagaaatctgtgcaccaccttcctgaaacaagaggcctctgcctatctgaggagcagattgtcagaactatattgaaaggaccaattggaccaggcaacagaatcatagatatggtcacaggaccatacaaactcattagacggtgtgaagtgactgcaattcttatactgtacgggctgccaaggctgctaactggctcgattctggctcatgagatgatgcatgcttacctccgacttaaaggataccgaaccctgagtccagaggttgaagaaggcatctgtcaggttctagctcatctttggcttgagtcagaaatcacatcaggttctggtagcatgtcaaccacctcagatgcgtcatcgtcatcttcaacatcttcatcatcgaaaaagggcgcaaagacggaatttgaaaaaagactcggggagttcttcaagtaccaaattgaaacagattcttctgtcgcttatggagatgggtttcgagcaggcatgcgagccattgagcggtacggcttgagaagcacccttgatcatatcaagatgacggggtcttttccatgctgaagctggtttttttttacctcggcttggatatgggtatacatattttttttggagaacttttggttcaggttatacatacgaaaagccgaacttctgtgtcgagaagaggcataaggatttagctatactgtccattgcaggaaaaaaaactgtttcccttttcaattataaaatttcacagtgcagacatgaaggtatgtggtctttagcttggccaaccttgtggaatgctgtcacttgatgcaaaagaaatttcgaatacatatgctttgctgtgcttgaaatgcaatggttggatgctatgctcttcttta

SEQ ID NO: 10532 - DNA, 2784 bp, Zea Mays
ctatttctttgctgcacctgcacctccgcttcccgtccatatcacgctttgatcgcttcttttttctctccatcatttctccccgtttcgtctcgcttcttttctgtcgcctcccgtttcgtctatctccggccggcctttctgctgcaaggaaaccaatattgtttgctggatctttcaaaaagggaaaccgaattcccgagagcgagcagcagggaatctctgctgaatccgtaggctccgaattggagctggaagtgtagtgatttcctgattggggacataaggtggggtttgtccctactccccagtgagctccacgcggtccctgctgttcttccagtcaaaattctgtacccttcggtgctggggtcaaggaactaggcgtgttgtcctgaactcttgattcctgcttcatggaaattgtatatgtttttctctgaattcaaaatcgtccctattctcccaaagctttctgagcgcaggaagaaggatattgtccctctccaaaactataaacatgggttggttgagtaaaatatttaaaggtccagtaaatagagtttcaagaggacactacaacgggaactcccatgaaggctattcagctcagcacactaaatcatatgtactgctcagttgcagcttatcctcttaatctttatctttactggtgcaaattagttaatttaagtagaacctaatataaaaaatgaagaaaagaatcatagtgcactgaaatgtgcccccaatattatatactatgagttgcttagtgcacttgccgtatttgtttacttaatttgaaatgggtccttccctatttctaataaataatttttattaaagtatattgttggcatgcctgcctggaaaaatataagtagtgaacaacttaccaatctgtgcttgactaatgaggatccacagtattttttaatgtatatcaggactcacaacaggttgcatgttcctcagtcggagaggaaaggagtagcactggatgtgctttttgcatacttaaccgttccctgcttttttactgtataattaaaatttaatgtagggtgtgcatggcaatgaggacgaagacatggatcatgctattgcattatccttatcagaggaagatcaaaggaagggaaagaccattgataccgggcatcatttagatgaagatgaacagattgcacaggctctgcaagaaaatattggtcataacctagctgaagacgaacagcttgcacgggctctgcaagaaagtatgaatgatggacctcctcgtcagcacattccagttgaagatgttaactcagaaagtactccagcaagcatcttgccctcaaatattttccgcacaagtggcttgagggtttgtgctggatgcagaagtccaattggccgcggtcggtttctcagttgtatggactctgtttggcatcccgagtgcttcaggtgttatgcttgtgatagaccaatatcagagtatgagtttgctgttcatgaaaaccatgcctaccacaggccctgctacaaggagcgtttccatcctaaatgtgatgtttgcagtagctttattcccacagataaaaatggcctcattgaataccgggcccatcctttttggatgcagaagtattgtccttcccatgaaaatgatggtacacctaggtgctgcagttgtgaacgaatggagccaaaggacagtcaatacataacattagatgatggccggagactctgcttggagtgtctgcatactgctattatggagaccaatgaatgccagccactgtacattgatattcaagaattttatgagggtatgaacatgaaagtagagcaacaagttcccttgcttttggttgagcgacaagctttaaatgaagccatggaagcagagaaatctgtgcaccaccttcctgaaacaagaggcctctgcctatctgaggagcagattgtcagaactatattgaaaggaccaattggaccaggcaacagaatcatagatatggtcacaggaccatacaaactcattagacggtgtgaagtgactgcaattcttatactgtacgggctgccaaggctgctaactggctcgattctggctcatgagatgatgcatgcttacctccgacttaaaggataccgaaccctgagtccagaggttgaagaaggcatctgtcaggttctagctcatctttggcttgagtcagaaatcacatcaggttctggtagcatgtcaaccacctcagatgcgtcatcgtcatcttcaacatcttcatcatcgaaaaagggcgcaaagacggaatttgaaaaaagactcggggagttcttcaagtaccaaattgaaacagattcttctgtcgcttatggagatgggtttcgagcaggcatgcgagccattgagcggtacggcttgagaagcacccttgatcatatcaagatgacggggtcttttccatgctgaagctggtttttttttacctcggcttggatatgggtatacatattttttttggagaacttttggttcaggttatacatacgaaaagccgaacttctgtgtcgagaagaggcataaggatttagctatactgtccattgcaggaaaaaaaactgtttcccttttcaattataaaatttcacagtgcagacatgaaggtatgtggtctttagcttggccaaccttgtggaatgctgtcacttgatgcaaaagaaatttcgaatacatatgctttgctgtgcttgaaatgcaatggttggatgctatgctcttcttta

SEQ ID NO: 10533 - DNA, 2263 bp, Zea Mays
ctatttctttgctgcacctgcacctccgcttcccgtccatatcacgctttgatcgcttcttttttctctccatcatttctccccgtttcgtctcgcttcttttctgtcgcctcccgtttcgtctatctccggccggcctttctgctgcaaggaaaccaatattgtttgctggatctttcaaaaagggaaaccgaattcccgagagcgagcagcagggaatctctgctgaatccgtaggctccgaattggagctggaagtgtagtgatttcctgattggggacataaggtggggtttgtccctactccccagtgagctccacgcggtccctgctgttcttccagtcaaaattctgtacccttcggtgctggggtcaaggaactaggcgtgttgtcctgcgcaggaagaaggatattgtccctctccaaaactataaacatgggttggttgagtaaaatatttaaaggtccagtaaatagagtttcaagaggacactacaacgggaactcccatgaaggctattcagctcagcacactaaatcatatggtgtgcatggcaatgaggacgaagacatggatcatgctattgcattatccttatcagaggaagatcaaaggaagggaaagaccattgataccgggcatcatttagatgaagatgaacagattgcacaggctctgcaagaaaatattggtcataacctagctgaagacgaacagcttgcacgggctctgcaagaaagtatgaatgatggacctcctcgtcagcacattccagttgaagatgttaactcagaaagtactccagcaagcatcttgccctcaaatattttccgcacaagtggcttgagggtttgtgctggatgcagaagtccaattggccgcggtcggtttctcagttgtatggactctgtttggcatcccgagtgcttcaggtgttatgcttgtgatagaccaatatcagagtatgagtttgctgttcatgaaaaccatgcctaccacaggccctgctacaaggagcgtttccatcctaaatgtgatgtttgcagtagctttattcccacagataaaaatggcctcattgaataccgggcccatcctttttggatgcagaagtattgtccttcccatgaaaatgatggtacacctaggtgctgcagttgtgaacgaatggagccaaaggacagtcaatacataacattagatgatggccggagactctgcttggagtgtctgcatactgctattatggagaccaatgaatgccagccactgtacattgatattcaagaattttatgagggtatgaacatgaaagtagagcaacaagttcccttgcttttggttgagcgacaagctttaaatgaagccatggaagcagagaaatctgtgcaccaccttcctgaaacaagaggcctctgcctatctgaggagcagattgtcagaactatattgaaaggaccaattggaccaggcaacagaatcatagatatggtcacaggaccatacaaactcattagacggtgtgaagtgactgcaattcttatactgtacgggctgccaaggctgctaactggctcgattctggctcatgagatgatgcatgcttacctccgacttaaaggataccgaaccctgagtccagaggttgaagaaggcatctgtcaggttctagctcatctttggcttgagtcagaaatcacatcaggttctggtagcatgtcaaccacctcagatgcgtcatcgtcatcttcaacatcttcatcatcgaaaaagggcgcaaagacggaatttgaaaaaagactcggggagttcttcaagtaccaaattgaaacagattcttctgtcgcttatggagatgggtttcgagcaggcatgcgagccattgagcggtacggcttgagaagcacccttgatcatatcaagatgacggggtcttttccatgctgaagctggtttttttttacctcggcttggatatgggtatacatattttttttggagaacttttggttcaggttatacatacgaaaagccgaacttctgtgtcgagaagaggcataaggatttagctatactgtccattgcaggaaaaaaaactgtttcccttttcaattataaaatttcacagtgcagacatgaaggtatgtggtctttagcttggccaaccttgtggaatgctgtcacttgatgcaaaagaaatttcgaatacatatgctttgctgtgcttgaaatgcaatggttggatgctatgctcttcttta

SEQ ID NO: 10534 - DNA, 3751 bp, Zea Mays
cgggctcccaccctatttctttgctgcacctgcacctccgcttcccgtccatatcacgctttgatcgcttcttttttctctccatcatttctccccgtttcgtctcgcttcttttctgtcgcctcccgtttcgtctatctccggccggcctttctgctgcaaggaaaccaatattgtttgctggatctttcaaaaagggaaaccgaattcccgagagcgagcagcagggaatctctgctgaatccgtaggctccgaattggagctggaagtgtagtgatttcctgattggggacataaggtggggtttgtccctactccccagtgagctccacgcggtccctgctgttcttccagtcaaaattctgtacccttcggtgctggggtcaaggaactaggcgtgttgtcctgaactcttgattcctgcttcatggaaattgtatatgtttttctctgaattcaaaatcgtccctattctcccaaagctttctgaggtaaggataagataatgacgtcgtgacctgtttcaatttattttgtagtctctttctcttttgaaggcgcacttgcattctctctgctgcttcttttagtactggttaccgaaatttggactctactgtttggtgaccagtgatttccacagagtttgaaaaaacatttatagatacagggctgcatatatagttttggtttgtgaggttctcaaaggacaatttcatgtgtagtaaatctaagagacatgttaagccattttgttgaatttggatacttttgatttaaggactccagacgcggcatgcatatctgtgtaggtgatcaattgctggtctcttcattgtaacttacataacaagccactcgcctatcttactgttgttcaaatgcaactgcgaaatcttcagttatctttccattggtctggctgtcctttggggttacttgtgtgcattttgcattctgaatgccgtgcatacagaaccatcaatatttcatcattgtggtggcacaccagcctatttgtttttttatcgcaccactaaaagtaatgtagagtgcactagcgagagtggcacttttctacatagttgataatattcactttcaaagcaaagagcactctgtaaattgtttaagtattgacaaaattttaggactgattaatgctagaaacatgatggtgtttccaacagtctgcattgatgcttactgtgggaatctacattagaagagtaatatggagatagaatcgctacgcaattgcagaatataatttttaaggcatatggattaatttataacctatggatgtgcttgatcatcgaaaattcatgagccttcaccttcacccctgaggtctgtgcttgctattggaatatggcaacatgcattgcaaaagtagtaagaaaaacagagctgctatacatcaatcaatgaaatttttagagaccacatggaatttctagcttgttaatgtgcttgaagattcttccaccttcatcttttgcttagcatgtgtcactagtgcctcacatcatacattcagcaaagctcaatgcctgttttgctggatgtgcttatatttctaagcggtgaatgtttttagatttctctcatattgattccagtttcaaggccacatgggacataagggagaagcaagcaaagagctgatagtgaaggtgccatgtgtgtttggaacagggtaggaactaatagtggagagtgatttttatttgatgtagcactaacatttaagggtcaactactacataagaaatactagtgttttatatagacagaccctcaattgccttctttaagtgtgaagaactcatatgcactcattttctccaaatatggttctcaatgcatcttgttttgcagcgcaggaagaaggatattgtccctctccaaaactataaacatgggttggttgagtaaaatatttaaaggtccagtaaatagagtttcaagaggacactacaacgggaactcccatgaaggctattcagctcagcacactaaatcatatggtgtgcatggcaatgaggacgaagacatggatcatgctattgcattatccttatcagaggaagatcaaaggaagggaaagaccattgataccgggcatcatttagatgaagatgaacagattgcacaggctctgcaagaaaatattggtcataacctagctgaagacgaacagcttgcacgggctctgcaagaaagtatgaatgatggacctcctcgtcagcacattccagttgaagatgttaactcagaaagtactccagcaagcatcttgccctcaaatattttccgcacaagtggcttgagggtttgtgctggatgcagaagtccaattggccgcggtcggtttctcagttgtatggactctgtttggcatcccgagtgcttcaggtgttatgcttgtgatagaccaatatcagagtatgagtttgctgttcatgaaaaccatgcctaccacaggccctgctacaaggagcgtttccatcctaaatgtgatgtttgcagtagctttattcccacagataaaaatggcctcattgaataccgggcccatcctttttggatgcagaagtattgtccttcccatgaaaatgatggtacacctaggtgctgcagttgtgaacgaatggagccaaaggacagtcaatacataacattagatgatggccggagactctgcttggagtgtctgcatactgctattatggagaccaatgaatgccagccactgtacattgatattcaagaattttatgagggtatgaacatgaaagtagagcaacaagttcccttgcttttggttgagcgacaagctttaaatgaagccatggaagcagagaaatctgtgcaccaccttcctgaaacaagaggcctctgcctatctgaggagcagattgtcagaactatattgaaaggaccaattggaccaggcaacagaatcatagatatggtcacaggaccatacaaactcattagacggtgtgaagtgactgcaattcttatactgtacgggctgccaaggctgctaactggctcgattctggctcatgagatgatgcatgcttacctccgacttaaaggataccgaaccctgagtccagaggttgaagaaggcatctgtcaggttctagctcatctttggcttgagtcagaaatcacatcaggttctggtagcatgtcaaccacctcagatgcgtcatcgtcatcttcaacatcttcatcatcgaaaaagggcgcaaagacggaatttgaaaaaagactcggggagttcttcaagtaccaaattgaaacagattcttctgtcgcttatggagatgggtttcgagcaggcatgcgagccattgagcggtacggcttgagaagcacccttgatcatatcaagatgacggggtcttttccatgctgaagctggtttttttttacctcggcttggatatgggtatacatattttttttggagaacttttggttcaggttatacatacgaaaagccgaacttctgtgtcgagaagaggcataaggatttagctatactgtccattgcaggaaaaaaaactgtttcccttttcaattataaaatttcacagtgcagacatgaaggtatgtggtctttagcttggccaaccttgtggaatgctgtcacttgatgcaaaagaaatttcgaatacatatgctttgctgtgcttgaaatgcaatggttggatgctatgctcttcttta

SEQ ID NO: 10535 - DNA, 2367 bp, Zea Mays
ctccctcctggactcgggctcccaccctatttctttgctgcacctgcacctccgcttcccgtccatatcacgctttgatcgcttcttttttctctccatcatttctccccgtttcgtctcgcttcttttctgtcgcctcccgtttcgtctatctccggccggcctttctgctgcaaggaaaccaatattgtttgctggatctttcaaaaagggaaaccgaattcccgagagcgagcagcagggaatctctgctgaatccgtaggctccgaattggagctggaagtgtagtgatttcctgattggggacataaggtggggtttgtccctactccccagtgagctccacgcggtccctgctgttcttccagtcaaaattctgtacccttcggtgctggggtcaaggaactaggcgtgttgtcctgaactcttgattcctgcttcatggaaattgtatatgtttttctctgaattcaaaatcgtccctattctcccaaagctttctgaggaagaaggatattgtccctctccaaaactataaacatgggttggttgagtaaaatatttaaaggtccagtaaatagagtttcaagaggacactacaacgggaactcccatgaaggctattcagctcagcacactaaatcatatggtgtgcatggcaatgaggacgaagacatggatcatgctattgcattatccttatcagaggaagatcaaaggaagggaaagaccattgataccgggcatcatttagatgaagatgaacagattgcacaggctctgcaagaaaatattggtcataacctagctgaagacgaacagcttgcacgggctctgcaagaaagtatgaatgatggacctcctcgtcagcacattccagttgaagatgttaactcagaaagtactccagcaagcatcttgccctcaaatattttccgcacaagtggcttgagggtttgtgctggatgcagaagtccaattggccgcggtcggtttctcagttgtatggactctgtttggcatcccgagtgcttcaggtgttatgcttgtgatagaccaatatcagagtatgagtttgctgttcatgaaaaccatgcctaccacaggccctgctacaaggagcgtttccatcctaaatgtgatgtttgcagtagctttattcccacagataaaaatggcctcattgaataccgggcccatcctttttggatgcagaagtattgtccttcccatgaaaatgatggtacacctaggtgctgcagttgtgaacgaatggagccaaaggacagtcaatacataacattagatgatggccggagactctgcttggagtgtctgcatactgctattatggagaccaatgaatgccagccactgtacattgatattcaagaattttatgagggtatgaacatgaaagtagagcaacaagttcccttgcttttggttgagcgacaagctttaaatgaagccatggaagcagagaaatctgtgcaccaccttcctgaaacaagaggcctctgcctatctgaggagcagattgtcagaactatattgaaaggaccaattggaccaggcaacagaatcatagatatggtcacaggaccatacaaactcattagacggtgtgaagtgactgcaattcttatactgtacgggctgccaaggctgctaactggctcgattctggctcatgagatgatgcatgcttacctccgacttaaaggataccgaaccctgagtccagaggttgaagaaggcatctgtcaggttctagctcatctttggcttgagtcagaaatcacatcaggttctggtagcatgtcaaccacctcagatgcgtcatcgtcatcttcaacatcttcatcatcgaaaaagggcgcaaagacggaatttgaaaaaagactcggggagttcttcaagtaccaaattgaaacagattcttctgtcgcttatggagatgggtttcgagcaggcatgcgagccattgagcggtacggcttgagaagcacccttgatcatatcaagatgacggggtcttttccatgctgaagctggtttttttttacctcggcttggatatgggtatacatattttttttggagaacttttggttcaggttatacatacgaaaagccgaacttctgtgtcgagaagaggcataaggatttagctatactgtccattgcaggaaaaaaaactgtttcccttttcaattataaaatttcacagtgcagacatgaaggtatgtggtctttagcttggccaaccttgtggaatgctgtcacttgatgcaaaagaaatttcgaatacatatgctttgctgtgcttgaaatgcaatggttggatgctatgctcttcttta

SEQ ID NO: 10536 - DNA, 2372 bp, Zea Mays
ctccctcctggactcgggctcccaccctatttctttgctgcacctgcacctccgcttcccgtccatatcacgctttgatcgcttcttttttctctccatcatttctccccgtttcgtctcgcttcttttctgtcgcctcccgtttcgtctatctccggccggcctttctgctgcaaggaaaccaatattgtttgctggatctttcaaaaagggaaaccgaattcccgagagcgagcagcagggaatctctgctgaatccgtaggctccgaattggagctggaagtgtagtgatttcctgattggggacataaggtggggtttgtccctactccccagtgagctccacgcggtccctgctgttcttccagtcaaaattctgtacccttcggtgctggggtcaaggaactaggcgtgttgtcctgaactcttgattcctgcttcatggaaattgtatatgtttttctctgaattcaaaatcgtccctattctcccaaagctttctgagcgcaggaagaaggatattgtccctctccaaaactataaacatgggttggttgagtaaaatatttaaaggtccagtaaatagagtttcaagaggacactacaacgggaactcccatgaaggctattcagctcagcacactaaatcatatggtgtgcatggcaatgaggacgaagacatggatcatgctattgcattatccttatcagaggaagatcaaaggaagggaaagaccattgataccgggcatcatttagatgaagatgaacagattgcacaggctctgcaagaaaatattggtcataacctagctgaagacgaacagcttgcacgggctctgcaagaaagtatgaatgatggacctcctcgtcagcacattccagttgaagatgttaactcagaaagtactccagcaagcatcttgccctcaaatattttccgcacaagtggcttgagggtttgtgctggatgcagaagtccaattggccgcggtcggtttctcagttgtatggactctgtttggcatcccgagtgcttcaggtgttatgcttgtgatagaccaatatcagagtatgagtttgctgttcatgaaaaccatgcctaccacaggccctgctacaaggagcgtttccatcctaaatgtgatgtttgcagtagctttattcccacagataaaaatggcctcattgaataccgggcccatcctttttggatgcagaagtattgtccttcccatgaaaatgatggtacacctaggtgctgcagttgtgaacgaatggagccaaaggacagtcaatacataacattagatgatggccggagactctgcttggagtgtctgcatactgctattatggagaccaatgaatgccagccactgtacattgatattcaagaattttatgagggtatgaacatgaaagtagagcaacaagttcccttgcttttggttgagcgacaagctttaaatgaagccatggaagcagagaaatctgtgcaccaccttcctgaaacaagaggcctctgcctatctgaggagcagattgtcagaactatattgaaaggaccaattggaccaggcaacagaatcatagatatggtcacaggaccatacaaactcattagacggtgtgaagtgactgcaattcttatactgtacgggctgccaaggctgctaactggctcgattctggctcatgagatgatgcatgcttacctccgacttaaaggataccgaaccctgagtccagaggttgaagaaggcatctgtcaggttctagctcatctttggcttgagtcagaaatcacatcaggttctggtagcatgtcaaccacctcagatgcgtcatcgtcatcttcaacatcttcatcatcgaaaaagggcgcaaagacggaatttgaaaaaagactcggggagttcttcaagtaccaaattgaaacagattcttctgtcgcttatggagatgggtttcgagcaggcatgcgagccattgagcggtacggcttgagaagcacccttgatcatatcaagatgacggggtcttttccatgctgaagctggtttttttttacctcggcttggatatgggtatacatattttttttggagaacttttggttcaggttatacatacgaaaagccgaacttctgtgtcgagaagaggcataaggatttagctatactgtccattgcaggaaaaaaaactgtttcccttttcaattataaaatttcacagtgcagacatgaaggtatgtggtctttagcttggccaaccttgtggaatgctgtcacttgatgcaaaagaaatttcgaatacatatgctttgctgtgcttgaaatgcaatggttggatgctatgctcttcttta

SEQ ID NO: 10537 - DNA, 1622 bp, Zea Mays
aacaatcaaaaatccagctggccccaaatggctggttcttggctactccacctgtcgccgtttcgtagcgctttgaaaattttcccttctcaagagcacatgggaaacagtacacatgaacgctcaaaagccgcagagaaatttcggaggccagtagtattcgtatcgaaatccgataggtcctctctgtggctgaaacctggaagtaaccctcgaccgttcgaacacaacacagctgtataaaaaaaaagggctcctttgctatctcctccacgctagatcgatgatcaggaacgtacaaagggttcagttcagttttcagtgagtcggcatatgggcaactgcagcagcagcagcggcttcttctctcttccgaaacggggaagcaagctactcaaactcaacaatggcatggtctcggtcgacgatgagggtgggactcacgaagggataaagaccattccggtgcagagagcctgcgagttcaccacgaactccgtgctctgcgtctgcatcgtcacttggaacatgaacagcaagatgtccgcggaagatgtggcgaagctggtgagctccgacaggaagttcgatctgctggtcgtcgggctgcaggaggcgccgaagccagacgtttcaagggtcctgcaggaggcgttggcggggacacacgtgctgttgggtcagaagagcatgcagtctctccggatgcttcttttcggttcaaggagctcggagaagtacatcagagagatgaaggtggacaaacacgcggttgggggttgcgggggtatcatcgggaggaagaaaggagcggtggccatgtacatcaacttcagcgggatccggatggtcttcgtgtcctgccatcttgcagctcacgagcacaaggtggagaagaggaacgcggagttccagcacatctcgcagtcgctcttcgccaggtacggcgcgccgacgccgtacgcgcagtctgccgacataacggtgtggctgggcgacctcaactacaggctccaagggataagctcgacaccggcgaggaagatgatcgaggagaaccgccagagcaggcagagaccagctgctgcaagaggccgagaagggccaggtgttcagcggctactgcgaggggacgctgtcgtttaagcccacgtacaagtacgacgtcgggggcagcgtctacgacaccagctacaaggtacgagtgccttcgtggacggacaggatactgttcaaggttggccagtcttcaggcctggatgcagtgctgagctcgtacgaatcactcgactgtgtccggagctccgaccacaagcctgtgaaggcgcatctctgtctcaaagtacgcagtgatggtgatgctgactgatatccagtactggcggttacttctgccgattaacatgacatgctacgatgaaaatgttctagtttggaatggtgattatactctagtatattttataacatggcgctcgatcttagcttgtgggccaattgtttcagaacgtgccattctttcttattctattttctccccttttgtttctccttgtacaactatggctatctatactacttattaaggctctaagggtagcctgccttttttcgttctgcca

SEQ ID NO: 10538 - DNA, 433 bp, Zea Mays
gcgaacgacggtaagcaaccggtcaacccatttgggtcggaggcccattcgtctccgaaatccagagtgggacctgagcgtaaatagaacccgagcccctctccgcctccctccccgccgcacagcctccacagcccgaaaccctcgccgccgatcggtttcggagaagagaagcaaatcaagatgtttctcggctcgctcccgcggcgcccgagcaaggaggctgcgtacaagcagctgcggtcgcacatcatcatcatggcctcctgcgccgccgtcatccgcgccaccccttacatcctccatttcctcgcccgcgacggcgacatccaggaactcaagctcgatctgtaggcccgtccgttgcttccccacctccagagaatctacgggtcgggactgcacctagagctttacaaatgcaaaaagccaa

SEQ ID NO: 10539 - DNA, 1027 bp, Zea Mays
gttcgcactacggtgtggtagtagtggcgagcatggacaagccaagttgccagcagcagcagcagctagcagaatgcaggcagctgccgggtcgccggcagggaagcatgctgaggtagcctggttcttgcggccacccttggcacaccagagtagtggtggtggtggtggtggtggggcggtgccgcttccgctgccgctgccctgcccctacctcatgtctgcccaccacaaccgctacttgctctcacagaatcagggatggaggaccagaggcgcgcatcagcaagacgctgccgcccccccgccgctcgtcctaggccagcaggacagtgcgcggcgtctgcatccaggcttccccgacacggccatcagcagcagcagaccgtcatcctggagcgcaggcgtggcaagccgctggtcgtcgtcgacggcggcggcgccttcgccgtcaagtggcaggagtagcatcagcagcggcacggaacagccagcagcatgcagctggacgatgatgacgacgaacaagcagcagcagcagccgccgccgtcgacgtcatcatcatcaagggtcgtcgcggtaccgaacctggagatgagcctggggaggcaggggtggcaacacgacctgcaggatcatcatccgcagcagcagcagcagcagcgcagcggggagtccacggcgccaaaagagctgacccccggcctcctcaagtgcttgtgaaataataatgatagctaatacttgatcggctaataatcacttatataattccaccgtcgagatgagcttgcgagaggtgttcaaggcttggaagcaaattatcgaccgcgacgttagctagagacgacgttgtactcgtttggtgctaccggcttcacgtacgtagttgttttctactcctcccatctatatccattattagctatatatttagcttcattttctggtatatgcatgtaatttgagctgatgtggagacgacgactgttagaaataaacgagctacctttctcaatatatata

SEQ ID NO: 10540 - DNA, 2798 bp, Zea Mays
ctaaaaccctaaaccgcacaaaaccgcctacgccattccgctgtccgcaatccactccctcctcccacgaaactcttggccatggcttggcgcggcgccgcctcccgctcaatcttcgccgccgtccgtgcccgcgccgcatcctcctcctcctcctcagcggccacgcgcctccgctcggcggctccaattgccgccaccccgcgccgcaccgtccccgcctttgctttcgcggccgcgaggccgttggcggcgatggcggggtaccccgcggcggtcgcggtgaggctcaccgggcactcggcgacgagcgtgcgggcgtgctgtgagctctcccagggtaccctcttctgccgcacttgtcaggatcgttagcaagttagtgatcatgcatcatgatatgtcatcatcgtatgtactgtatatccgtgggcacctatggttgctcattttgtccaagatttgtaatccttatatttgttcaattcgtgttatgcaatgatcctatgcatgtgccttggtagcattgctcctgtttcatgggcagcagcctaagaattttgcagagttgaaccaggaatgggttgttgcttgaggtattaaactaaactatgtattttcttgcatgcttatgtcatgtttctgattcagactgattggtgaaatgttttttatgataataattagaattagttcactgagtgttcaagtatctttcctggtgggtggtattgggtggaaatgggttggtgtggcacctgtgtaccaaaaatgtgcattattagtttattacctacctgtactaggagtcagttgattgtaagagaatttcagcatcatgacaatttggggaaatgggaaatctttctgcaagaaatgtatggggactatttttgctctcacatccatttgcagccatgaaaaaatcttcccttttttagttttctgagcaggccacactcagcagatggttaagcacacaatgtttctgttacagtgatttagataatgcttattagttctttacttatttttaattattattttgcccttctagactgttaaccttttgaccatttttaataatgtaactggtcaagtttgttgctcttgttcatgtttggtttcagctctagtgtaccccaactttcttggcagttggcactaaaaggctgtgttgttgattgtaacatctggatatatgctgacttccctacctgttgtttcttcattgactactaaccatagcagtttgttgtttgtcctttgtaaagttttttgagaactaatacaagaaaaaaattgggatttgataggccaaaatgggaaggatcggtgatgaagagattagacagaatgatttgtatcctattgtataaaatgatgtaggtccttttattttcctgtgtgttatctatcttaagaaattagaaggatataatatgcattatttgcgagtttgatagatttttgtttcattggattagtgtattctgagattttggcgtatatttgttttacttcttaacagtattcaatctttcgagataaaccgcttcaattgttttctaaacgacattagacaaaatatgctattttttagcgaaactgcaacatatatgctgcactgctgattttgatgatgtttgaagttttcccaaacgtgctattattttcaacaaatatgtacgcaactctaactataagttagcttcatagtcttggtgcactatagatgttggtgattttgtccattgttatgtttattgatctctaaggttcggtgcaagtactactgtgcatccattatttatacaatcatgggaatacttttgtactcatgcacatattcacataaatggttcactgaatattttatgtgtccaggaatttgcccttgcaatacgattttgctgaacttgtgttacaaagttgcatatgcatatggtttgcaggtgtgaaatataattttagttgtcccaatatttgtgtgatgcattgcttatcaaattttgacattaaaacgtgcaagcgattactataccaatggtccccacatgcattagctcaatataattagttttataataaggttgatatgaggatttttgtggtctggatctattaggaaatgacgatgatgcatgatgcttgggaagcagttttaaagcatggaaaaggcacttgaatgcacacttttgtcttccaatgcaagggtaggatctctcgtcgggcttgcggcctttttcctgcattttgcagagtgcctcgtgtgtcggcaaacggacagtacacttgctgcaactaaaatataaacaagcctatgttagcctgctacgcagtacgcactgtgttcgtgcatgttttcatttgaccttgtttccatgatgcttcgacgtgttacgcgtgctcgtgcttcttgctgtgtcatcactggtccacattttcttgcggaaagtgttcctttgtacgagcttatgaaaccagtgtgcacaagcgacggacggatttgtaccatccagaacgatagtgatccgttttaccaactcctgaaaccagctgtgtaaagtgttccttcgtcgatgctgtgggcgctgacgaactccttccagcctactccgtcactgtctattgcctactccgacgctccatgcttcgccacttgggggcttcagactgatgacctttcgatgcggccgttgaaattgttggcaaatcttgcaggcttctcgtgcaaggaaggagactaacaaaatgtgaagttacttttgatgagactagtctaggaactagttcag

SEQ ID NO: 10541 - DNA, 2190 bp, Zea Mays
ctaaaaccctaaaccgcacaaaaccgcctacgccattccgctgtccgcaatccactccctcctcccacgaaactcttggccatggcttggcgcggcgccgcctcccgctcaatcttcgccgccgtccgtgcccgcgccgcatcctcctcctcctcctcagcggccacgcgcctccgctcggcggctccaattgccgccaccccgcgccgcaccgtccccgcctttgctttcgcggccgcgaggccgttggcggcgatggcggggtaccccgcggcggtcgcggtgaggctcaccgggcactcggcgacgagcgtgcgggcgtgctgtgagctctcccagggtaccctcttctgccgcacttgtcaggatcgttagcaagttagtgatcatgcatcatgatatgtcatcatcgtatgtactgtatatccgtgggcacctatggttgctcattttgtccaagatttgtaatccttatatttgttcaattcgtgttatgcaatgatcctatgcatgtgccttggtagcattgctcctgtttcatgggcagcagcctaagaattttgcagagttgaaccaggaatgggttgttgcttgaggaatttgcccttgcaatacgattttgctgaacttgtgttacaaagttgcatatgcatatggtttgcaggtgtgaaatataattttagttgtcccaatatttgtgtgatgcattgcttatcaaattttgacattaaaacgtgcaagcgattactataccaatggtccccacatgcattagctcaatataattagttttataataaggttgatatgaggatttttgtggtctggatctattaggaaatgacgatgatgcatgatgcttgggaagcagttttaaagcatggaaaaggtgctgctgtgataagtgaactatttttcttgttactttggtaatgcacctgatgaagaaaccatccatcgaatgcaaacaactagaatagattgattgaatattaaaatccgggacaacttagggagcctgaaagaaacgctcatattttgttgaaagtaaaatcacagaccttgaggaggctatatcctgccacatcacttgatgattagggacttatctaccatgtctgtcaaggccaatactgttaagttctctgccactgtgcagtgtcctgcatgtcatagtcataagcatttatagtctcaactcttttttttcgttctttctgtatatatgtttatggtctgaggtatctgcttgtccaccctccccaccatagcactatagatagacattatacttggattatattaaacgatatacaagtcctttttttttatcttagcatgcaccttcagtgagtttgattttttaaaaaaggaaattatgtgaacggtactcttgttatgccatattttttttttgcattctgacctaattttgtatgaactttttaacgttgggcttaccctgtccgtgttattttgcaggcacttgaatgcacacttttgtcttccaatgcaagggtaggatctctcgtcgggcttgcggcctttttcctgcattttgcagagtgcctcgtgtgtcggcaaacggacagtacacttgctgcaactaaaatataaacaagcctatgttagcctgctacgcagtacgcactgtgttcgtgcatgttttcatttgaccttgtttccatgatgcttcgacgtgttacgcgtgctcgtgcttcttgctgtgtcatcactggtccacattttcttgcggaaagtgttcctttgtacgagcttatgaaaccagtgtgcacaagcgacggacggatttgtaccatccagaacgatagtgatccgttttaccaactcctgaaaccagctgtgtaaagtgttccttcgtcgatgctgtgggcgctgacgaactccttccagcctactccgtcactgtctattgcctactccgacgctccatgcttcgccacttgggggcttcagactgatgacctttcgatgcggccgttgaaattgttggcaaatcttgcaggtatgctgtgcatcaaaagcattttttttgttcttctgtgacatgtttctccctttctttttacccgataataatcatgcttaagttcgtacaatgcgaatgcatgaggctagagaagtcgattcctgtaacacattcagtcgccattgtttcagtgaagtccc

SEQ ID NO: 10542 - DNA, 2168 bp, Zea Mays
ctaaaaccctaaaccgcacaaaaccgcctacgccattccgctgtccgcaatccactccctcctcccacgaaactcttggccatggcttggcgcggcgccgcctcccgctcaatcttcgccgccgtccgtgcccgcgccgcatcctcctcctcctcctcagcggccacgcgcctccgctcggcggctccaattgccgccaccccgcgccgcaccgtccccgcctttgctttcgcggccgcgaggccgttggcggcgatggcggggtaccccgcggcggtcgcggtgaggctcaccgggcactcggcgacgagcgtgcgggcgtgctgtgagctctcccagggtaccctcttctgccgcacttgtcaggatcgttagcaagttagtgatcatgcatcatgatatgtcatcatcgtatgtactgtatatccgtgggcacctatggttgctcattttgtccaagatttgtaatccttatatttgttcaattcgtgttatgcaatgatcctatgcatgtgccttggtagcattgctcctgtttcatgggcagcagcctaagaattttgcagagttgaaccaggaatgggttgttgcttgaggccaaaatgggaaggatcggtgatgaagagattagacagaatgatttgtatcctattgtataaaatgatgtaggtccttttattttcctgtgtgttatctatcttaagaaattagaaggatataatatgcattatttgcgagtttgatagatttttgtttcattggattagtgtattctgagattttggcgtatatttgttttacttcttaacagtattcaatctttcgagataaaccgcttcaattgttttctaaacgacattagacaaaatatgctattttttagcgaaactgcaacatatatgctgcactgctgattttgatgatgtttgaagttttcccaaacgtgctattattttcaacaaatatgtacgcaactctaactataagttagcttcatagtcttggtgcactatagatgttggtgattttgtccattgttatgtttattgatctctaaggttcggtgcaagtactactgtgcatccattatttatacaatcatgggaatacttttgtactcatgcacatattcacataaatggttcactgaatattttatgtgtccaggaatttgcccttgcaatacgattttgctgaacttgtgttacaaagttgcatatgcatatggtttgcaggtgtgaaatataattttagttgtcccaatatttgtgtgatgcattgcttatcaaattttgacattaaaacgtgcaagcgattactataccaatggtccccacatgcattagctcaatataattagttttataataaggttgatatgaggatttttgtggtctggatctattaggaaatgacgatgatgcatgatgcttgggaagcagttttaaagcatggaaaaggcacttgaatgcacacttttgtcttccaatgcaagggtaggatctctcgtcgggcttgcggcctttttcctgcattttgcagagtgcctcgtgtgtcggcaaacggacagtacacttgctgcaactaaaatataaacaagcctatgttagcctgctacgcagtacgcactgtgttcgtgcatgttttcatttgaccttgtttccatgatgcttcgacgtgttacgcgtgctcgtgcttcttgctgtgtcatcactggtccacattttcttgcggaaagtgttcctttgtacgagcttatgaaaccagtgtgcacaagcgacggacggatttgtaccatccagaacgatagtgatccgttttaccaactcctgaaaccagctgtgtaaagtgttccttcgtcgatgctgtgggcgctgacgaactccttccagcctactccgtcactgtctattgcctactccgacgctccatgcttcgccacttgggggcttcagactgatgacctttcgatgcggccgttgaaattgttggcaaatcttgcaggtatgctgtgcatcaaaagcattttttttgttcttctgtgacatgtttctccctttctttttacccgataataatcatgcttaagttcgtacaatgcgaatgcatgaggctagagaagtcgattcctgtaacacattcagtcgccattgtttcagtgaagtccc

SEQ ID NO: 10543 - DNA, 3481 bp, Zea Mays
ctaaaaccctaaaccgcacaaaaccgcctacgccattccgctgtccgcaatccactccctcctcccacgaaactcttggccatggcttggcgcggcgccgcctcccgctcaatcttcgccgccgtccgtgcccgcgccgcatcctcctcctcctcctcagcggccacgcgcctccgctcggcggctccaattgccgccaccccgcgccgcaccgtccccgcctttgctttcgcggccgcgaggccgttggcggcgatggcggggtaccccgcggcggtcgcggtgaggctcaccgggcactcggcgacgagcgtgcgggcgtgctgtgagctctcccagggtaccctcttctgccgcacttgtcaggatcgttagcaagttagtgatcatgcatcatgatatgtcatcatcgtatgtactgtatatccgtgggcacctatggttgctcattttgtccaagatttgtaatccttatatttgttcaattcgtgttatgcaatgatcctatgcatgtgccttggtagcattgctcctgtttcatgggcagcagcctaagaattttgcagagttgaaccaggaatgggttgttgcttgaggtattaaactaaactatgtattttcttgcatgcttatgtcatgtttctgattcagactgattggtgaaatgttttttatgataataattagaattagttcactgagtgttcaagtatctttcctggtgggtggtattgggtggaaatgggttggtgtggcacctgtgtaccaaaaatgtgcattattagtttattacctacctgtactaggagtcagttgattgtaagagaatttcagcatcatgacaatttggggaaatgggaaatctttctgcaagaaatgtatggggactatttttgctctcacatccatttgcagccatgaaaaaatcttcccttttttagttttctgagcaggccacactcagcagatggttaagcacacaatgtttctgttacagtgatttagataatgcttattagttctttacttatttttaattattattttgcccttctagactgttaaccttttgaccatttttaataatgtaactggtcaagtttgttgctcttgttcatgtttggtttcagctctagtgtaccccaactttcttggcagttggcactaaaaggctgtgttgttgattgtaacatctggatatatgctgacttccctacctgttgtttcttcattgactactaaccatagcagtttgttgtttgtcctttgtaaagttttttgagaactaatacaagaaaaaaattgggatttgataggccaaaatgggaaggatcggtgatgaagagattagacagaatgatttgtatcctattgtataaaatgatgtaggtccttttattttcctgtgtgttatctatcttaagaaattagaaggatataatatgcattatttgcgagtttgatagatttttgtttcattggattagtgtattctgagattttggcgtatatttgttttacttcttaacagtattcaatctttcgagataaaccgcttcaattgttttctaaacgacattagacaaaatatgctattttttagcgaaactgcaacatatatgctgcactgctgattttgatgatgtttgaagttttcccaaacgtgctattattttcaacaaatatgtacgcaactctaactataagttagcttcatagtcttggtgcactatagatgttggtgattttgtccattgttatgtttattgatctctaaggttcggtgcaagtactactgtgcatccattatttatacaatcatgggaatacttttgtactcatgcacatattcacataaatggttcactgaatattttatgtgtccaggaatttgcccttgcaatacgattttgctgaacttgtgttacaaagttgcatatgcatatggtttgcaggtgtgaaatataattttagttgtcccaatatttgtgtgatgcattgcttatcaaattttgacattaaaacgtgcaagcgattactataccaatggtccccacatgcattagctcaatataattagttttataataaggttgatatgaggatttttgtggtctggatctattaggaaatgacgatgatgcatgatgcttgggaagcagttttaaagcatggaaaaggtgctgctgtgataagtgaactatttttcttgttactttggtaatgcacctgatgaagaaaccatccatcgaatgcaaacaactagaatagattgattgaatattaaaatccgggacaacttagggagcctgaaagaaacgctcatattttgttgaaagtaaaatcacagaccttgaggaggctatatcctgccacatcacttgatgattagggacttatctaccatgtctgtcaaggccaatactgttaagttctctgccactgtgcagtgtcctgcatgtcatagtcataagcatttatagtctcaactcttttttttcgttctttctgtatatatgtttatggtctgaggtatctgcttgtccaccctccccaccatagcactatagatagacattatacttggattatattaaacgatatacaagtcctttttttttatcttagcatgcaccttcagtgagtttgattttttaaaaaaggaaattatgtgaacggtactcttgttatgccatattttttttttgcattctgacctaattttgtatgaactttttaacgttgggcttaccctgtccgtgttattttgcaggcacttgaatgcacacttttgtcttccaatgcaagggtaggatctctcgtcgggcttgcggcctttttcctgcattttgcagagtgcctcgtgtgtcggcaaacggacagtacacttgctgcaactaaaatataaacaagcctatgttagcctgctacgcagtacgcactgtgttcgtgcatgttttcatttgaccttgtttccatgatgcttcgacgtgttacgcgtgctcgtgcttcttgctgtgtcatcactggtccacattttcttgcggaaagtgttcctttgtacgagcttatgaaaccagtgtgcacaagcgacggacggatttgtaccatccagaacgatagtgatccgttttaccaactcctgaaaccagctgtgtaaagtgttccttcgtcgatgctgtgggcgctgacgaactccttccagcctactccgtcactgtctattgcctactccgacgctccatgcttcgccacttgggggcttcagactgatgacctttcgatgcggccgttgaaattgttggcaaatcttgcaggtatgctgtgcatcaaaagcattttttttgttcttctgtgacatgtttctccctttctttttacccgataataatcatgcttaagttcgtacaatgcgaatgcatgaggctagagaagtcgattcctgtaacacattcagtcgccattgtttcagtgaagtccc

SEQ ID NO: 10544 - DNA, 1425 bp, Zea Mays
ctaaaaccctaaaccgcacaaaaccgcctacgccattccgctgtccgcaatccactccctcctcccacgaaactcttggccatggcttggcgcggcgccgcctcccgctcaatcttcgccgccgtccgtgcccgcgccgcatcctcctcctcctcctcagcggccacgcgcctccgctcggcggctccaattgccgccaccccgcgccgcaccgtccccgcctttgctttcgcggccgcgaggccgttggcggcgatggcggggtaccccgcggcggtcgcggtgaggctcaccgggcactcggcgacgagcgtgcgggcgtgctgtgagctctcccagggtaccctcttctgccgcacttgtcaggatcgttagcaagttagtgatcatgcatcatgatatgtcatcatcgtatgtactgtatatccgtgggcacctatggttgctcattttgtccaagatttgtaatccttatatttgttcaattcgtgttatgcaatgatcctatgcatgtgccttggtagcattgctcctgtttcatgggcagcagcctaagaattttgcagagttgaaccaggaatgggttgttgcttgaggccaaaatgggaaggatcggtgatgaagagattagacagaatgatttgtatcctattgtataaaatgatgaaatgacgatgatgcatgatgcttgggaagcagttttaaagcatggaaaaggcacttgaatgcacacttttgtcttccaatgcaagggtaggatctctcgtcgggcttgcggcctttttcctgcattttgcagagtgcctcgtgtgtcggcaaacggacagtacacttgctgcaactaaaatataaacaagcctatgttagcctgctacgcagtacgcactgtgttcgtgcatgttttcatttgaccttgtttccatgatgcttcgacgtgttacgcgtgctcgtgcttcttgctgtgtcatcactggtccacattttcttgcggaaagtgttcctttgtacgagcttatgaaaccagtgtgcacaagcgacggacggatttgtaccatccagaacgatagtgatccgttttaccaactcctgaaaccagctgtgtaaagtgttccttcgtcgatgctgtgggcgctgacgaactccttccagcctactccgtcactgtctattgcctactccgacgctccatgcttcgccacttgggggcttcagactgatgacctttcgatgcggccgttgaaattgttggcaaatcttgcaggtatgctgtgcatcaaaagcattttttttgttcttctgtgacatgtttctccctttctttttacccgataataatcatgcttaagttcgtacaatgcgaatgcatgaggctagagaagtcgattcctgtaacacattcagtcgccattgtttcagtgaagtccc

SEQ ID NO: 10545 - DNA, 1169 bp, Zea Mays
ctaaaaccctaaaccgcacaaaaccgcctacgccattccgctgtccgcaatccactccctcctcccacgaaactcttggccatggcttggcgcggcgccgcctcccgctcaatcttcgccgccgtccgtgcccgcgccgcatcctcctcctcctcctcagcggccacgcgcctccgctcggcggctccaattgccgccaccccgcgccgcaccgtccccgcctttgctttcgcggccgcgaggccgttggcggcgatggcggggtaccccgcggcggtcgcggtgaggctcaccgggcactcggcgacgagcgtgcgggcgtgctgtgagctctcccagggccaaaatgggaaggatcggtgatgaagagattagacagaatgatttgtatcctattgtataaaatgatgaaatgacgatgatgcatgatgcttgggaagcagttttaaagcatggaaaaggcacttgaatgcacacttttgtcttccaatgcaagggtaggatctctcgtcgggcttgcggcctttttcctgcattttgcagagtgcctcgtgtgtcggcaaacggacagtacacttgctgcaactaaaatataaacaagcctatgttagcctgctacgcagtacgcactgtgttcgtgcatgttttcatttgaccttgtttccatgatgcttcgacgtgttacgcgtgctcgtgcttcttgctgtgtcatcactggtccacattttcttgcggaaagtgttcctttgtacgagcttatgaaaccagtgtgcacaagcgacggacggatttgtaccatccagaacgatagtgatccgttttaccaactcctgaaaccagctgtgtaaagtgttccttcgtcgatgctgtgggcgctgacgaactccttccagcctactccgtcactgtctattgcctactccgacgctccatgcttcgccacttgggggcttcagactgatgacctttcgatgcggccgttgaaattgttggcaaatcttgcaggtatgctgtgcatcaaaagcattttttttgttcttctgtgacatgtttctccctttctttttacccgataataatcatgcttaagttcgtacaatgcgaatgcatgaggctagagaagtcgattcctgtaacacattcagtcgccattgtttcagtgaagtccc

SEQ ID NO: 10546 - DNA, 1356 bp, Zea Mays
ctaaaaccctaaaccgcacaaaaccgcctacgccattccgctgtccgcaatccactccctcctcccacgaaactcttggccatggcttggcgcggcgccgcctcccgctcaatcttcgccgccgtccgtgcccgcgccgcatcctcctcctcctcctcagcggccacgcgcctccgctcggcggctccaattgccgccaccccgcgccgcaccgtccccgcctttgctttcgcggccgcgaggccgttggcggcgatggcggggtaccccgcggcggtcgcggtgaggctcaccgggcactcggcgacgagcgtgcgggcgtgctgtgagctctcccagggtaccctcttctgccgcacttgtcaggatcgttagcaagttagtgatcatgcatcatgatatgtcatcatcgtatgtactgtatatccgtgggcacctatggttgctcattttgtccaagatttgtaatccttatatttgttcaattcgtgttatgcaatgatcctatgcatgtgccttggtagcattgctcctgtttcatgggcagcagcctaagaattttgcagagttgaaccaggaatgggttgttgcttgaggaaatgacgatgatgcatgatgcttgggaagcagttttaaagcatggaaaaggcacttgaatgcacacttttgtcttccaatgcaagggtaggatctctcgtcgggcttgcggcctttttcctgcattttgcagagtgcctcgtgtgtcggcaaacggacagtacacttgctgcaactaaaatataaacaagcctatgttagcctgctacgcagtacgcactgtgttcgtgcatgttttcatttgaccttgtttccatgatgcttcgacgtgttacgcgtgctcgtgcttcttgctgtgtcatcactggtccacattttcttgcggaaagtgttcctttgtacgagcttatgaaaccagtgtgcacaagcgacggacggatttgtaccatccagaacgatagtgatccgttttaccaactcctgaaaccagctgtgtaaagtgttccttcgtcgatgctgtgggcgctgacgaactccttccagcctactccgtcactgtctattgcctactccgacgctccatgcttcgccacttgggggcttcagactgatgacctttcgatgcggccgttgaaattgttggcaaatcttgcaggtatgctgtgcatcaaaagcattttttttgttcttctgtgacatgtttctccctttctttttacccgataataatcatgcttaagttcgtacaatgcgaatgcatgaggctagagaagtcgattcctgtaacacattcagtcgccattgtttcagtgaagtccc

SEQ ID NO: 10547 - DNA, 2440 bp, Zea Mays
gcgggtgggtcgtccaaagtagaatccaacggcgcgccgcagctcctccgcccctccgctcccgccgcctatattccttacttgcgttcgttcgtcaagcccttgcacaagcgcgggcggccctccgaccggctgaaaccccggcggcctcctgaagattacggtaccgggatcggtctgagccgccgaggcccgcgcaggcgcttccttatatatcgtttcttggcgtggctaaggtggtggtgaccatccggtgaatatgaacattgtgtgtgaagtatgtggagatattggttacagacaacttctgctatgttgcggagactgtaagcgttatgctgtgcaccagtactgtttggacaaagttgttttcgatgcaacgttgctagaatggttctgttatgaatgcctacaaaggcgtggtgaagttacttgcgtcgcatctctagaacaggtgtcaagtgaaagcccactaagtcatgctcattttggtcctctagtacatcagcgtactactaagagggtggagtcagtaacagggccatattcacccagtgatgactgtgaggaattattttcctaccctggcatagaaagcatcccaagtgttcaagaaataagtgtagatcccattaagacttcaagtatttctgaacatgataccatagaagcagctgcaagcagtgaaagattcacggagtgtcaaaaggctagctcctgtcgcgaggggataactgtgaagatggctatggcgccctcatcatatgagaactcaggagaagacattttctctgaaaatgtatttttggaatatgttttggcatataaatgttatctatctaaagcacaaaagaagagagtaatggagcttattcaggaaattcaacctgaattcacagtttttatatcaataatgcggaggggcaatgtgcgacctccgggtccttttctgataaaagcacaaatgtcactcttgagatgcctgacaagagcaagaagtggcatcccaaattctacagaagagatgtaagcagaacctgcatgcttacgggacagtggctagactttgtctgcgacaatcatgtgcaggagggagatatatgcctccttttaccgacaaaagatgagataagatgcacgtttatggtctatgttcttcatgaaacaactcattcttctagaggtgaggctggctttcaaatgggtggcccatgccctggtgcatctggtgtggcttcagaaatccatgttgaggaggaaccaaccactgaaagtgatatgcgagaaattcctcatgaatctctctcgagaggagactctgatgatcaatttgagcctccatactttgtaccatgcaagagtcctctatctgaatcccaaaagagaatggttgaggagcgagtgcgagctatccgatctgaaattcccatttgtgtggcagtaatgaagaacaacaatgttggtgtcgctcaacgttggatgctagtaagctcaaatcgttttctgtttggtcttgaattgttaatttttaccctcaaggttgcttctctatcaccttaaccttatttcgtttaagtggccatccttttgtcacctgagaactcaccgattcacctgccttcatatgaacaaactctttgctatcaaatcatcaaaatgtaatattttctctataaccatcaacatacaaaattacgaatacaatccaccattataacccctagaagttttctagattattcggagagtttttgaactaccctgtagggctaatttggtgattagggatccctaaaggatccatgggggaggaatcccctcgcaattcaattttgaatagcaagaggatttcttcccctcgggatccccggtcaccaaatcagctcgtagtgtgttgctaactactgatcttaatgcatcaggaattaggttcacgatatggttcggtatatctcccaactaaagggcaaaccatattgctccagtgcggggggacgacatggaaggcaaaattgatgtttcataatggtagaaggtggtttctgaatggaggttggcccaattttgctcgcggcaatggcctgcgtgtgggtgacatctgtctattcgaactgaagaagaaagacagtaagcttaccatggcagtccacatcattcgcagggagaagttttagtttgcactataccaaagtgtggctcctgttctttcggctggtaccctgggcttattgtacttgttctattttgacagtcgtgtggctgatctctcgaaggattagagaccaatctgtaacatctgttggtagctatcgtgccgccttgcttttgcttatgttgtacttaacacccttcttaaagtttcatctgaattaaaagtgatgactattgtttgtcatcgaacatctagtctgtgttctcaatatagtctctcatgcctgtt

SEQ ID NO: 10548 - DNA, 2058 bp, Zea Mays
gcgggtgggtcgtccaaagtagaatccaacggcgcgccgcagctcctccgcccctccgctcccgccgcctatattccttacttgcgttcgttcgtcaagcccttgcacaagcgcgggcggccctccgaccggctgaaaccccggcggcctcctgaagattacggtaccgggatcggtctgagccgccgaggcccgcgcaggcgcttccttatatatcgtttcttggcgtggctaaggtggtggtgaccatccggtgaatatgaacattgtgtgtgaagtatgtggagatattggttacagacaacttctgctatgttgcggagactgtaagcgttatgctgtgcaccagtactgtttggacaaagttgttttcgatgcaacgttgctagaatggttctgttatgaatgcctacaaaggcgtggtgaagttacttgcgtcgcatctctagaacaggtgtcaagtgaaagcccactaagtcatgctcattttggtcctctagtacatcagcgtactactaagagggtggagtcagtaacagggccatattcacccagtgatgactgtgaggaattattttcctaccctggcatagaaagcatcccaagtgttcaagaaataagtgtagatcccattaagacttcaagtatttctgaacatgataccatagaagcagctgcaagcagtgaaagattcacggagtgtcaaaaggctagctcctgtcgcgaggggataactgtgaagatggctatggcgccctcatcatatgagaactcaggagaagacattttctctgaaaatgtatttttggaatatgttttggcatataaatgttatctatctaaagcacaaaagaagagagtaatggagcttattcaggaaattcaacctgaattcacagtttttatatcaataatgcggaggggcaatgtgcgacctccgggtccttttctgggaattaacaaggaatatgcaaatgcacatttcccagataaaagcacaaatgtcactcttgagatgcctgacaagagcaagaagtggcatcccaaattctacagaagagatgtaagcagaacctgcatgcttacgggacagtggctagactttgtctgcgacaatcatgtgcaggagggagatatatgcctccttttaccgacaaaagatgagataagatgcacgtttatggtctatgttcttcatgaaacaactcattcttctagaggtgaggctggctttcaaatgggtggcccatgccctggtgcatctggtgtggcttcagaaatccatgttgaggaggaaccaaccactggggaacatgtttcttcagaaagtgatatgcgagaaattcctcatgaatctctctcgagaggagactctgatgatcaatttgagcctccatactttgtaccatgcaagagtcctctatctgaatcccaaaagagaatggttgaggagcgagtgcgagctatccgatctgaaattcccatttgtgtggcagtaatgaagaacaacaatgttggtgtcgctcaacgttggatgctagaattaggttcacgatatggttcggtatatctcccaactaaagggcaaaccatattgctccagtgcggggggacgacatggaaggcaaaattgatgtttcataatggtagaaggtggtttctgaatggaggttggcccaattttgctcgcggcaatggcctgcgtgtgggtgacatctgtctattcgaactgaagaagaaagacagtaagcttaccatggcagtccacatcattcgcagggagaagttttagtttgcactataccaaagtgtggctcctgttctttcggctggtaccctgggcttattgtacttgttctattttgacagtcgtgtggctgatctctcgaaggattagagaccaatctgtaacatctgttggtagctatcgtgccgccttgcttttgcttatgttgtacttaacacccttcttaaagtttcatctgaattaaaagtgatgactattgtttgtcatcgaacatctagtctgtgttctcaatatagtctctcatgcctgtt

SEQ ID NO: 10549 - DNA, 1915 bp, Zea Mays
gcgggtgggtcgtccaaagtagaatccaacggcgcgccgcagctcctccgcccctccgctcccgccgcctatattccttacttgcgttcgttcgtcaagcccttgcacaagcgcgggcggccctccgaccggctgaaaccccggcggcctcctgaagattacggtaccgggatcggtctgagccgccgaggcccgcgcaggcgcttccttatatatcgtttcttggcgtggctaaggtggtggtgaccatccggtgaatatgaacattgtgtgtgaagtatgtggagatattggttacagacaacttctgctatgttgcggagactgtaagcgttatgctgtgcaccagtgtcaagtgaaagcccactaagtcatgctcattttggtcctctagtacatcagcgtactactaagagggtggagtcagtaacagggccatattcacccagtgatgactgtgaggaattattttcctaccctggcatagaaagcatcccaagtgttcaagaaataagtgtagatcccattaagacttcaagtatttctgaacatgataccatagaagcagctgcaagcagtgaaagattcacggagtgtcaaaaggctagctcctgtcgcgaggggataactgtgaagatggctatggcgccctcatcatatgagaactcaggagaagacattttctctgaaaatgtatttttggaatatgttttggcatataaatgttatctatctaaagcacaaaagaagagagtaatggagcttattcaggaaattcaacctgaattcacagtttttatatcaataatgcggaggggcaatgtgcgacctccgggtccttttctgataaaagcacaaatgtcactcttgagatgcctgacaagagcaagaagtggcatcccaaattctacagaagagatgtaagcagaacctgcatgcttacgggacagtggctagactttgtctgcgacaatcatgtgcaggagggagatatatgcctccttttaccgacaaaagatgagataagatgcacgtttatggtctatgttcttcatgaaacaactcattcttctagaggtgaggctggctttcaaatgggtggcccatgccctggtgcatctggtgtggcttcagaaatccatgttgaggaggaaccaaccactggggaacatgtttcttcagaaagtgatatgcgagaaattcctcatgaatctctctcgagaggagactctgatgatcaatttgagcctccatactttgtaccatgcaagagtcctctatctgaatcccaaaagagaatggttgaggagcgagtgcgagctatccgatctgaaattcccatttgtgtggcagtaatgaagaacaacaatgttggtgtcgctcaacgttggatgctagaattaggttcacgatatggttcggtatatctcccaactaaagggcaaaccatattgctccagtgcggggggacgacatggaaggcaaaattgatgtttcataatggtagaaggtggtttctgaatggaggttggcccaattttgctcgcggcaatggcctgcgtgtgggtgacatctgtctattcgaactgaagaagaaagacagtaagcttaccatggcagtccacatcattcgcagggagaagttttagtttgcactataccaaagtgtggctcctgttctttcggctggtaccctgggcttattgtacttgttctattttgacagtcgtgtggctgatctctcgaaggattagagaccaatctgtaacatctgttggtagctatcgtgccgccttgcttttgcttatgttgtacttaacacccttcttaaagtttcatctgaattaaaagtgatgactattgtttgtcatcgaacatctagtctgtgttctcaatatagtctctcatgcctgtt

SEQ ID NO: 10550 - DNA, 1851 bp, Zea Mays
gcgggtgggtcgtccaaagtagaatccaacggcgcgccgcagctcctccgcccctccgctcccgccgcctatattccttacttgcgttcgttcgtcaagcccttgcacaagcgcgggcggccctccgaccggctgaaaccccggcggcctcctgaagattacggtaccgggatcggtctgagccgccgaggcccgcgcaggcgcttccttatatatcgtttcttggcgtggctaaggtggtggtgaccatccggtgaatatgaacattgtgtgtgaagtatgtggagatattggttacagacaacttctgctatgttgcggagactgtaagcgttatgctgtgcaccatacatcagcgtactactaagagggtggagtcagtaacagggccatattcacccagtgatgactgtgaggaattattttcctaccctggcatagaaagcatcccaagtgttcaagaaataagtgtagatcccattaagacttcaagtatttctgaacatgataccatagaagcagctgcaagcagtgaaagattcacggagtgtcaaaaggctagctcctgtcgcgaggggataactgtgaagatggctatggcgccctcatcatatgagaactcaggagaagacattttctctgaaaatgtatttttggaatatgttttggcatataaatgttatctatctaaagcacaaaagaagagagtaatggagcttattcaggaaattcaacctgaattcacagtttttatatcaataatgcggaggggcaatgtgcgacctccgggtccttttctgataaaagcacaaatgtcactcttgagatgcctgacaagagcaagaagtggcatcccaaattctacagaagagatgtaagcagaacctgcatgcttacgggacagtggctagactttgtctgcgacaatcatgtgcaggagggagatatatgcctccttttaccgacaaaagatgagataagatgcacgtttatggtctatgttcttcatgaaacaactcattcttctagaggtgaggctggctttcaaatgggtggcccatgccctggtgcatctggtgtggcttcagaaatccatgttgaggaggaaccaaccactgaaagtgatatgcgagaaattcctcatgaatctctctcgagaggagactctgatgatcaatttgagcctccatactttgtaccatgcaagagtcctctatctgaatcccaaaagagaatggttgaggagcgagtgcgagctatccgatctgaaattcccatttgtgtggcagtaatgaagaacaacaatgttggtgtcgctcaacgttggatgctagaattaggttcacgatatggttcggtatatctcccaactaaagggcaaaccatattgctccagtgcggggggacgacatggaaggcaaaattgatgtttcataatggtagaaggtggtttctgaatggaggttggcccaattttgctcgcggcaatggcctgcgtgtgggtgacatctgtctattcgaactgaagaagaaagacagtaagcttaccatggcagtccacatcattcgcagggagaagttttagtttgcactataccaaagtgtggctcctgttctttcggctggtaccctgggcttattgtacttgttctattttgacagtcgtgtggctgatctctcgaaggattagagaccaatctgtaacatctgttggtagctatcgtgccgccttgcttttgcttatgttgtacttaacacccttcttaaagtttcatctgaattaaaagtgatgactattgtttgtcatcgaacatctagtctgtgttctcaatatagtctctcatgcctgtt

SEQ ID NO: 10551 - DNA, 2021 bp, Zea Mays
gcgggtgggtcgtccaaagtagaatccaacggcgcgccgcagctcctccgcccctccgctcccgccgcctatattccttacttgcgttcgttcgtcaagcccttgcacaagcgcgggcggccctccgaccggctgaaaccccggcggcctcctgaagattacggtaccgggatcggtctgagccgccgaggcccgcgcaggcgcttccttatatatcgtttcttggcgtggctaaggtggtggtgaccatccggtgaatatgaacattgtgtgtgaagtatgtggagatattggttacagacaacttctgctatgttgcggagactgtaagcgttatgctgtgcaccagtactgtttggacaaagttgttttcgatgcaacgttgctagaatggttctgttatgaatgcctacaaaggcgtggtgaagttacttgcgtcgcatctctagaacaggtgtcaagtgaaagcccactaagtcatgctcattttggtcctctagtacatcagcgtactactaagagggtggagtcagtaacagggccatattcacccagtgatgactgtgaggaattattttcctaccctggcatagaaagcatcccaagtgttcaagaaataagtgtagatcccattaagacttcaagtatttctgaacatgataccatagaagcagctgcaagcagtgaaagattcacggagtgtcaaaaggctagctcctgtcgcgaggggataactgtgaagatggctatggcgccctcatcatatgagaactcaggagaagacattttctctgaaaatgtatttttggaatatgttttggcatataaatgttatctatctaaagcacaaaagaagagagtaatggagcttattcaggaaattcaacctgaattcacagtttttatatcaataatgcggaggggcaatgtgcgacctccgggtccttttctgataaaagcacaaatgtcactcttgagatgcctgacaagagcaagaagtggcatcccaaattctacagaagagatgtaagcagaacctgcatgcttacgggacagtggctagactttgtctgcgacaatcatgtgcaggagggagatatatgcctccttttaccgacaaaagatgagataagatgcacgtttatggtctatgttcttcatgaaacaactcattcttctagaggtgaggctggctttcaaatgggtggcccatgccctggtgcatctggtgtggcttcagaaatccatgttgaggaggaaccaaccactggggaacatgtttcttcagaaagtgatatgcgagaaattcctcatgaatctctctcgagaggagactctgatgatcaatttgagcctccatactttgtaccatgcaagagtcctctatctgaatcccaaaagagaatggttgaggagcgagtgcgagctatccgatctgaaattcccatttgtgtggcagtaatgaagaacaacaatgttggtgtcgctcaacgttggatgctagaattaggttcacgatatggttcggtatatctcccaactaaagggcaaaccatattgctccagtgcggggggacgacatggaaggcaaaattgatgtttcataatggtagaaggtggtttctgaatggaggttggcccaattttgctcgcggcaatggcctgcgtgtgggtgacatctgtctattcgaactgaagaagaaagacagtaagcttaccatggcagtccacatcattcgcagggagaagttttagtttgcactataccaaagtgtggctcctgttctttcggctggtaccctgggcttattgtacttgttctattttgacagtcgtgtggctgatctctcgaaggattagagaccaatctgtaacatctgttggtagctatcgtgccgccttgcttttgcttatgttgtacttaacacccttcttaaagtttcatctgaattaaaagtgatgactattgtttgtcatcgaacatctagtctgtgttctcaatatagtctctcatgcctgtt

SEQ ID NO: 10552 - DNA, 1952 bp, Zea Mays
gcgggtgggtcgtccaaagtagaatccaacggcgcgccgcagctcctccgcccctccgctcccgccgcctatattccttacttgcgttcgttcgtcaagcccttgcacaagcgcgggcggccctccgaccggctgaaaccccggcggcctcctgaagattacggtaccgggatcggtctgagccgccgaggcccgcgcaggcgcttccttatatatcgtttcttggcgtggctaaggtggtggtgaccatccggtgaatatgaacattgtgtgtgaagtatgtggagatattggttacagacaacttctgctatgttgcggagactgtaagcgttatgctgtgcaccagtgtcaagtgaaagcccactaagtcatgctcattttggtcctctagtacatcagcgtactactaagagggtggagtcagtaacagggccatattcacccagtgatgactgtgaggaattattttcctaccctggcatagaaagcatcccaagtgttcaagaaataagtgtagatcccattaagacttcaagtatttctgaacatgataccatagaagcagctgcaagcagtgaaagattcacggagtgtcaaaaggctagctcctgtcgcgaggggataactgtgaagatggctatggcgccctcatcatatgagaactcaggagaagacattttctctgaaaatgtatttttggaatatgttttggcatataaatgttatctatctaaagcacaaaagaagagagtaatggagcttattcaggaaattcaacctgaattcacagtttttatatcaataatgcggaggggcaatgtgcgacctccgggtccttttctgggaattaacaaggaatatgcaaatgcacatttcccagataaaagcacaaatgtcactcttgagatgcctgacaagagcaagaagtggcatcccaaattctacagaagagatgtaagcagaacctgcatgcttacgggacagtggctagactttgtctgcgacaatcatgtgcaggagggagatatatgcctccttttaccgacaaaagatgagataagatgcacgtttatggtctatgttcttcatgaaacaactcattcttctagaggtgaggctggctttcaaatgggtggcccatgccctggtgcatctggtgtggcttcagaaatccatgttgaggaggaaccaaccactggggaacatgtttcttcagaaagtgatatgcgagaaattcctcatgaatctctctcgagaggagactctgatgatcaatttgagcctccatactttgtaccatgcaagagtcctctatctgaatcccaaaagagaatggttgaggagcgagtgcgagctatccgatctgaaattcccatttgtgtggcagtaatgaagaacaacaatgttggtgtcgctcaacgttggatgctagaattaggttcacgatatggttcggtatatctcccaactaaagggcaaaccatattgctccagtgcggggggacgacatggaaggcaaaattgatgtttcataatggtagaaggtggtttctgaatggaggttggcccaattttgctcgcggcaatggcctgcgtgtgggtgacatctgtctattcgaactgaagaagaaagacagtaagcttaccatggcagtccacatcattcgcagggagaagttttagtttgcactataccaaagtgtggctcctgttctttcggctggtaccctgggcttattgtacttgttctattttgacagtcgtgtggctgatctctcgaaggattagagaccaatctgtaacatctgttggtagctatcgtgccgccttgcttttgcttatgttgtacttaacacccttcttaaagtttcatctgaattaaaagtgatgactattgtttgtcatcgaacatctagtctgtgttctcaatatagtctctcatgcctgtt

SEQ ID NO: 10553 - DNA, 2778 bp, Zea Mays
ttcttggccgggaacactgtgtgtgaagtttgtggggatattggttacagacaacttctgctttgttgcagagactgcaagcgttgtgctgtgcaccaatactgtttggacaaagttgtctacgaggcatcattaataaaatggttctgttatgaatgcctacaaaggcgtggtgaagttactcgcatcagttctctagagaagttgtcaagtgaaagaccactaagtcaggtccattctcgttctccagtacagcagctaattaccaagagtgtagagtcagtaagggatgcagggccttggagagatcggaaaaatgaatcaattgcgactaaatatccatctctcaacagaacatatccttcaattaagaagcacactaaaaagaagccgattgtgaaaccaatgggtaactgcacaaatagaaaagtgcgaatggctaaagttaccacccatacaagtgccgaagcgtcacgttcttgtgaaaccattgggacagaatcatctaagagcaaccatgggaagaaccagcaggtggaccatgcaaaccctgtcgcattgaacactgagcagtctttccctttgattgtgaatagcttgggtacattgggagataatcaccagtatcacctcttagaaacaacagaagggttggcttgcaaattcaagaaagttccacaatcactcgcagcaccattgaaaagattagagaagagagacaatgtggttttgggatcaaataatttagggtcatcttgtttcacagctgaccttggaagctcggttcttggaaaaagtggagacaaatcgaatagaatgaaggatattggtgcaaacttgtcttccaaacacaatgatcatggcaatcaggcaaatcaacacactttagttggctcgaagaacatggaaggcaagtctgtaaaggctaaacatactgtggttgatgcacataaaaacacgtcttggacagtggactcactgataaacgtcaaggacaagtctgaagtatatggtgatagtaatagggatatcttaaatgatgtcacagtccagctggatcatagggctagcaatgagttgctgccgagaagcacggccaccaatataccacagctagccactctggaaaacgatgttgtggacacagtcatgccatattcacccaatggtggttgtgaggaatcattttcctgccctggcataaaaaacaccccaagtgttcgagaaagaagtgtagatcccattaatatttcaagtgattctcatgataccatagaagcatccgaaagcagtgaaagattcatggaatgccaaaaagctagcttgtgtcgtcgcaggaaaactgtgaagatggctatggtgtcctcatcatctgaggagtcaggagaagacactatctctgaaaacgtatctttggggtatgttttggcatgtagaagttctctatctaaagcacaaaagaagagagtaacgaagcttattcaggaaattcaacctgaattcacagtttttatatcaataatgcggatgagcaatgtgaaactcccaggtcctcttctgggaattaccaaggaatatgcaattgcacatttcccagataaaaccacaaatgtcactcttgagacgcctggcaagagcaagaagtggcatcccaaattctacaaaagagatgaaagtagaaagaacttgcttatgggacaatggctagactttgtccgtgacaatcatgtgcaggagggagatatctgcctctttttaccgacaaaagatgagataagacacacatttatggtctatattcttcatgaaacaacccattctagatgtggggctggctttcaaagggttggcccatgccttggtggtgcatccagtgcaaagatggcttcagaagttcatattgaggatgaaccaaccgctggagaacatgtttcgtcggacagtgatatgccagaaaattctcatgaacctctggagagcggagactcggatgatccatttgaacctccatactttgtaccatgcaggagtcctctatctaaatcccaaaagagaatggttgagcagcgagtgcgagctatccgatctgaagttcccatttgtgtggcagtaatgaagaacaataacgttggcattgctcagcgttggatgctagaattatgttcacgatatgcttcggtatatctcccaactaaagggcaaaacatattgctccagtgcaaggggaagacgtgggaagccaaaatgatgtttcataatggcagaaggtggtttcttaatggaggttggcccgattttgctcgtggcaatggcctgcgcgtcggtgacatgtgtctattcgaactgaagaagaaaaagagtacgcttaccatggcagtccatatcattcgcaaggagcagttttaggttgggctggcatgtagttaatccatggttgtggctgatctctggatggattagagaccaatctcaatctgtaacgtttgttggtaggctggtagctatctgctgacaacatgttttagcatgatgtatatataacatcctttattatgccgaaatgtcgccttgcttttacttatgtgtacatgtagcacagttttgtttgcttttcaaaatttgattgtacggcagtaggttgaacatgcagcttgagtttcagccgcactaggtcgcctctccacagaaaacagaaagtgaagatggagaatatgcaatgtgtttggaagcaaaactaatttaggtaaacaaatgtaatgaaattctcaaagcggtttg

SEQ ID NO: 10554 - DNA, 2803 bp, Zea Mays
atttaatgagcccacacaagtgtggtacccttcaagtaacactgtgtgtgaagtttgtggggatattggttacagacaacttctgctttgttgcagagactgcaagcgttgtgctgtgcaccaatactgtttggacaaagttgtctacgaggcatcattaataaaatggttctgttatgaatgcctacaaaggcgtggtgaagttactcgcatcagttctctagagaagttgtcaagtgaaagaccactaagtcaggtccattctcgttctccagtacagcagctaattaccaagagtgtagagtcagtaagggatgcagggccttggagagatcggaaaaatgaatcaattgcgactaaatatccatctctcaacagaacatatccttcaattaagaagcacactaaaaagaagccgattgtgaaaccaatgggtaactgcacaaatagaaaagtgcgaatggctaaagttaccacccatacaagtgccgaagcgtcacgttcttgtgaaaccattgggacagaatcatctaagagcaaccatgggaagaaccagcaggtggaccatgcaaaccctgtcgcattgaacactgagcagtctttccctttgattgtgaatagcttgggtacattgggagataatcaccagtatcacctcttagaaacaacagaagggttggcttgcaaattcaagaaagttccacaatcactcgcagcaccattgaaaagattagagaagagagacaatgtggttttgggatcaaataatttagggtcatcttgtttcacagctgaccttggaagctcggttcttggaaaaagtggagacaaatcgaatagaatgaaggatattggtgcaaacttgtcttccaaacacaatgatcatggcaatcaggcaaatcaacacactttagttggctcgaagaacatggaaggcaagtctgtaaaggctaaacatactgtggttgatgcacataaaaacacgtcttggacagtggactcactgataaacgtcaaggacaagtctgaagtatatggtgatagtaatagggatatcttaaatgatgtcacagtccagctggatcatagggctagcaatgagttgctgccgagaagcacggccaccaatataccacagctagccactctggaaaacgatgttgtggacacagtcatgccatattcacccaatggtggttgtgaggaatcattttcctgccctggcataaaaaacaccccaagtgttcgagaaagaagtgtagatcccattaatatttcaagtgattctcatgataccatagaagcatccgaaagcagtgaaagattcatggaatgccaaaaagctagcttgtgtcgtcgcaggaaaactgtgaagatggctatggtgtcctcatcatctgaggagtcaggagaagacactatctctgaaaacgtatctttggggtatgttttggcatgtagaagttctctatctaaagcacaaaagaagagagtaacgaagcttattcaggaaattcaacctgaattcacagtttttatatcaataatgcggatgagcaatgtgaaactcccaggtcctcttctgggaattaccaaggaatatgcaattgcacatttcccagataaaaccacaaatgtcactcttgagacgcctggcaagagcaagaagtggcatcccaaattctacaaaagagatgaaagtagaaagaacttgcttatgggacaatggctagactttgtccgtgacaatcatgtgcaggagggagatatctgcctctttttaccgacaaaagatgagataagacacacatttatggtctatattcttcatgaaacaacccattctagatgtggggctggctttcaaagggttggcccatgccttggtggtgcatccagtgcaaagatggcttcagaagttcatattgaggatgaaccaaccgctggagaacatgtttcgtcggacagtgatatgccagaaaattctcatgaacctctggagagcggagactcggatgatccatttgaacctccatactttgtaccatgcaggagtcctctatctaaatcccaaaagagaatggttgagcagcgagtgcgagctatccgatctgaagttcccatttgtgtggcagtaatgaagaacaataacgttggcattgctcagcgttggatgctagaattatgttcacgatatgcttcggtatatctcccaactaaagggcaaaacatattgctccagtgcaaggggaagacgtgggaagccaaaatgatgtttcataatggcagaaggtggtttcttaatggaggttggcccgattttgctcgtggcaatggcctgcgcgtcggtgacatgtgtctattcgaactgaagaagaaaaagagtacgcttaccatggcagtccatatcattcgcaaggagcagttttaggttgggctggcatgtagttaatccatggttgtggctgatctctggatggattagagaccaatctcaatctgtaacgtttgttggtaggctggtagctatctgctgacaacatgttttagcatgatgtatatataacatcctttattatgccgaaatgtcgccttgcttttacttatgtgtacatgtagcacagttttgtttgcttttcaaaatttgattgtacggcagtaggttgaacatgcagcttgagtttcagccgcactaggtcgcctctccacagaaaacagaaagtgaagatggagaatatgcaatgtgtttggaagcaaaactaatttaggtaaacaaatgtaatgaaattctcaaagcggtttg

SEQ ID NO: 10555 - DNA, 2077 bp, Zea Mays
ctttgaccgaccgccgctgcgcccactcctgttcgttcgttaagccctctgaccggccgaaaccccggcggcctcctggaggttccggggttgagttcggtctgagctgctgctgccggcggaggcattcccttgtcgtttcttggagtgtcctggtggtggtgaccggtggatatgaacactgtgtgtgaagtttgtggggatattggttacagacaacttctgctttgttgcagagactgcaagcgttgtgctgtgcaccaatactgtttggacaaagttgtctacgaggcatcattaataaaatggttctgttatgaatgcctacaaaggcgtggtgaagttactcgcatcagttctctagagaagttgtcaagtgaaagaccactaagtcaggtccattctcgttctccagtacagcagctaattaccaagagtgtagagtcagtaagggatgcagggccttattcacccaatggtggttgtgaggaatcattttcctgccctggcataaaaaacaccccaagtgttcgagaaagaagtgtagatcccattaatatttcaagtgattctcatgataccatagaagcatccgaaagcagtgaaagattcatggaatgccaaaaagctagcttgtgtcgtcgcaggaaaactgtgaagatggctatggtgtcctcatcatctgaggagtcaggagaagacactatctctgaaaacgtatctttggggtatgttttggcatgtagaagttctctatctaaagcacaaaagaagagagtaacgaagcttattcaggaaattcaacctgaattcacagtttttatatcaataatgcggatgagcaatgtgaaactcccagggaattaccaaggaatatgcaattgcacatttcccagataaaaccacaaatgtcactcttgagacgcctggcaagagcaagaagtggcatcccaaattctacaaaagagatgaaagtagaaagaacttgcttatgggacaatggctagactttgtccgtgacaatcatgtgcaggagggagatatctgcctctttttaccgacaaaagatgagataagacacacatttatggtctatattcttcatgaaacaacccattctagatgtggggctggctttcaaagggttggcccatgccttggtggtgcatccagtgcaaagatggcttcagaagttcatattgaggatgaaccaaccgctggagaacatgtttcgtcggacagtgatatgccagaaaattctcatgaacctctggagagcggagactcggatgatccatttgaacctccatactttgtaccatgcaggagtcctctatctaaatcccaaaagagaatggttgagcagcgagtgcgagctatccgatctgaagttcccatttgtgtggcagtaatgaagaacaataacgttggcattgctcagcgttggatgctagaattatgttcacgatatgcttcggtatatctcccaactaaagggcaaaacatattgctccagtgcaaggggaagacgtgggaagccaaaatgatgtttcataatggcagaaggtggtttcttaatggaggttggcccgattttgctcgtggcaatggcctgcgcgtcggtgacatgtgtctattcgaactgaagaagaaaaagagtacgcttaccatggcagtccatatcattcgcaaggagcagttttaggttgggctggcatgtagttaatccatggttgtggctgatctctggatggattagagaccaatctcaatctgtaacgtttgttggtaggctggtagctatctgctgacaacatgttttagcatgatgtatatataacatcctttattatgccgaaatgtcgccttgcttttacttatgtgtacatgtagcacagttttgtttgcttttcaaaatttgattgtacggcagtaggttgaacatgcagcttgagtttcagccgcactaggtcgcctctccacagaaaacagaaagtgaagatggagaatatgcaatgtgtttggaagcaaaactaatttaggtaaacaaatgtaatgaaattctcaaagcggtttg

SEQ ID NO: 10556 - DNA, 2884 bp, Zea Mays
ctctctccccgcccgccgcctatattcctttgaccgaccgccgctgcgcccactcctgttcgttcgttaagccctctgaccggccgaaaccccggcggcctcctggaggttccggggttgagttcggtctgagctgctgctgccggcggaggcattcccttgtcgtttcttggagtgtcctggtggtggtgaccggtggatatgatactgtttggacaaagttgtctacgaggcatcattaataaaatggttctgttatgaatgcctacaaaggcgtggtgaagttactcgcatcagttctctagagaagttgtcaagtgaaagaccactaagtcaggtccattctcgttctccagtacagcagctaattaccaagagtgtagagtcagtaagggatgcagggccttggagagatcggaaaaatgaatcaattgcgactaaatatccatctctcaacagaacatatccttcaattaagaagcacactaaaaagaagccgattgtgaaaccaatgggtaactgcacaaatagaaaagtgcgaatggctaaagttaccacccatacaagtgccgaagcgtcacgttcttgtgaaaccattgggacagaatcatctaagagcaaccatgggaagaaccagcaggtggaccatgcaaaccctgtcgcattgaacactgagcagtctttccctttgattgtgaatagcttgggtacattgggagataatcaccagtatcacctcttagaaacaacagaagggttggcttgcaaattcaagaaagttccacaatcactcgcagcaccattgaaaagattagagaagagagacaatgtggttttgggatcaaataatttagggtcatcttgtttcacagctgaccttggaagctcggttcttggaaaaagtggagacaaatcgaatagaatgaaggatattggtgcaaacttgtcttccaaacacaatgatcatggcaatcaggcaaatcaacacactttagttggctcgaagaacatggaaggcaagtctgtaaaggctaaacatactgtggttgatgcacataaaaacacgtcttggacagtggactcactgataaacgtcaaggacaagtctgaagtatatggtgatagtaatagggatatcttaaatgatgtcacagtccagctggatcatagggctagcaatgagttgctgccgagaagcacggccaccaatataccacagctagccactctggaaaacgatgttgtggacacagtcatgccatattcacccaatggtggttgtgaggaatcattttcctgccctggcataaaaaacaccccaagtgttcgagaaagaagtgtagatcccattaatatttcaagtgattctcatgataccatagaagcatccgaaagcagtgaaagattcatggaatgccaaaaagctagcttgtgtcgtcgcaggaaaactgtgaagatggctatggtgtcctcatcatctgaggagtcaggagaagacactatctctgaaaacgtatctttggggtatgttttggcatgtagaagttctctatctaaagcacaaaagaagagagtaacgaagcttattcaggaaattcaacctgaattcacagtttttatatcaataatgcggatgagcaatgtgaaactcccaggtcctcttctgggaattaccaaggaatatgcaattgcacatttcccagataaaaccacaaatgtcactcttgagacgcctggcaagagcaagaagtggcatcccaaattctacaaaagagatgaaagtagaaagaacttgcttatgggacaatggctagactttgtccgtgacaatcatgtgcaggagggagatatctgcctctttttaccgacaaaagatgagataagacacacatttatggtctatattcttcatgaaacaacccattctagatgtggggctggctttcaaagggttggcccatgccttggtggtgcatccagtgcaaagatggcttcagaagttcatattgaggatgaaccaaccgctggagaacatgtttcgtcggacagtgatatgccagaaaattctcatgaacctctggagagcggagactcggatgatccatttgaacctccatactttgtaccatgcaggagtcctctatctaaatcccaaaagagaatggttgagcagcgagtgcgagctatccgatctgaagttcccatttgtgtggcagtaatgaagaacaataacgttggcattgctcagcgttggatgctagaattatgttcacgatatgcttcggtatatctcccaactaaagggcaaaacatattgctccagtgcaaggggaagacgtgggaagccaaaatgatgtttcataatggcagaaggtggtttcttaatggaggttggcccgattttgctcgtggcaatggcctgcgcgtcggtgacatgtgtctattcgaactgaagaagaaaaagagtacgcttaccatggcagtccatatcattcgcaaggagcagttttaggttgggctggcatgtagttaatccatggttgtggctgatctctggatggattagagaccaatctcaatctgtaacgtttgttggtaggctggtagctatctgctgacaacatgttttagcatgatgtatatataacatcctttattatgccgaaatgtcgccttgcttttacttatgtgtacatgtagcacagttttgtttgcttttcaaaatttgattgtacggcagtaggttgaacatgcagcttgagtttcagccgcactaggtcgcctctccacagaaaacagaaagtgaagatggagaatatgcaatgtgtttggaagcaaaactaatttaggtaaacaaatgtaatgaaattctcaaagcggtttg

SEQ ID NO: 10557 - DNA, 2393 bp, Zea Mays
ctcatcgtctctctctccccgcccgccgcctatattcctttgaccgaccgccgctgcgcccactcctgttcgttcgttaagccctctgaccggccgaaaccccggcggcctcctggaggttccggggttgagttcggtctgagctgctgctgccggcggaggcattcccttgtcgtttcttggagtgtcctggtggtggtgaccggtggatatgaacactgtgtgtgaagtttgtggggatattggttacagacaacttctgctttgttgcagagactgcaagcgttgtgctgtgcaccaatactgtttggacaaagttgtctacgaggcatcattaataaaatggttctgttatgaatgcctacaaaggcgtggtgaagttactcgcatcagttctctagagaagttgtcaagtgaaagaccactaagtcaggtccattctcgttctccagtacagcagctaattaccaagagtgtagagtcagtaagggatgcagggccttattcacccaatggtggttgtgaggaatcattttcctgccctggcataaaaaacaccccaagtgttcgagaaagaagtgtagatcccattaatatttcaagtgattctcatgataccatagaagcatccgaaagcagtgaaagattcatggaatgccaaaaagctagcttgtgtcgtcgcaggaaaactgtgaagatggctatggtgtcctcatcatctgaggagtcaggagaagacactatctctgaaaacgtatctttggggtatgttttggcatgtagaagttctctatctaaagcacaaaagaagagagtaacgaagcttattcaggaaattcaacctgaattcacagtttttatatcaataatgcggatgagcaatgtgaaactcccagggaattaccaaggaatatgcaattgcacatttcccagataaaaccacaaatgtcactcttgagacgcctggcaagagcaagaagtggcatcccaaattctacaaaagagatgaaagtagaaagaacttgcttatgggacaatggctagactttgtccgtgacaatcatgtgcaggagggagatatctgcctctttttaccgacaaaagatgagataagacacacatttatggtctatattcttcatgaaacaacccattctagatgtggggctggctttcaaagggttggcccatgccttggtggtgcatccagtgcaaagatggcttcagaagttcatattgaggatgaaccaaccgctggagaacatgtttcgtcggacagtgatatgccagaaaattctcatgaacctctggagagcggagactcggatgatccatttgaacctccatactttgtaccatgcaggagtcctctatctaaatcccaaaagagaatggttgagcagcgagtgcgagctatccgatctgaagttcccatttgtgtggcagtaatgaagaacaataacgttggcattgctcagcgttggatgctagtaagctcaattcttttttgtttagtcttgttattttttttcatccttaatgttgctgttcctgtcatcttaaccttatcttgtctaagtgggcatccttttgtcatttgagagctcaccgattcacctgccttcataccagtcataaaaatgcaatatattctccataacaatcaatatacaaatacacccgcaccaatatatataaacccctcacgcagttgttgaaccaacattgtatttgtatgtgttgctaactactcgtccataatgcatcaggaattatgttcacgatatgcttcggtatatctcccaactaaagggcaaaacatattgctccagtgcaaggggaagacgtgggaagccaaaatgatgtttcataatggcagaaggtggtttcttaatggaggttggcccgattttgctcgtggcaatggcctgcgcgtcggtgacatgtgtctattcgaactgaagaagaaaaagagtacgcttaccatggcagtccatatcattcgcaaggagcagttttaggttgggctggcatgtagttaatccatggttgtggctgatctctggatggattagagaccaatctcaatctgtaacgtttgttggtaggctggtagctatctgctgacaacatgttttagcatgatgtatatataacatcctttattatgccgaaatgtcgccttgcttttacttatgtgtacatgtagcacagttttgtttgcttttcaaaatttgattgtacggcagtaggttgaacatgcagcttgagtttcagccgcactaggtcgcctctccacagaaaacagaaagtgaagatggagaatatgcaatgtgtttggaagcaaaactaatttaggtaaacaaatgtaatgaaattctcaaagcggtttg

SEQ ID NO: 10558 - DNA, 2983 bp, Zea Mays
ttttaacgccgcagctcatcgtctctctctccccgcccgccgcctatattcctttgaccgaccgccgctgcgcccactcctgttcgttcgttaagccctctgaccggccgaaaccccggcggcctcctggaggttccggggttgagttcggtctgagctgctgctgccggcggaggcattcccttgtcgtttcttggagtgtcctggtggtggtgaccggtggatatgaacactgtgtgtgaagtttgtggggatattggttacagacaacttctgctttgttgcagagactgcaagcgttgtgctgtgcaccaatactgtttggacaaagttgtctacgaggcatcattaataaaatggttctgttatgaatgcctacaaaggcgtggtgaagttactcgcatcagttctctagagaagttgtcaagtgaaagaccactaagtcaggtccattctcgttctccagtacagcagctaattaccaagagtgtagagtcagtaagggatgcagggccttggagagatcggaaaaatgaatcaattgcgactaaatatccatctctcaacagaacatatccttcaattaagaagcacactaaaaagaagccgattgtgaaaccaatgggtaactgcacaaatagaaaagtgcgaatggctaaagttaccacccatacaagtgccgaagcgtcacgttcttgtgaaaccattgggacagaatcatctaagagcaaccatgggaagaaccagcaggtggaccatgcaaaccctgtcgcattgaacactgagcagtctttccctttgattgtgaatagcttgggtacattgggagataatcaccagtatcacctcttagaaacaacagaagggttggcttgcaaattcaagaaagttccacaatcactcgcagcaccattgaaaagattagagaagagagacaatgtggttttgggatcaaataatttagggtcatcttgtttcacagctgaccttggaagctcggttcttggaaaaagtggagacaaatcgaatagaatgaaggatattggtgcaaacttgtcttccaaacacaatgatcatggcaatcaggcaaatcaacacactttagttggctcgaagaacatggaaggcaagtctgtaaaggctaaacatactgtggttgatgcacataaaaacacgtcttggacagtggactcactgataaacgtcaaggacaagtctgaagtatatggtgatagtaatagggatatcttaaatgatgtcacagtccagctggatcatagggctagcaatgagttgctgccgagaagcacggccaccaatataccacagctagccactctggaaaacgatgttgtggacacagtcatgccatattcacccaatggtggttgtgaggaatcattttcctgccctggcataaaaaacaccccaagtgttcgagaaagaagtgtagatcccattaatatttcaagtgattctcatgataccatagaagcatccgaaagcagtgaaagattcatggaatgccaaaaagctagcttgtgtcgtcgcaggaaaactgtgaagatggctatggtgtcctcatcatctgaggagtcaggagaagacactatctctgaaaacgtatctttggggtatgttttggcatgtagaagttctctatctaaagcacaaaagaagagagtaacgaagcttattcaggaaattcaacctgaattcacagtttttatatcaataatgcggatgagcaatgtgaaactcccagggaattaccaaggaatatgcaattgcacatttcccagataaaaccacaaatgtcactcttgagacgcctggcaagagcaagaagtggcatcccaaattctacaaaagagatgaaagtagaaagaacttgcttatgggacaatggctagactttgtccgtgacaatcatgtgcaggagggagatatctgcctctttttaccgacaaaagatgagataagacacacatttatggtctatattcttcatgaaacaacccattctagatgtggggctggctttcaaagggttggcccatgccttggtggtgcatccagtgcaaagatggcttcagaagttcatattgaggatgaaccaaccgctggagaacatgtttcgtcggacagtgatatgccagaaaattctcatgaacctctggagagcggagactcggatgatccatttgaacctccatactttgtaccatgcaggagtcctctatctaaatcccaaaagagaatggttgagcagcgagtgcgagctatccgatctgaagttcccatttgtgtggcagtaatgaagaacaataacgttggcattgctcagcgttggatgctagaattatgttcacgatatgcttcggtatatctcccaactaaagggcaaaacatattgctccagtgcaaggggaagacgtgggaagccaaaatgatgtttcataatggcagaaggtggtttcttaatggaggttggcccgattttgctcgtggcaatggcctgcgcgtcggtgacatgtgtctattcgaactgaagaagaaaaagagtacgcttaccatggcagtccatatcattcgcaaggagcagttttaggttgggctggcatgtagttaatccatggttgtggctgatctctggatggattagagaccaatctcaatctgtaacgtttgttggtaggctggtagctatctgctgacaacatgttttagcatgatgtatatataacatcctttattatgccgaaatgtcgccttgcttttacttatgtgtacatgtagcacagttttgtttgcttttcaaaatttgattgtacggcagtaggttgaacatgcagcttgagtttcagccgcactaggtcgcctctccacagaaaacagaaagtgaagatggagaatatgcaatgtgtttggaagcaaaactaatttaggtaaacaaatgtaatgaaattctcaaagcggtttg

SEQ ID NO: 10559 - DNA, 2826 bp, Zea Mays
ctagcattttaacgccgcagctcatcgtctctctctccccgcccgccgcctatattcctttgaccgaccgccgctgcgcccactcctgttcgttcgttaagccctctgaccggccgaaaccccggcggcctcctggaggttccggggttgagttcggtctgagctgctgctgccggcggaggcattcccttgtcgtttcttggagtgtcctggtggtggtgaccggtggatatgaacactgtgtgtgaagtttgtggggatattggttacagacaacttctgctttgttgcagagactgcaagcgttgtgctgtgcaccaatactgtttggacaaagttgtctacgaggcatcattaataaaatggttctgttatgaatgcctacaaaggcgtggtgaagttactcgcatcagttctctagagaagttgtcaagtgaaagaccactaagtcaggtccattctcgttctccagtacagcagctaattaccaagagtgtagagtcagtaagggatgcagggccttggagagatcggaaaaatgaatcaattgcgactaaatatccatctctcaacagaacatatccttcaattaagaagcacactaaaaagaagccgattgtgaaaccaatgggtaactgcacaaatagaaaagtgcgaatggctaaagttaccacccatacaagtgccgaagcgtcacgttcttgtgaaaccattgggacagaatcatctaagagcaaccatgggaagaaccagcaggtggaccatgcaaaccctgtcgcattgaacactgagcagtctttccctttgattgtgaatagcttgggtacattgggagataatcaccagtatcacctcttagaaacaacagaagggttggcttgcaaattcaagaaagttccacaatcactcgcagcaccattgaaaagattagagaagagagacaatgtggttttgggatcaaataatttagggtcatcttgtttcacagctgaccttggaagctcggttcttggaaaaagtggagacaaatcgaatagaatgaaggatattggtgcaaacttgtcttccaaacacaatgatcatggcaatcaggcaaatcaacacactttagttggctcgaagaacatggaaggcaagtctgtaaaggctaaacatactgtggttgatgcacataaaaacacgtcttggacagtggactcactgataaacgtcaaggacaagtctgaagtatatggtgatagtaatagggatatcttaaatgatgtcacagtccagctggatcatagggctagcaatgagttgctgccgagaagcacggccaccaatataccacagctagccactctggaaaacgatgttgtggacacagtcatgccatattcacccaatggtggttgtgaggaatcattttcctgccctggcataaaaaacaccccaagtgttcgagaaagaagtgtagatcccattaatatttcaagtgattctcatgataccatagaagcatccgaaagcagtgaaagattcatggaatgccaaaaagctagcttgtgtcgtcgcaggaaaactgtgaagatggctatggtgtcctcatcatctgaggagtcaggagaagacactatctctgaaaacgtatctttggggtatgttttggcatgtagaagttctctatctaaagcacaaaagaagagagtaacgaagcttattcaggaaattcaacctgaattcacagtttttatatcaataatgcggatgagcaatgtgaaactcccaggtcctcttctggagggagatatctgcctctttttaccgacaaaagatgagataagacacacatttatggtctatattcttcatgaaacaacccattctagatgtggggctggctttcaaagggttggcccatgccttggtggtgcatccagtgcaaagatggcttcagaagttcatattgaggatgaaccaaccgctggagaacatgtttcgtcggacagtgatatgccagaaaattctcatgaacctctggagagcggagactcggatgatccatttgaacctccatactttgtaccatgcaggagtcctctatctaaatcccaaaagagaatggttgagcagcgagtgcgagctatccgatctgaagttcccatttgtgtggcagtaatgaagaacaataacgttggcattgctcagcgttggatgctagaattatgttcacgatatgcttcggtatatctcccaactaaagggcaaaacatattgctccagtgcaaggggaagacgtgggaagccaaaatgatgtttcataatggcagaaggtggtttcttaatggaggttggcccgattttgctcgtggcaatggcctgcgcgtcggtgacatgtgtctattcgaactgaagaagaaaaagagtacgcttaccatggcagtccatatcattcgcaaggagcagttttaggttgggctggcatgtagttaatccatggttgtggctgatctctggatggattagagaccaatctcaatctgtaacgtttgttggtaggctggtagctatctgctgacaacatgttttagcatgatgtatatataacatcctttattatgccgaaatgtcgccttgcttttacttatgtgtacatgtagcacagttttgtttgcttttcaaaatttgattgtacggcagtaggttgaacatgcagcttgagtttcagccgcactaggtcgcctctccacagaaaacagaaagtgaagatggagaatatgcaatgtgtttggaagcaaaactaatttaggtaaacaaatgtaatgaaattctcaaagcggtttg

SEQ ID NO: 10560 - DNA, 2113 bp, Zea Mays
ctccctacctcgagcccaaatcgatgtccagacgccaacccgtccccgccgccgctgcgaagctggaggaaggggagcatgagctgagcatcgtcgacgcgctcctcgaggtgttgtcgggccgctgcgagctgcgacggacctccttcggctctcggcgcctgtaccggcgctttagcttcacctccatgggggcgccgccacagggaagacgcgttgtgaatatggtggaatttcttgattaatgtcttggcgtggggattcagttgcctgggtaccagatatagcgatgagcgaaatttaaggtgtgaatcccaggtagcagattcacaggaaacttttggggccttgatattgattccctaatgtttgttgggattgctttcatcggttttttctttgttggatcggtcactaccttggcgtatttaggccccagagaattgatttttcaggttatatctgatttgactcaaggtagggtatgtgtccacttctttttcccctgaactaaaattcatgtttacatttaggttttagttacaaataatgatggatatttgttgctcggaatttctataaaagaattagaaacagtgcatgtttttttatctagatcacatacatgcttacagcttatatacccattgtttgcattgtaaaacaagaatatgtaagccatatagactcgtgatgagattcactcgctattgtctgttcttcagatttcttcatggcttttcagtcctagacacagcaacccctatacttttcttgaactaagtttggaaggtattctacaaaagtagtaagaggattaggttccttaataccttcagattcatgcaccgcactcatatttcatgttcgaaagtggaaactgctcctttggctggtcttgtaacatattctgacaaagaaatgttcctacattgtatgaggttatatatgctaggctgctagcaacctttatgttaaccctttcatacttctgttatagtattcattaggacaacagtcactcaaaatcattacttcattttcatttatcatttgttactctgatctcatatgggctaccttttttggaaataatgctggtgagtttcaaacctcattggaatctattcagaattcactagcagatgggttgctaaaactgacagaacaagtaacttctgacaatcggagtattgcatctttatctatatgtatgcacatttggttgaaattctatgcagtgtcaacaggtacacactttacaagattacattttcattacaagatgcttgattgcagccaatattttcatttctttggtgcttgtgtagaagtatcgccttgcaaagtatataccagactctcatgctaaaggttttaaggacgacaagaaagtttgagtgattccctctcgaacatggattatgtaccatattctgaaatgtgtttagaggattgcaaatcaatgaggcactaaagatgcaactggaagttcagaagcggctacacgagcaactggaggtatttgaaggtgtttgagataaataatgatgctaaaatgaaaaggacaatgcgacgtcccctaccatctggtcgtgttagttctacacatgctgccatgtgggctacaagtgcaggaattgcaggaacaactttgctggcctctcgaaggttagcgctatgtcgtggtgctccactttaaagatgtgcatgccacgtctacacttcccgtctctgattatagattaggtctttactccctgatgtttagccagtgcgtgctgttacccactaggtctagccgtagtcagtgactgcacaaccacaacccgctcttgtgtattttgcgtttgcggatcgcatcgcatgttattttggtccttctatattcatgctacaaggctgcaaactgtggtgctcatacatttatgtaaccagtaacctataacgactttgatgtatattatattttgtaacagtgaacttgactatcgtagatatgtagcttgctggaacgattttttagtgtacgactgtgctacaatgactgtagcgcccggtagggcgctgccctattctagtagaaataaaggaggaagtcccttgatatata

SEQ ID NO: 10561 - DNA, 2088 bp, Zea Mays
ctccctacctcgagcccaaatcgatgtccagacgccaacccgtccccgccgccgctgcgaagctggaggaaggggagcatgagctgagcatcgtcgacgcgctcctcgaggtgttgtcgggccgctgcgagctgcgacggacctccttcggctctcggcgcctgtaccggcgctttagcttcacctccatgggggcgccgccacagggaagacgcgtgcgctcctcctcgctctccgccaagtgataaattttctcaaatttgtgaggtttgttgtgaatatggtggaatttcttgattaatgtcttggcgtggggattcagttgcctgggtaccagatatagcgatgagcgaaatttaaggtgtgaatcccaggtagcagattcacaggaaacttttggggccttgatattgattccctaatgtttgttgggattgctttcatcggttttttctttgttggatcggtcactaccttggcgtatttaggccccagagaattgatttttcaggttatatctgatttgactcaaggtagggtatgtgtccacttctttttcccctgaactaaaattcatgtttacatttaggttttagttacaaataatgatggatatttgttgctcggaatttctataaaagaattagaaacagtgcatgtttttttatctagatcacatacatgcttacagcttatatacccattgtttgcattgtaaaacaagaatatgtaagccatatagactcgtgatgagattcactcgctattgtctgttcttcagatttcttcatggcttttcagtcctagacacagcaacccctatacttttcttgaactaagtttggaaggtattctacaaaagtagtaagaggattaggttccttaataccttcagattcatgcaccgcactcatatttcatgttcgaaagtggaaactgctcctttggctggtcttgtaacatattctgacaaagaaatgttcctacattgtatgaggttatatatgctaggctgctagcaacctttatgttaaccctttcatacttctgttatagtattcattaggacaacagtcactcaaaatcattacttcattttcatttatcatttgttactctgatctcatatgggctaccttttttggaaataatgctggtgagtttcaaacctcattggaatctattcagaattcactagcagatgggttgctaaaactgacagaacaagtaacttctgacaatcggagtattgcatctttatctatatgtatgcacatttggttgaaattctatgcagtgtcaacagaagtatcgccttgcaaagtatataccagactctcatgctaaaggttttaaggacgacaagaaagtttgagtgattccctctcgaacatggattatgtaccatattctgaaatgtgtttagaggattgcaaatcaatgaggcactaaagatgcaactggaagttcagaagcggctacacgagcaactggaggtatttgaaggtgtttgagataaataatgatgctaaaatgaaaaggacaatgcgacgtcccctaccatctggtcgtgttagttctacacatgctgccatgtgggctacaagtgcaggaattgcaggaacaactttgctggcctctcgaaggttagcgctatgtcgtggtgctccactttaaagatgtgcatgccacgtctacacttcccgtctctgattatagattaggtctttactccctgatgtttagccagtgcgtgctgttacccactaggtctagccgtagtcagtgactgcacaaccacaacccgctcttgtgtattttgcgtttgcggatcgcatcgcatgttattttggtccttctatattcatgctacaaggctgcaaactgtggtgctcatacatttatgtaaccagtaacctataacgactttgatgtatattatattttgtaacagtgaacttgactatcgtagatatgtagcttgctggaacgattttttagtgtacgactgtgctacaatgactgtagcgcccggtagggcgctgccctattctagtagaaataaaggaggaagtcccttgatatata

SEQ ID NO: 10562 - DNA, 1559 bp, Zea Mays
ctccctacctcgagcccaaatcgatgtccagacgccaacccgtccccgccgccgctgcgaagctggaggaaggggagcatgagctgagcatcgtcgacgcgctcctcgaggtgttgtcgggccgctgcgagctgcgacggacctccttcggctctcggcgcctgtaccggcgctttagcttcacctccatgggggcgccgccacagggaagacgcgtgcgctcctcctcgctctccgccaagtgataaattttctcaaatttgttttcaaatgtatctatagatttgttttttccctgatcgttagagtattctaggttgtgaatatggtggaatttcttgattaatgtcttggcgtggggattcagttgcctgggtaccagatatagcgatgagcgaaatttaaggtgtgaatcccaggtagcagattcacaggaaacttttggggccttgatattgattccctaatgtttgttgggattgctttcatcggttttttctttgttggatcggtcactaccttggcgtatttaggccccagagaattgatttttcaggttatatctgatttgactcaagaattcactagcagatgggttgctaaaactgacagaacaagtaacttctgacaatcggagtattgcatctttatctatatgtatgcacatttggttgaaattctatgcagtgtcaacaggtacacactttacaagattacattttcattacaagatgcttgattgcagccaatattttcatttctttggtgcttgtgtagaagtatcgccttgcaaagtatataccagactctcatgctaaaggttttaaggacgacaagaaagtttgagtgattccctctcgaacatggattatgtaccatattctgaaatgtgtttagaggattgcaaatcaatgaggcactaaagatgcaactggaagttcagaagcggctacacgagcaactggaggtatttgaaggtgtttgagataaataatgatgctaaaatgaaaaggacaatgcgacgtcccctaccatctggtcgtgttagttctacacatgctgccatgtgggctacaagtgcaggaattgcaggaacaactttgctggcctctcgaaggttagcgctatgtcgtggtgctccactttaaagatgtgcatgccacgtctacacttcccgtctctgattatagattaggtctttactccctgatgtttagccagtgcgtgctgttacccactaggtctagccgtagtcagtgactgcacaaccacaacccgctcttgtgtattttgcgtttgcggatcgcatcgcatgttattttggtccttctatattcatgctacaaggctgcaaactgtggtgctcatacatttatgtaaccagtaacctataacgactttgatgtatattatattttgtaacagtgaacttgactatcgtagatatgtagcttgctggaacgattttttagtgtacgactgtgctacaatgactgtagcgcccggtagggcgctgccctattctagtagaaataaaggaggaagtcccttgatatata

SEQ ID NO: 10563 - DNA, 2172 bp, Zea Mays
catccatctccctacctcgagcccaaatcgatgtccagacgccaacccgtccccgccgccgctgcgaagctggaggaaggggagcatgagctgagcatcgtcgacgcgctcctcgaggtgttgtcgggccgctgcgagctgcgacggacctccttcggctctcggcgcctgtaccggcgctttagcttcacctccatgggggcgccgccacagggaagacgcgtgcgctcctcctcgctctccgccaagtgataaattttctcaaatttgtgaggttgtgaatatggtggaatttcttgattaatgtcttggcgtggggattcagttgcctgggtaccagatatagcgatgagcgaaatttaaggtgtgaatcccaggtagcagattcacaggaaacttttggggccttgatattgattccctaatgtttgttgggattgctttcatcggttttttctttgttggatcggtcactaccttggcgtatttaggccccagagaattgatttttcaggttatatctgatttgactcaaggtagggtatgtgtccacttctttttcccctgaactaaaattcatgtttacatttaggttttagttacaaataatgatggatatttgttgctcggaatttctataaaagaattagaaacagtgcatgtttttttatctagatcacatacatgcttacagcttatatacccattgtttgcattgtaaaacaagaatatgtaagccatatagactcgtgatgagattcactcgctattgtctgttcttcagatttcttcatggcttttcagtcctagacacagcaacccctatacttttcttgaactaagtttggaaggtattctacaaaagtagtaagaggattaggttccttaataccttcagattcatgcaccgcactcatatttcatgttcgaaagtggaaactgctcctttggctggtcttgtaacatattctgacaaagaaatgttcctacattgtatgaggttatatatgctaggctgctagcaacctttatgttaaccctttcatacttctgttatagtattcattaggacaacagtcactcaaaatcattacttcattttcatttatcatttgttactctgatctcatatgggctaccttttttggaaataatgctggtgagtttcaaacctcattggaatctattcagaattcactagcagatgggttgctaaaactgacagaacaagtaacttctgacaatcggagtattgcatctttatctatatgtatgcacatttggttgaaattctatgcagtgtcaacaggtacacactttacaagattacattttcattacaagatgcttgattgcagccaatattttcatttctttggtgcttgtgtagaagtatcgccttgcaaagtatataccagactctcatgctaaaggttttaaggacgacaagaaagtttgagtgattccctctcgaacatggattatgtaccatattctgaaatgtgtttagaggattgcaaatcaatgaggcactaaagatgcaactggaagttcagaagcggctacacgagcaactggaggtatttgaaggtgtttgagataaataatgatgctaaaatgaaaaggacaatgcgacgtcccctaccatctggtcgtgttagttctacacatgctgccatgtgggctacaagtgcaggaattgcaggaacaactttgctggcctctcgaaggttagcgctatgtcgtggtgctccactttaaagatgtgcatgccacgtctacacttcccgtctctgattatagattaggtctttactccctgatgtttagccagtgcgtgctgttacccactaggtctagccgtagtcagtgactgcacaaccacaacccgctcttgtgtattttgcgtttgcggatcgcatcgcatgttattttggtccttctatattcatgctacaaggctgcaaactgtggtgctcatacatttatgtaaccagtaacctataacgactttgatgtatattatattttgtaacagtgaacttgactatcgtagatatgtagcttgctggaacgattttttagtgtacgactgtgctacaatgactgtagcgcccggtagggcgctgccctattctagtagaaataaaggaggaagtcccttgatatata

SEQ ID NO: 10564 - DNA, 2108 bp, Zea Mays
cttagtcccagcctcgccccctctccgcagagcgcatccatctccctacctcgagcccaaatcgatgtccagacgccaacccgtccccgccgccgctgcgaagctggaggaaggggagcatgagctgagcatcgtcgacgcgctcctcgaggtgttgtcgggccgctgcgagctgcgacggacctccttcggctctcggcgcctgtaccggcgctttagcttcacctccatgggggcgccgccacagggaagacgcgtgcgctcctcctcgctctccgccaagtgataaattttctcaaatttgttttcaaatgtatctatagatttgttttttccctgatcgttagagtattctaggttgtgaatatggtggaatttcttgattaatgtcttggcgtggggattcagttgcctgggtaccagatatagcgatgagcgaaatttaaggccccagagaattgatttttcaggttatatctgatttgactcaaggtagggtatgtgtccacttctttttcccctgaactaaaattcatgtttacatttaggttttagttacaaataatgatggatatttgttgctcggaatttctataaaagaattagaaacagtgcatgtttttttatctagatcacatacatgcttacagcttatatacccattgtttgcattgtaaaacaagaatatgtaagccatatagactcgtgatgagattcactcgctattgtctgttcttcagatttcttcatggcttttcagtcctagacacagcaacccctatacttttcttgaactaagtttggaaggtattctacaaaagtagtaagaggattaggttccttaataccttcagattcatgcaccgcactcatatttcatgttcgaaagtggaaactgctcctttggctggtcttgtaacatattctgacaaagaaatgttcctacattgtatgaggttatatatgctaggctgctagcaacctttatgttaaccctttcatacttctgttatagtattcattaggacaacagtcactcaaaatcattacttcattttcatttatcatttgttactctgatctcatatgggctaccttttttggaaataatgctggtgagtttcaaacctcattggaatctattcagaattcactagcagatgggttgctaaaactgacagaacaagtaacttctgacaatcggagtattgcatctttatctatatgtatgcacatttggttgaaattctatgcagtgtcaacaggtacacactttacaagattacattttcattacaagatgcttgattgcagccaatattttcatttctttggtgcttgtgtagaagtatcgccttgcaaagtatataccagactctcatgctaaaggttttaaggacgacaagaaagtttgagtgattccctctcgaacatggattatgtaccaggattgcaaatcaatgaggcactaaagatgcaactggaagttcagaagcggctacacgagcaactggaggtatttgaaggtgtttgagataaataatgatgctaaaatgaaaaggacaatgcgacgtcccctaccatctggtcgtgttagttctacacatgctgccatgtgggctacaagtgcaggaattgcaggaacaactttgctggcctctcgaaggttagcgctatgtcgtggtgctccactttaaagatgtgcatgccacgtctacacttcccgtctctgattatagattaggtctttactccctgatgtttagccagtgcgtgctgttacccactaggtctagccgtagtcagtgactgcacaaccacaacccgctcttgtgtattttgcgtttgcggatcgcatcgcatgttattttggtccttctatattcatgctacaaggctgcaaactgtggtgctcatacatttatgtaaccagtaacctataacgactttgatgtatattatattttgtaacagtgaacttgactatcgtagatatgtagcttgctggaacgattttttagtgtacgactgtgctacaatgactgtagcgcccggtagggcgctgccctattctagtagaaataaaggaggaagtcccttgatatata

SEQ ID NO: 10565 - DNA, 2027 bp, Zea Mays
cttagtcccagcctcgccccctctccgcagagcgcatccatctccctacctcgagcccaaatcgatgtccagacgccaacccgtccccgccgccgctgcgaagctggaggaaggggagcatgagctgagcatcgtcgacgcgctcctcgaggtgttgtcgggccgctgcgagctgcgacggacctccttcggctctcggcgcctgtaccggcgctttagcttcacctccatgggggcgccgccacagggaagacgcgtgcgctcctcctcgctctccgccaagtgataaattttctcaaatttgttttcaaatgtatctatagatttgttttttccctgatcgttagagtattctaggttgtgaatatggtggaatttcttgattaatgtcttggcgtggggattcagttgcctgggtaccagatatagcgatgagcgaaatttaaggccccagagaattgatttttcaggttatatctgatttgactcaaggtagggtatgtgtccacttctttttcccctgaactaaaattcatgtttacatttaggttttagttacaaataatgatggatatttgttgctcggaatttctataaaagaattagaaacagtgcatgtttttttatctagatcacatacatgcttacagcttatatacccattgtttgcattgtaaaacaagaatatgtaagccatatagactcgtgatgagattcactcgctattgtctgttcttcagatttcttcatggcttttcagtcctagacacagcaacccctatacttttcttgaactaagtttggaaggtattctacaaaagtagtaagaggattaggttccttaataccttcagattcatgcaccgcactcatatttcatgttcgaaagtggaaactgctcctttggctggtcttgtaacatattctgacaaagaaatgttcctacattgtatgaggttatatatgctaggctgctagcaacctttatgttaaccctttcatacttctgttatagtattcattaggacaacagtcactcaaaatcattacttcattttcatttatcatttgttactctgatctcatatgggctaccttttttggaaataatgctggtgagtttcaaacctcattggaatctattcagaattcactagcagatgggttgctaaaactgacagaacaagtaacttctgacaatcggagtattgcatctttatctatatgtatgcacatttggttgaaattctatgcagtgtcaacagaagtatcgccttgcaaagtatataccagactctcatgctaaaggttttaaggacgacaagaaagtttgagtgattccctctcgaacatggattatgtaccaggattgcaaatcaatgaggcactaaagatgcaactggaagttcagaagcggctacacgagcaactggaggtatttgaaggtgtttgagataaataatgatgctaaaatgaaaaggacaatgcgacgtcccctaccatctggtcgtgttagttctacacatgctgccatgtgggctacaagtgcaggaattgcaggaacaactttgctggcctctcgaaggttagcgctatgtcgtggtgctccactttaaagatgtgcatgccacgtctacacttcccgtctctgattatagattaggtctttactccctgatgtttagccagtgcgtgctgttacccactaggtctagccgtagtcagtgactgcacaaccacaacccgctcttgtgtattttgcgtttgcggatcgcatcgcatgttattttggtccttctatattcatgctacaaggctgcaaactgtggtgctcatacatttatgtaaccagtaacctataacgactttgatgtatattatattttgtaacagtgaacttgactatcgtagatatgtagcttgctggaacgattttttagtgtacgactgtgctacaatgactgtagcgcccggtagggcgctgccctattctagtagaaataaaggaggaagtcccttgatatata

SEQ ID NO: 10566 - DNA, 2123 bp, Zea Mays
cggcttagtcccagcctcgccccctctccgcagagcgcatccatctccctacctcgagcccaaatcgatgtccagacgccaacccgtccccgccgccgctgcgaagctggaggaaggggagcatgagctgagcatcgtcgacgcgctcctcgaggtgttgtcgggccgctgcgagctgcgacggacctccttcggctctcggcgcctgtaccggcgctttagcttcacctccatgggggcgccgccacagggaagacgcgtgcgctcctcctcgctctccgccaagtgataaattttctcaaatttgttgtgaatatggtggaatttcttgattaatgtcttggcgtggggattcagttgcctgggtaccagatatagcgatgagcgaaatttaaggtgtgaatcccaggtagcagattcacaggaaacttttggggccttgatattgattccctaatgtttgttgggattgctttcatcggttttttctttgttggatcggtcactaccttggcgtatttaggccccagagaattgatttttcaggttatatctgatttgactcaaggtagggtatgtgtccacttctttttcccctgaactaaaattcatgtttacatttaggttttagttacaaataatgatggatatttgttgctcggaatttctataaaagaattagaaacagtgcatgtttttttatctagatcacatacatgcttacagcttatatacccattgtttgcattgtaaaacaagaatatgtaagccatatagactcgtgatgagattcactcgctattgtctgttcttcagatttcttcatggcttttcagtcctagacacagcaacccctatacttttcttgaactaagtttggaaggtattctacaaaagtagtaagaggattaggttccttaataccttcagattcatgcaccgcactcatatttcatgttcgaaagtggaaactgctcctttggctggtcttgtaacatattctgacaaagaaatgttcctacattgtatgaggttatatatgctaggctgctagcaacctttatgttaaccctttcatacttctgttatagtattcattaggacaacagtcactcaaaatcattacttcattttcatttatcatttgttactctgatctcatatgggctaccttttttggaaataatgctggtgagtttcaaacctcattggaatctattcagaattcactagcagatgggttgctaaaactgacagaacaagtaacttctgacaatcggagtattgcatctttatctatatgtatgcacatttggttgaaattctatgcagtgtcaacagaagtatcgccttgcaaagtatataccagactctcatgctaaaggttttaaggacgacaagaaagtttgagtgattccctctcgaacatggattatgtaccatattctgaaatgtgtttagaggattgcaaatcaatgaggcactaaagatgcaactggaagttcagaagcggctacacgagcaactggaggtatttgaaggtgtttgagataaataatgatgctaaaatgaaaaggacaatgcgacgtcccctaccatctggtcgtgttagttctacacatgctgccatgtgggctacaagtgcaggaattgcaggaacaactttgctggcctctcgaaggttagcgctatgtcgtggtgctccactttaaagatgtgcatgccacgtctacacttcccgtctctgattatagattaggtctttactccctgatgtttagccagtgcgtgctgttacccactaggtctagccgtagtcagtgactgcacaaccacaacccgctcttgtgtattttgcgtttgcggatcgcatcgcatgttattttggtccttctatattcatgctacaaggctgcaaactgtggtgctcatacatttatgtaaccagtaacctataacgactttgatgtatattatattttgtaacagtgaacttgactatcgtagatatgtagcttgctggaacgattttttagtgtacgactgtgctacaatgactgtagcgcccggtagggcgctgccctattctagtagaaataaaggaggaagtcccttgatatata

SEQ ID NO: 10567 - DNA, 2028 bp, Zea Mays
cggcttagtcccagcctcgccccctctccgcagagcgcatccatctccctacctcgagcccaaatcgatgtccagacgccaacccgtccccgccgccgctgcgaagctggaggaaggggagcatgagctgagcatcgtcgacgcgctcctcgaggtgttgtcgggccgctgcgagctgcgacggacctccttcggctctcggcgcctgtaccggcgctttagcttcacctccatgggggcgccgccacagggaagacgttgtgaatatggtggaatttcttgattaatgtcttggcgtggggattcagttgcctgggtaccagatatagcgatgagcgaaatttaaggccccagagaattgatttttcaggttatatctgatttgactcaaggtagggtatgtgtccacttctttttcccctgaactaaaattcatgtttacatttaggttttagttacaaataatgatggatatttgttgctcggaatttctataaaagaattagaaacagtgcatgtttttttatctagatcacatacatgcttacagcttatatacccattgtttgcattgtaaaacaagaatatgtaagccatatagactcgtgatgagattcactcgctattgtctgttcttcagatttcttcatggcttttcagtcctagacacagcaacccctatacttttcttgaactaagtttggaaggtattctacaaaagtagtaagaggattaggttccttaataccttcagattcatgcaccgcactcatatttcatgttcgaaagtggaaactgctcctttggctggtcttgtaacatattctgacaaagaaatgttcctacattgtatgaggttatatatgctaggctgctagcaacctttatgttaaccctttcatacttctgttatagtattcattaggacaacagtcactcaaaatcattacttcattttcatttatcatttgttactctgatctcatatgggctaccttttttggaaataatgctggtgagtttcaaacctcattggaatctattcagaattcactagcagatgggttgctaaaactgacagaacaagtaacttctgacaatcggagtattgcatctttatctatatgtatgcacatttggttgaaattctatgcagtgtcaacaggtacacactttacaagattacattttcattacaagatgcttgattgcagccaatattttcatttctttggtgcttgtgtagaagtatcgccttgcaaagtatataccagactctcatgctaaaggttttaaggacgacaagaaagtttgagtgattccctctcgaacatggattatgtaccatattctgaaatgtgtttagaggattgcaaatcaatgaggcactaaagatgcaactggaagttcagaagcggctacacgagcaactggaggtatttgaaggtgtttgagataaataatgatgctaaaatgaaaaggacaatgcgacgtcccctaccatctggtcgtgttagttctacacatgctgccatgtgggctacaagtgcaggaattgcaggaacaactttgctggcctctcgaaggttagcgctatgtcgtggtgctccactttaaagatgtgcatgccacgtctacacttcccgtctctgattatagattaggtctttactccctgatgtttagccagtgcgtgctgttacccactaggtctagccgtagtcagtgactgcacaaccacaacccgctcttgtgtattttgcgtttgcggatcgcatcgcatgttattttggtccttctatattcatgctacaaggctgcaaactgtggtgctcatacatttatgtaaccagtaacctataacgactttgatgtatattatattttgtaacagtgaacttgactatcgtagatatgtagcttgctggaacgattttttagtgtacgactgtgctacaatgactgtagcgcccggtagggcgctgccctattctagtagaaataaaggaggaagtcccttgatatata

SEQ ID NO: 10568 - DNA, 2056 bp, Zea Mays
cgctaccggcttagtcccagcctcgccccctctccgcagagcgcatccatctccctacctcgagcccaaatcgatgtccagacgccaacccgtccccgccgccgctgcgaagctggaggaaggggagcatgagctgagcatcgtcgacgcgctcctcgaggtgttgtcgggccgctgcgagctgcgacggacctccttcggctctcggcgcctgtaccggcgctttagcttcacctccatgggggcgccgccacagggaagacgcgtgcgctcctcctcgctctccgccaagtgataaattttctcaaatttgttttcaaatgtatctatagatttgttttttccctgatcgttagagtattctaggttgtgaatatggtggaatttcttgattaatgtcttggcgtggggattcagttgcctgggtaccagatatagcgatgagcgaaatttaaggccccagagaattgatttttcaggttatatctgatttgactcaaggtagggtatgtgtccacttctttttcccctgaactaaaattcatgtttacatttaggttttagttacaaataatgatggatatttgttgctcggaatttctataaaagaattagaaacagtgcatgtttttttatctagatcacatacatgcttacagcttatatacccattgtttgcattgtaaaacaagaatatgtaagccatatagactcgtgatgagattcactcgctattgtctgttcttcagatttcttcatggcttttcagtcctagacacagcaacccctatacttttcttgaactaagtttggaaggtattctacaaaagtagtaagaggattaggttccttaataccttcagattcatgcaccgcactcatatttcatgttcgaaagtggaaactgctcctttggctggtcttgtaacatattctgacaaagaaatgttcctacattgtatgaggttatatatgctaggctgctagcaacctttatgttaaccctttcatacttctgttatagtattcattaggacaacagtcactcaaaatcattacttcattttcatttatcatttgttactctgatctcatatgggctaccttttttggaaataatgctggtgagtttcaaacctcattggaatctattcagaattcactagcagatgggttgctaaaactgacagaacaagtaacttctgacaatcggagtattgcatctttatctatatgtatgcacatttggttgaaattctatgcagtgtcaacagaagtatcgccttgcaaagtatataccagactctcatgctaaaggttttaaggacgacaagaaagtttgagtgattccctctcgaacatggattatgtaccatattctgaaatgtgtttagaggattgcaaatcaatgaggcactaaagatgcaactggaagttcagaagcggctacacgagcaactggaggtatttgaaggtgtttgagataaataatgatgctaaaatgaaaaggacaatgcgacgtcccctaccatctggtcgtgttagttctacacatgctgccatgtgggctacaagtgcaggaattgcaggaacaactttgctggcctctcgaaggttagcgctatgtcgtggtgctccactttaaagatgtgcatgccacgtctacacttcccgtctctgattatagattaggtctttactccctgatgtttagccagtgcgtgctgttacccactaggtctagccgtagtcagtgactgcacaaccacaacccgctcttgtgtattttgcgtttgcggatcgcatcgcatgttattttggtccttctatattcatgctacaaggctgcaaactgtggtgctcatacatttatgtaaccagtaacctataacgactttgatgtatattatattttgtaacagtgaacttgactatcgtagatatgtagcttgctggaacgattttttagtgtacgactgtgctacaatgactgtagcgcccggtagggcgctgccctattctagtagaaataaaggaggaagtcccttgatatata

SEQ ID NO: 10569 - DNA, 2088 bp, Zea Mays
cccgccgctaccggcttagtcccagcctcgccccctctccgcagagcgcatccatctccctacctcgagcccaaatcgatgtccagacgccaacccgtccccgccgccgctgcgaagctggaggaaggggagcatgagctgagcatcgtcgacgcgctcctcgaggtgttgtcgggccgctgcgagctgcgacggacctccttcggctctcggcgcctgtaccggcgctttagcttcacctccatgggggcgccgccacagggaagacgcgtgcgctcctcctcgctctccgccaagtgataaattttctcaaatttgttgtgaatatggtggaatttcttgattaatgtcttggcgtggggattcagttgcctgggtaccagatatagcgatgagcgaaatttaaggccccagagaattgatttttcaggttatatctgatttgactcaaggtagggtatgtgtccacttctttttcccctgaactaaaattcatgtttacatttaggttttagttacaaataatgatggatatttgttgctcggaatttctataaaagaattagaaacagtgcatgtttttttatctagatcacatacatgcttacagcttatatacccattgtttgcattgtaaaacaagaatatgtaagccatatagactcgtgatgagattcactcgctattgtctgttcttcagatttcttcatggcttttcagtcctagacacagcaacccctatacttttcttgaactaagtttggaaggtattctacaaaagtagtaagaggattaggttccttaataccttcagattcatgcaccgcactcatatttcatgttcgaaagtggaaactgctcctttggctggtcttgtaacatattctgacaaagaaatgttcctacattgtatgaggttatatatgctaggctgctagcaacctttatgttaaccctttcatacttctgttatagtattcattaggacaacagtcactcaaaatcattacttcattttcatttatcatttgttactctgatctcatatgggctaccttttttggaaataatgctggtgagtttcaaacctcattggaatctattcagaattcactagcagatgggttgctaaaactgacagaacaagtaacttctgacaatcggagtattgcatctttatctatatgtatgcacatttggttgaaattctatgcagtgtcaacaggtacacactttacaagattacattttcattacaagatgcttgattgcagccaatattttcatttctttggtgcttgtgtagaagtatcgccttgcaaagtatataccagactctcatgctaaaggttttaaggacgacaagaaagtttgagtgattccctctcgaacatggattatgtaccatattctgaaatgtgtttagaggattgcaaatcaatgaggcactaaagatgcaactggaagttcagaagcggctacacgagcaactggaggtatttgaaggtgtttgagataaataatgatgctaaaatgaaaaggacaatgcgacgtcccctaccatctggtcgtgttagttctacacatgctgccatgtgggctacaagtgcaggaattgcaggaacaactttgctggcctctcgaaggttagcgctatgtcgtggtgctccactttaaagatgtgcatgccacgtctacacttcccgtctctgattatagattaggtctttactccctgatgtttagccagtgcgtgctgttacccactaggtctagccgtagtcagtgactgcacaaccacaacccgctcttgtgtattttgcgtttgcggatcgcatcgcatgttattttggtccttctatattcatgctacaaggctgcaaactgtggtgctcatacatttatgtaaccagtaacctataacgactttgatgtatattatattttgtaacagtgaacttgactatcgtagatatgtagcttgctggaacgattttttagtgtacgactgtgctacaatgactgtagcgcccggtagggcgctgccctattctagtagaaataaaggaggaagtcccttgatatata

SEQ ID NO: 10570 - DNA, 2252 bp, Zea Mays
ctcagccacacgcgtgcctacgcgtgcgcaaggcgtcggactcaaaaaccttttctccaatccaactccgagtctgagcgtgtcgcgttccattacccatcccgccgctaccggcttagtcccagcctcgccccctctccgcagagcgcatccatctccctacctcgagcccaaatcgatgtccagacgccaacccgtccccgccgccgctgcgaagctggaggaaggggagcatgagctgagcatcgtcgacgcgctcctcgaggtgttgtcgggccgctgcgagctgcgacggacctccttcggctctcggcgcctgtaccggcgctttagcttcacctccatgggggcgccgccacagggaagacgcgtgcgctcctcctcgctctccgccaagtgataaattttctcaaatttacttctccaggttttcaaatgtatctatagatttgttttttccctgatcgttagagtattctaggttgtgaatatggtggaatttcttgattaatgtcttggcgtggggattcagttgcctgggtaccagatatagcgatgagcgaaatttaaggccccagagaattgatttttcaggttatatctgatttgactcaaggtagggtatgtgtccacttctttttcccctgaactaaaattcatgtttacatttaggttttagttacaaataatgatggatatttgttgctcggaatttctataaaagaattagaaacagtgcatgtttttttatctagatcacatacatgcttacagcttatatacccattgtttgcattgtaaaacaagaatatgtaagccatatagactcgtgatgagattcactcgctattgtctgttcttcagatttcttcatggcttttcagtcctagacacagcaacccctatacttttcttgaactaagtttggaaggtattctacaaaagtagtaagaggattaggttccttaataccttcagattcatgcaccgcactcatatttcatgttcgaaagtggaaactgctcctttggctggtcttgtaacatattctgacaaagaaatgttcctacattgtatgaggttatatatgctaggctgctagcaacctttatgttaaccctttcatacttctgttatagtattcattaggacaacagtcactcaaaatcattacttcattttcatttatcatttgttactctgatctcatatgggctaccttttttggaaataatgctggtgagtttcaaacctcattggaatctattcagaattcactagcagatgggttgctaaaactgacagaacaagtaacttctgacaatcggagtattgcatctttatctatatgtatgcacatttggttgaaattctatgcagtgtcaacaggtacacactttacaagattacattttcattacaagatgcttgattgcagccaatattttcatttctttggtgcttgtgtagaagtatcgccttgcaaagtatataccagactctcatgctaaaggttttaaggacgacaagaaagtttgagtgattccctctcgaacatggattatgtaccatattctgaaatgtgtttagaggattgcaaatcaatgaggcactaaagatgcaactggaagttcagaagcggctacacgagcaactggaggtatttgaaggtgtttgagataaataatgatgctaaaatgaaaaggacaatgcgacgtcccctaccatctggtcgtgttagttctacacatgctgccatgtgggctacaagtgcaggaattgcaggaacaactttgctggcctctcgaaggttagcgctatgtcgtggtgctccactttaaagatgtgcatgccacgtctacacttcccgtctctgattatagattaggtctttactccctgatgtttagccagtgcgtgctgttacccactaggtctagccgtagtcagtgactgcacaaccacaacccgctcttgtgtattttgcgtttgcggatcgcatcgcatgttattttggtccttctatattcatgctacaaggctgcaaactgtggtgctcatacatttatgtaaccagtaacctataacgactttgatgtatattatattttgtaacagtgaacttgactatcgtagatatgtagcttgctggaacgattttttagtgtacgactgtgctacaatgactgtagcgcccggtagggcgctgccctattctagtagaaataaaggaggaagtcccttgatatata

SEQ ID NO: 10571 - DNA, 2247 bp, Zea Mays
ctcagccacacgcgtgcctacgcgtgcgcaaggcgtcggactcaaaaaccttttctccaatccaactccgagtctgagcgtgtcgcgttccattacccatcccgccgctaccggcttagtcccagcctcgccccctctccgcagagcgcatccatctccctacctcgagcccaaatcgatgtccagacgccaacccgtccccgccgccgctgcgaagctggaggaaggggagcatgagctgagcatcgtcgacgcgctcctcgaggtgttgtcgggccgctgcgagctgcgacggacctccttcggctctcggcgcctgtaccggcgctttagcttcacctccatgggggcgccgccacagggaagacgcgtgcgctcctcctcgctctccgccaagtgataaattttctcaaatttgtgaggttttcaaatgtatctatagatttgttttttccctgatcgttagagtattctaggttgtgaatatggtggaatttcttgattaatgtcttggcgtggggattcagttgcctgggtaccagatatagcgatgagcgaaatttaaggccccagagaattgatttttcaggttatatctgatttgactcaaggtagggtatgtgtccacttctttttcccctgaactaaaattcatgtttacatttaggttttagttacaaataatgatggatatttgttgctcggaatttctataaaagaattagaaacagtgcatgtttttttatctagatcacatacatgcttacagcttatatacccattgtttgcattgtaaaacaagaatatgtaagccatatagactcgtgatgagattcactcgctattgtctgttcttcagatttcttcatggcttttcagtcctagacacagcaacccctatacttttcttgaactaagtttggaaggtattctacaaaagtagtaagaggattaggttccttaataccttcagattcatgcaccgcactcatatttcatgttcgaaagtggaaactgctcctttggctggtcttgtaacatattctgacaaagaaatgttcctacattgtatgaggttatatatgctaggctgctagcaacctttatgttaaccctttcatacttctgttatagtattcattaggacaacagtcactcaaaatcattacttcattttcatttatcatttgttactctgatctcatatgggctaccttttttggaaataatgctggtgagtttcaaacctcattggaatctattcagaattcactagcagatgggttgctaaaactgacagaacaagtaacttctgacaatcggagtattgcatctttatctatatgtatgcacatttggttgaaattctatgcagtgtcaacaggtacacactttacaagattacattttcattacaagatgcttgattgcagccaatattttcatttctttggtgcttgtgtagaagtatcgccttgcaaagtatataccagactctcatgctaaaggttttaaggacgacaagaaagtttgagtgattccctctcgaacatggattatgtaccatattctgaaatgtgtttagaggattgcaaatcaatgaggcactaaagatgcaactggaagttcagaagcggctacacgagcaactggaggtatttgaaggtgtttgagataaataatgatgctaaaatgaaaaggacaatgcgacgtcccctaccatctggtcgtgttagttctacacatgctgccatgtgggctacaagtgcaggaattgcaggaacaactttgctggcctctcgaaggttagcgctatgtcgtggtgctccactttaaagatgtgcatgccacgtctacacttcccgtctctgattatagattaggtctttactccctgatgtttagccagtgcgtgctgttacccactaggtctagccgtagtcagtgactgcacaaccacaacccgctcttgtgtattttgcgtttgcggatcgcatcgcatgttattttggtccttctatattcatgctacaaggctgcaaactgtggtgctcatacatttatgtaaccagtaacctataacgactttgatgtatattatattttgtaacagtgaacttgactatcgtagatatgtagcttgctggaacgattttttagtgtacgactgtgctacaatgactgtagcgcccggtagggcgctgccctattctagtagaaataaaggaggaagtcccttgatatata

SEQ ID NO: 10572 - DNA, 2242 bp, Zea Mays
ctcagccacacgcgtgcctacgcgtgcgcaaggcgtcggactcaaaaaccttttctccaatccaactccgagtctgagcgtgtcgcgttccattacccatcccgccgctaccggcttagtcccagcctcgccccctctccgcagagcgcatccatctccctacctcgagcccaaatcgatgtccagacgccaacccgtccccgccgccgctgcgaagctggaggaaggggagcatgagctgagcatcgtcgacgcgctcctcgaggtgttgtcgggccgctgcgagctgcgacggacctccttcggctctcggcgcctgtaccggcgctttagcttcacctccatgggggcgccgccacagggaagacgcgtgcgctcctcctcgctctccgccaagtgataaattttctcaaatttgttttcaaatgtatctatagatttgttttttccctgatcgttagagtattctaggttgtgaatatggtggaatttcttgattaatgtcttggcgtggggattcagttgcctgggtaccagatatagcgatgagcgaaatttaaggccccagagaattgatttttcaggttatatctgatttgactcaaggtagggtatgtgtccacttctttttcccctgaactaaaattcatgtttacatttaggttttagttacaaataatgatggatatttgttgctcggaatttctataaaagaattagaaacagtgcatgtttttttatctagatcacatacatgcttacagcttatatacccattgtttgcattgtaaaacaagaatatgtaagccatatagactcgtgatgagattcactcgctattgtctgttcttcagatttcttcatggcttttcagtcctagacacagcaacccctatacttttcttgaactaagtttggaaggtattctacaaaagtagtaagaggattaggttccttaataccttcagattcatgcaccgcactcatatttcatgttcgaaagtggaaactgctcctttggctggtcttgtaacatattctgacaaagaaatgttcctacattgtatgaggttatatatgctaggctgctagcaacctttatgttaaccctttcatacttctgttatagtattcattaggacaacagtcactcaaaatcattacttcattttcatttatcatttgttactctgatctcatatgggctaccttttttggaaataatgctggtgagtttcaaacctcattggaatctattcagaattcactagcagatgggttgctaaaactgacagaacaagtaacttctgacaatcggagtattgcatctttatctatatgtatgcacatttggttgaaattctatgcagtgtcaacaggtacacactttacaagattacattttcattacaagatgcttgattgcagccaatattttcatttctttggtgcttgtgtagaagtatcgccttgcaaagtatataccagactctcatgctaaaggttttaaggacgacaagaaagtttgagtgattccctctcgaacatggattatgtaccatattctgaaatgtgtttagaggattgcaaatcaatgaggcactaaagatgcaactggaagttcagaagcggctacacgagcaactggaggtatttgaaggtgtttgagataaataatgatgctaaaatgaaaaggacaatgcgacgtcccctaccatctggtcgtgttagttctacacatgctgccatgtgggctacaagtgcaggaattgcaggaacaactttgctggcctctcgaaggttagcgctatgtcgtggtgctccactttaaagatgtgcatgccacgtctacacttcccgtctctgattatagattaggtctttactccctgatgtttagccagtgcgtgctgttacccactaggtctagccgtagtcagtgactgcacaaccacaacccgctcttgtgtattttgcgtttgcggatcgcatcgcatgttattttggtccttctatattcatgctacaaggctgcaaactgtggtgctcatacatttatgtaaccagtaacctataacgactttgatgtatattatattttgtaacagtgaacttgactatcgtagatatgtagcttgctggaacgattttttagtgtacgactgtgctacaatgactgtagcgcccggtagggcgctgccctattctagtagaaataaaggaggaagtcccttgatatata

SEQ ID NO: 10573 - DNA, 4274 bp, Zea Mays
ggggcccgccagcaggcgcgcgcgcacgcagagagctgcggagaggagagagaaagtgtggaaatggggagcgcagggacacggcgtccattttgcggagagggatgcggagcctgctggagcgcgcaatagtgcctcaaaccgtgcaaaatgcggatgcggagtgggatacggagtcttgctggagttggtcttattcgtgacgatgagtcgatgagactaatatgtaaatagcacctcaaaccttagatactagctgtgaagacagtgctacctgtcactctgtcagtcagacacctcgcccgcttcatttcgttcctccgcgtggtcagaaaaaactcagcaagcattggagagcaagagtaggaattaactcaaaggggaggaaggggaagacggcaattatgcacaacggcgtcgacgctcggccggggcccctcctccacctccccggcgcatcaccagctccctgctccggccgccgggtcccatggccgcggtcggggttaggggccgcgctgcggcagccaaatagcccccacggccgcctccgcttcgggcccctcccggccggcgaactctgcaagcggacccaccgtgtccgtatctctcacccttcgtatagccttttttttattattatgatcatctacaatctttttgtttcatcttcataggtttttgtcgggcccagagcctcagaatgacatattgacatgtagcttgttcggttattactatgtcacatgtattggatgtgattagaaaaaagaattgtagaaattttgacttattatggattataaacccaactaatccccttcaaaccacacggattgagatgaaaacaaacagacccttatatgtgccaataattatttgatgaaatttcttagtgccacggattctcattagagattatttctttgaattttcttaccgccccaaaaaacaaataacttactatagcagaacttacgggttcttgtgtggcaggagaagctacgtgtcgctgtgcttgtatcgaagtccacactgcagagcgaccatggtgcctcacttcagagtgagcgtgttgttcctcaaggtgtcaaagctgctgctgggtttcagatctctgccgacgacctagcatcacttgttgaaaatcgtgacaccgggaagttgactctgctcggccagctggatggaatcgcagacaagttggcgacgtcgttggctgatgggatcaccacggatgagctcagcctgaatcaaaggcagggcatgtatggagtgaacaagttcacggagagtgaggcccgcagcttatgggagttcgtgtgggaggcactgcaagacactactcttgtaattcttatagcatgtgcccttgtatctttcgttgttggcatcgccacggaagggtggccgagtggtgcccatgatggcattggaatctttacaagtatcctcctggttgtctctgttactgcgacgagcaattatcagcagtctttgcaattcagggatctggacagagagaagaggaaaatttctgttcaggttactagagatggattcagacaaaggatactgatagatgatcttcttcctggtgatgttgtccacctaggtgttggagatcaggttcctgcagatggcctctttgtttctgggtattctgtattggtcaacgagtccagcctaactggtgagagtgaacctgttgtcataagtgaagataaccctttccttttgtcagggactaaagtcctagatgggtcatgcataatgctggttacagcagtagggatgcgaacacagtggggtaaactaatggctgccatcactgaaagtggggatgatgaaactccgctgcagggtaaattaaacggtgttgcaaatactattggaaatatcggtctgttttttgcccttttaacttttgttatcctctcgcaagggttagtgggccagaaatactctgatgggcttcttttaagctggactggagaagatgtactggagatactggaacattttgccattgcagtcacaattgttgttgttgctgttcctgagggattgcctttagcagtgacattgagccttgcatttgcaatgaagaagatgatgagtgagaaggcactggtgcgacagttatctgcctgtgaaactatgggctcagccactgttatatgtagtgataagacaggaacacttacaactaatcgcatgtctgtcacgaaggcctgcatatgtggaaacaccatggaagtgaacaattcatcagtgctttcaagtttttcttccaaagtcccagaatttgctttgcaaattcttatggaatccatttttaacaacactgctggtgaagtggtgattaaccaagatgggaagtgtcagatactagggaccccaactgaggctgctttgttggactttgcattgacaataggtggagacttcaaagaaaaacggcaggaaactaagattgttaaagtcgagccttttaattcaacaaaaaaaaggatgggcatcattctcgagcttcctggtggaggataccgtgcacattgtaaaggtgcttcagaagtagtcttagctgcctgtgataatttcatagatgccagaggtactattgttgcactcgataaaacagctacaaagaaactcagtgatgtcattgaaaccttttctaaagaagcactcaggacactctgccttgcttatcgggaaatggatgatagtttttctgttgacgagcaaataccgctacaaggatacacatgcattggcattgttgggatcaaagatcctgttcgtccaggtgtcaggcagtccgtggcaacttgtcggtctgctggcattgcggttcgaatggttacaggagacaacataaatacagctaaggcaattgctcgtgaatgtggtatacttactgaggatggtattgccattgaaggcgctgagttcagagagaaaaatcctgaagaactcctcgagttgattccaaagatgcaggtcctggcccgatcatcaccacttgataagcatgcacttgtgaaatacttgcgtaccacgtttaatgaggtcgttgctgtgactggggatggtacaaatgatgcaccggcactacgtgaggcagatattggacttgccatgggaattgcagggactgaggttgctaaggagagcgctgatgttgttattcttgatgacaatttctccaccattgtaacagttgcgaaatggggacgctctgtttatgtcaacatccaaaagtttgtgcagttccagctgactgttaatgttgtcgcacttctggttaacttctcttcagcgtgctttacaggagatgctccactgaccgctgttcaacttctttgggttaacatgatcatggataccctaggagcgcttgctcttgcaactgaaccacctgatgacaacttaatgaagaaatcaccagtcggaaggacagggaggttcatcacgaacgtgatgtggaggaatattgtggggcagtcaatattccagtttgtggtcatttggtatctacaaacacaaggggaatacttgtttgggcttgaaagctctgaagctaatactgttctaaatacaatcatattcaacactttcgtattctgccaggttttcaatgagataagctcgagagacatggaggagatcaatgttttgaagggtttgccacagaactccattttcatgagcatcctcggtggcaccatcattttccagttcatcctggtccagttcctaggagattttgccaacaccacgcctctcacccatctccaatggctcgtcagcattctctttggcctcctcgggatgcccattgctgctgccatcaaactgattcctgtggaacctcgcgaagatgatggccggataccataatcatgtacattaagagcaatagatcagcttcaccagctgctaactactgtaaccttacctaatccacaagaataggagcagagcaccaatttgtgaagaaacggtttgtttgactgggacattaatatacccgtattactaaactgtatattgagtcgtccatttagttttattttttccttacaaatagtaccttgtggcttgtatacaccagcgtccatttgctattatgaaatgggatgtggtggattacaataacgtgggattgttacacagtttgtacctgtgtcagttgtaagtagactgcaaatttgaatgcaacacagttataactctagcttgattgttgattcaaacagttcatttct

SEQ ID NO: 10574 - DNA, 3876 bp, Zea Mays
ggggcccgccagcaggcgcgcgcgcacgcagagagctgcggagaggagagagaaagtgtggaaatggggagcgcagggacacggcgtccattttgcggagagggatgcggagcctgctggagcgcgcaatagtgcctcaaaccgtgcaaaatgcggatgcggagtgggatacggagtcttgctggagttggtcttattcgtgacgatgagtcgatgagactaatatgtaaatagcacctcaaaccttagatactagctgtgaagacagtgctacctgtcactctgtcagtcagacacctcgcccgcttcatttcgttcctccgcgtggtcagaaaaaactcagcaagcattggagagcaagagtaggaattaactcaaaggggaggaaggggaagacggcaattatgcacaacggcgtcgacgctcggccggggcccctcctccacctccccggcgcatcaccagctccctgctccggccgccgggtcccatggccgcggtcggggttaggggccgcgctgcggcagccaaatagcccccacggccgcctccgcttcgggcccctcccggccggcgaactctgcaagcggacccaccggagaagctacgtgtcgctgtgcttgtatcgaagtccacactgcagagcgaccatggtgcctcacttcagagtgagcgtgttgttcctcaaggtgtcaaagctgctgctgggtttcagatctctgccgacgacctagcatcacttgttgaaaatcgtgacaccgggaagttgactctgctcggccagctggatggaatcgcagacaagttggcgacgtcgttggctgatgggatcaccacggatgagctcagcctgaatcaaaggcagggcatgtatggagtgaacaagttcacggagagtgaggcccgcagcttatgggagttcgtgtgggaggcactgcaagacactactcttgtaattcttatagcatgtgcccttgtatctttcgttgttggcatcgccacggaagggtggccgagtggtgcccatgatggcattggaatctttacaagtatcctcctggttgtctctgttactgcgacgagcaattatcagcagtctttgcaattcagggatctggacagagagaagaggaaaatttctgttcaggttactagagatggattcagacaaaggatactgatagatgatcttcttcctggtgatgttgtccacctaggtgttggagatcaggttcctgcagatggcctctttgtttctgggtattctgtattggtcaacgagtccagcctaactggtgagagtgaacctgttgtcataagtgaagataaccctttccttttgtcagggactaaagtcctagatgggtcatgcataatgctggttacagcagtagggatgcgaacacagtggggtaaactaatggctgccatcactgaaagtggggatgatgaaactccgctgcagggtaaattaaacggtgttgcaaatactattggaaatatcggtctgttttttgcccttttaacttttgttatcctctcgcaagggttagtgggccagaaatactctgatgggcttcttttaagctggactggagaagatgtactggagatactggaacattttgccattgcagtcacaattgttgttgttgctgttcctgagggattgcctttagcagtgacattgagccttgcatttgcaatgaagaagatgatgagtgagaaggcactggtgcgacagttatctgcctgtgaaactatgggctcagccactgttatatgtagtgataagacaggaacacttacaactaatcgcatgtctgtcacgaaggcctgcatatgtggaaacaccatggaagtgaacaattcatcagtgctttcaagtttttcttccaaagtcccagaatttgctttgcaaattcttatggaatccatttttaacaacactgctggtgaagtggtgattaaccaagatgggaagtgtcagatactagggaccccaactgaggctgctttgttggactttgcattgacaataggtggagacttcaaagaaaaacggcaggaaactaagattgttaaagtcgagccttttaattcaacaaaaaaaaggatgggcatcattctcgagcttcctggtggaggataccgtgcacattgtaaaggtgcttcagaagtagtcttagctgcctgtgataatttcatagatgccagaggtactattgttgcactcgataaaacagctacaaagaaactcagtgatgtcattgaaaccttttctaaagaagcactcaggacactctgccttgcttatcgggaaatggatgatagtttttctgttgacgagcaaataccgctacaaggatacacatgcattggcattgttgggatcaaagatcctgttcgtccaggtgtcaggcagtccgtggcaacttgtcggtctgctggcattgcggttcgaatggttacaggagacaacataaatacagctaaggcaattgctcgtgaatgtggtatacttactgaggatggtattgccattgaaggcgctgagttcagagagaaaaatcctgaagaactcctcgagttgattccaaagatgcaggtcctggcccgatcatcaccacttgataagcatgcacttgtgaaatacttgcgtaccacgtttaatgaggtcgttgctgtgactggggatggtacaaatgatgcaccggcactacgtgaggcagatattggacttgccatgggaattgcagggactgaggttgctaaggagagcgctgatgttgttattcttgatgacaatttctccaccattgtaacagttgcgaaatggggacgctctgtttatgtcaacatccaaaagtttgtgcagttccagctgactgttaatgttgtcgcacttctggttaacttctcttcagcgtgctttacaggagatgctccactgaccgctgttcaacttctttgggttaacatgatcatggataccctaggagcgcttgctcttgcaactgaaccacctgatgacaacttaatgaagaaatcaccagtcggaaggacagggaggttcatcacgaacgtgatgtggaggaatattgtggggcagtcaatattccagtttgtggtcatttggtatctacaaacacaaggggaatacttgtttgggcttgaaagctctgaagctaatactgttctaaatacaatcatattcaacactttcgtattctgccaggttttcaatgagataagctcgagagacatggaggagatcaatgttttgaagggtttgccacagaactccattttcatgagcatcctcggtggcaccatcattttccagttcatcctggtccagttcctaggagattttgccaacaccacgcctctcacccatctccaatggctcgtcagcattctctttggcctcctcgggatgcccattgctgctgccatcaaactgattcctgtggaacctcgcgaagatgatggccggataccataatcatgtacattaagagcaatagatcagcttcaccagctgctaactactgtaaccttacctaatccacaagaataggagcagagcaccaatttgtgaagaaacggtttgtttgactgggacattaatatacccgtattactaaactgtatattgagtcgtccatttagttttattttttccttacaaatagtaccttgtggcttgtatacaccagcgtccatttgctattatgaaatgggatgtggtggattacaataacgtgggattgttacacagtttgtacctgtgtcagttgtaagtagactgcaaatttgaatgcaacacagttataactctagcttgattgttgattcaaacagttcatttct

SEQ ID NO: 10575 - DNA, 3895 bp, Zea Mays
ggggcccgccagcaggcgcgcgcgcacgcagagagctgcggagaggagagagaaagtgtggaaatggggagcgcagggacacggcgtccattttgcggagagggatgcggagcctgctggagcgcgcaatagtgcctcaaaccgtgcaaaatgcggatgcggagtgggatacggagtcttgctggagttggtcttattcgtgacgatgagtcgatgagactaatatgtaaatagcacctcaaaccttagatactagctgtgaagacagtgctacctgtcactctgtcagtcagacacctcgcccgcttcatttcgttcctccgcgtggtcagaaaaaactcagcaagcattggagagcaagagtaggaattaactcaaaggggaggaaggggaagacggcaattatgcacaacggcgtcgacgctcggccggggcccctcctccacctccccggcgcatcaccagctccctgctccggccgccgggtcccatggccgcggtcggggttaggggccgcgctgcggcagccaaatagcccccacggccgcctccgcttcgggcccctcccggccggcgaactctgcaagcggacccaccgtgagaagctacgtgtcgctgtgcttgtatcgaagtccacactgcagagcgaccatggtgcctcacttcagagtgagcgtgttgttcctcaaggtgtcaaagctgctgctgggtttcagatctctgccgacgacctagcatcacttgttgaaaatcgtgacaccgggaagttgactctgctcggccagctggatggaatcgcagacaagttggcgacgtcgttggctgatgggatcaccacggatgagctcagcctgaatcaaaggcagggcatgtatggagtgaacaagttcacggagagtgaggcccgcagcttatgggagttcgtgtgggaggcactgcaagacactactcttgtaattcttatagcatgtgcccttgtatctttcgttgttggcatcgccacggaagggtggccgagtggtgcccatgatggcattggaatctttacaagtatcctcctggttgtctctgttactgcgacgagcaattatcagcagtctttgcaattcagggatctggacagagagaagaggaaaatttctgttcaggttactagagatggattcagacaaaggatactgatagatgatcttcttcctggtgatgttgtccacctaggtgttggagatcaggttcctgcagatggcctctttgtttctgggtattctgtattggtcaacgagtccagcctaactggtgagagtgaacctgttgtcataagtgaagataaccctttccttttgtcagggactaaagtcctagatgggtcatgcataatgctggttacagcagtagggatgcgaacacagtggggtaaactaatggctgccatcactgaaagtggggatgatgaaactccgctgcagggtaaattaaacggtgttgcaaatactattggaaatatcggtctgttttttgcccttttaacttttgttatcctctcgcaagggttagtgggccagaaatactctgatgggcttcttttaagctggactggagaagatgtactggagatactggaacattttgccattgcagtcacaattgttgttgttgctgttcctgagggattgcctttagcagtgacattgagccttgcatttgcaatgaagaagatgatgagtgagaaggcactggtgcgacagttatctgcctgtgaaactatgggctcagccactgttatatgtagtgataagacaggaacacttacaactaatcgcatgtctgtcacgaaggcctgcatatgtggaaacaccatggaagtgaacaattcatcagtgctttcaagtttttcttccaaagtcccagaatttgctttgcaaattcttatggaatccatttttaacaacactgctggtgaagtggtgattaaccaagatgggaagtgtcagatactagggaccccaactgaggctgctttgttggactttgcattgacaataggtggagacttcaaagaaaaacggcaggaaactaagattgttaaagtcgagccttttaattcaacaaaaaaaaggatgggcatcattctcgagcttcctggtggaggataccgtgcacattgtaaaggtgcttcagaagtagtcttagctgcctgtgataatttcatagatgccagaggtactattgttgcactcgataaaacagctacaaagaaactcagtgatgtcattgaaaccttttctaaagaagcactcaggacactctgccttgcttatcgggaaatggatgatagtttttctgttgacgagcaaataccgctacaaggatacacatgcattggcattgttgggatcaaagatcctgttcgtccaggtgtcaggcagtccgtggcaacttgtcggtctgctggcattgcggttcgaatggttacaggagacaacataaatacagctaaggcaattgctcgtgaatgtggtatacttactgaggatggtattgccattgaaggcgctgagttcagagagaaaaatcctgaagaactcctcgagttgattccaaagatgcagtttacctgtgtgttgaaggtcctggcccgatcatcaccacttgataagcatgcacttgtgaaatacttgcgtaccacgtttaatgaggtcgttgctgtgactggggatggtacaaatgatgcaccggcactacgtgaggcagatattggacttgccatgggaattgcagggactgaggttgctaaggagagcgctgatgttgttattcttgatgacaatttctccaccattgtaacagttgcgaaatggggacgctctgtttatgtcaacatccaaaagtttgtgcagttccagctgactgttaatgttgtcgcacttctggttaacttctcttcagcgtgctttacaggagatgctccactgaccgctgttcaacttctttgggttaacatgatcatggataccctaggagcgcttgctcttgcaactgaaccacctgatgacaacttaatgaagaaatcaccagtcggaaggacagggaggttcatcacgaacgtgatgtggaggaatattgtggggcagtcaatattccagtttgtggtcatttggtatctacaaacacaaggggaatacttgtttgggcttgaaagctctgaagctaatactgttctaaatacaatcatattcaacactttcgtattctgccaggttttcaatgagataagctcgagagacatggaggagatcaatgttttgaagggtttgccacagaactccattttcatgagcatcctcggtggcaccatcattttccagttcatcctggtccagttcctaggagattttgccaacaccacgcctctcacccatctccaatggctcgtcagcattctctttggcctcctcgggatgcccattgctgctgccatcaaactgattcctgtggaacctcgcgaagatgatggccggataccataatcatgtacattaagagcaatagatcagcttcaccagctgctaactactgtaaccttacctaatccacaagaataggagcagagcaccaatttgtgaagaaacggtttgtttgactgggacattaatatacccgtattactaaactgtatattgagtcgtccatttagttttattttttccttacaaatagtaccttgtggcttgtatacaccagcgtccatttgctattatgaaatgggatgtggtggattacaataacgtgggattgttacacagtttgtacctgtgtcagttgtaagtagactgcaaatttgaatgcaacacagttataactctagcttgattgttgattcaaacagttcatttct

SEQ ID NO: 10576 - DNA, 3816 bp, Zea Mays
ggggcccgccagcaggcgcgcgcgcacgcagagagctgcggagaggagagagaaagtgtggaaatggggagcgcagggacacggcgtccattttgcggagagggatgcggagcctgctggagcgcgcaatagtgcctcaaaccgtgcaaaatgcggatgcggagtgggatacggagtcttgctggagttggtcttattcgtgacgatgagtcgatgagactaatatgtaaatagcacctcaaaccttagatactagctgtgaagacagtgctacctgtcactctgtcagtcagacacctcgcccgcttcatttcgttcctccgcgtggtcagaaaaaactcagcaagcattggagagcaagagtaggaattaactcaaaggggaggaaggggaagacggcaattatgcacaacggcgtcgacgctcggccggggcccctcctccacctccccggcgcatcaccagctccctgctccggccgccgggtcccatggccgcggtcggggttaggggccgcgctgcggcagccaaatagcccccacggccgcctccgcttcgggcccctcccggccggcgaactctgcaagcggacccaccgtgagaagctacgtgtcgctgtgcttgtatcgaagtccacactgcagagcgaccatggtgcctcacttcagagtgagcgtgttgttcctcaaggtgtcaaagctgctgctgggtttcagatctctgccgacgacctagcatcacttgttgaaaatcgtgacaccgggaagttgactctgctcggccagctggatggaatcgcagacaagttggcgacgtcgttggctgatgggatcaccacggatgagctcagcctgaatcaaaggcagggcatgtatggagtgaacaagttcacggagagtgaggcccgcagcttatgggagttcgtgtgggaggcactgcaagacactactcttgtaattcttatagcatgtgcccttgtatctttcgttgttggcatcgccacggaagggtggccgagtggtgcccatgatggcattggaatctttacaagtatcctcctggttgtctctgttactgcgacgagcaattatcagcagtctttgcaattcagggatctggacagagagaagaggaaaatttctgttcaggttactagagatggattcagacaaaggatactgatagatgatcttcttcctggtgatgttgtccacctaggtgttggagatcaggttcctgcagatggcctctttgtttctgggtattctgtattggtcaacgagtccagcctaactggtgagagtgaacctgttgtcataagtgaagataaccctttccttttgtcagggactaaagtcctagatgggtcatgcataatgctggttacagcagtagggatgcgaacacagtggggtaaactaatggctgccatcactgaaagtggggatgatgaaactccgctgcagggtaaattaaacggtgttgcaaatactattggaaatatcggtctgttttttgcccttttaacttttgttatcctctcgcaagggttagtgggccagaaatactctgatgggcttcttttaagctggactggagaagatgtactggagatactggaacattttgccattgcagtcacaattgttgttgttgctgttcctgagggattgcctttagcagtgacattgagccttgcatttgcaatgaagaagatgatgagtgagaaggcactggtgcgacagttatctgcctgtgaaactatgggctcagccactgttatatgtagtgataagacaggaacacttacaactaatcgcatgtctgtcacgaaggcctgcatatgtggaaacaccatggaagtgaacaattcatcagtgctttcaagtttttcttccaaagtcccagaatttgctttgcaaattcttatggaatccatttttaacaacactgctggtgaagtggtgattaaccaagatgggaagtgtcagatactagggaccccaactgaggctgctttgttggactttgcattgacaataggtggagacttcaaagaaaaacggcaggaaactaagattgttaaagtcgagccttttaattcaacaaaaaaaaggatgggcatcattctcgagcttcctggtggaggataccgtgcacattgtaaaggtgcttcagaagtagtcttagctgcctgtgataatttcatagatgccagaggtactattgttgcactcgataaaacagctacaaagaaactcagtgatgtcattgaaaccttttctaaagaagcactcaggacactctgccttgcttatcgggaaatggatgatagtttttctgttgacgagcaaataccgctacaaggatacacatgcattggcattgttgggatcaaagatcctgttcgtccaggtgtcaggcagtccgtggcaacttgtcggtctgctggcattgcggttcgaatggttacaggagacaacataaatacagctaaggcaattgctcgtgaatgtggtatacttactgaggatggtattgccattgaaggcgctgagttcagagagaaaaatcctgaagaactcctcgagttgattccaaagatgcaggtcctggcccgatcatcaccacttgataagcatgcacttgtgaaatacttgcgtaccacgtttaatgaggtcgttgctgtgactggggatggtacaaatgatgcaccggcactacgtgaggcagatattggacttgccatgggaattgcagggactgagttgcgaaatggggacgctctgtttatgtcaacatccaaaagtttgtgcagttccagctgactgttaatgttgtcgcacttctggttaacttctcttcagcgtgctttacaggagatgctccactgaccgctgttcaacttctttgggttaacatgatcatggataccctaggagcgcttgctcttgcaactgaaccacctgatgacaacttaatgaagaaatcaccagtcggaaggacagggaggttcatcacgaacgtgatgtggaggaatattgtggggcagtcaatattccagtttgtggtcatttggtatctacaaacacaaggggaatacttgtttgggcttgaaagctctgaagctaatactgttctaaatacaatcatattcaacactttcgtattctgccaggttttcaatgagataagctcgagagacatggaggagatcaatgttttgaagggtttgccacagaactccattttcatgagcatcctcggtggcaccatcattttccagttcatcctggtccagttcctaggagattttgccaacaccacgcctctcacccatctccaatggctcgtcagcattctctttggcctcctcgggatgcccattgctgctgccatcaaactgattcctgtggaacctcgcgaagatgatggccggataccataatcatgtacattaagagcaatagatcagcttcaccagctgctaactactgtaaccttacctaatccacaagaataggagcagagcaccaatttgtgaagaaacggtttgtttgactgggacattaatatacccgtattactaaactgtatattgagtcgtccatttagttttattttttccttacaaatagtaccttgtggcttgtatacaccagcgtccatttgctattatgaaatgggatgtggtggattacaataacgtgggattgttacacagtttgtacctgtgtcagttgtaagtagactgcaaatttgaatgcaacacagttataactctagcttgattgttgattcaaacagttcatttct

SEQ ID NO: 10577 - DNA, 2005 bp, Zea Mays
aggaaacaggcttccccacgaggccacgattatttacgaacgaccccaactcctggagcgctctggaccgccctccccagaccccaaccaacggacgacgactccgtccagaattccagatcacgcatatctctctccctccctctctctcctcggcctcgccgcccctgtcccctcctacactgccgcgcgcgcatcgtggaatggagatccctccggccatgaagtgatctatttcttcgtcgcccctagctcgcgcacaggagaaggagaaggagaaagagaaagcaggagcccgctcgcggcgaggcagcaggatgtcttcgtctaactcgccctgtgccgcgtgtaagctgctgcgccgcaagtgcacgcagggatgcgtgttcgcgccctacttcccgcccgacaatccgggcaagttcgcgagcgtgcaccgcgtcttcggcgccagcaacgtctcgaagctcctcaacgacctggaccagctgcagcgggaggacgccgtaaactccctggcgtacgaggccgacgcgcgcatccgcgaccccgtctatggctgcgtggcctacatctccgtgctgcagatgaagatcaaacgggtccgcgacgagatcgccaacgcgcgcaaggagctggcggcttacattgggaccgcggcctttgcgccttacgtcgccacgccgcagtaccaccaccatcagtacgcggcaggccgcggtatacgcgcacgccgtgcccagcggcggccccacggtcgccgttgtgccgcccgacgcgctgccgtacgagggcggcttcctcttccagcagcagccgcccccttcgcaggcgcagaccgccgtggcgctcacgtaccagatggagcagtccccgccgtcgtcgtcctcgggccagtctcaccccgaggtgtcgcagcagcacaatacggatggcagcgacgagggcagcggtggcggtggtgtcgtgccgccggcctgatctgagtcgtctcgtctgacggcgcgctgcacgcttgcctctcattcgagcttgctttagccttttgctttcttgtgtttggtgttcgtaatgaatctttttccccttccgtcgtcttcatcatatggccggcgtacgtcttggcatcgtctcggtctagaatccatgcacgtttcaagtggcaaaattccaattatttccctcccgaagccagactatagctggattcttatcaaggttccacatgatcagttgcctttcttcctcaagagttagagccaaataaatgctggacagaaagagtggtaggaaatggcctggggacagatactcatcatatggatcagtgtaacacagagaaattaatggtgggaaggtggaggtagacagaaacagcagagagaagcatgcatggtgtgcttcagcgcaggaggggagcagtaaatggtgaagtaagataggaaacaagatgcatgcaagtagcttgcaatttgcaggagggagcagcagcaggcatgaataaagaaatcaacacgaacatgataagcaactcatataatatactgactccgttctcgaatatttgttggccattagtttatttttaaactaaaacatgacataaaaaagaacggagggagtatcttagttcacttgtgcatttggtgttgaacatatgtttttttttcaccgcttaattttattattattctttcatcttttcccctccttttctgtttctcattggtaaattctttctgtcgtcttgcattgtgtgtataaagaaatagaatcctttcatttatttgaacataaatggatggaggcaagagctagttagtcatcgttttaatttgtaaagtcaatgttgttttgtctgaattattattatatatccggtagccttcatgactatggtagggccaccaggctcacttcgacattctaaaaatgagccctaccatatagtcccgtcaatatgtatcagtttaaataagttaaatgtgtgttatttctttagaag

SEQ ID NO: 10578 - DNA, 1069 bp, Zea Mays
tctttttctattctatgcttcacataaggccagataggtatgtggcactatttggtgagtttagttataatccgaccaaatggaggccaagcatcccttttgaagaacaattgaaggctttacaggagttagttgacgaaggaaaggttcgctatatcggtgtttcaaacgagacctcatacggagtaatggagtttgtacatgctgcaaaggctcaaggccttccaaagatcgtgagcatccagaacagttacagtctacttgtgagatgccgctttgaagttgatcttgttgaagtttgccacccgaataactgcaacgttggactgcttgcatactccccgttggctggtggggttctcactgggaagtatcttgacgctaacgctgacatctcaaagagcaggctaaatctcttccctggatacatggcacgctacaatgactctttggctaaagaagcgacattagagtacgttaagcttgccaagaagcacgggctaactccagtccagcttgcccttggcttcgtgcgtgatcgtccattcaccgctagctccatcattggagcgaccaccatggagcaggtgaaggagaacatcgacgcgtttaccagcactccacggcctctaccacaggaagttcttgacggcattgaggatcttttcaagagatacaaagatccagcaatcctctagtttttcattcaccttttttggcgaaaagtagcaatcctcggacaatacaaagcccagaaaacatattacaacctatgatcgtatggtcataccattttgttcatgctgatacaattattgctttgttcttgtattggctctacaggcaataccagcagagcagaattatgttttctttccttcactgtgtaagtagaatgcaggttttcactgtgtaagcgttcttttatactctgctagtaactgtatgatgtcttcgacattgacaggtctcaagtggacaggtttaaccactactctctgcatggtaacagtagtaaaagatcgttaaactacaagatgcatttttttaatgataaatccaatgatac

SEQ ID NO: 10579 - DNA, 1799 bp, Zea Mays
cacgagcgttggccgttgggctcttcgcatatccaccacccacccataaggcatcagcgccgctgccgacttcatcttttgcgttccccgtggcgggttggcaggccacttcatccgcctcgtcggcttcattcatcaccaggaatttccatcgccgcgcccggcgtctcctccactcgcctcccctactctatagcattccatttctgagctcgctaactgcgtttcttcggctcgccggtgagccacggattgggttcggcgggaggccgggaaacgggaatttatttcaccagtatgcaacagatggccatgccatcgttcgccgtaacctcacctccgtcgcatggcactaccttatgggcgcctcatgctcgtcgtcctcaaagactgcacaagagacacgtgcgcagccaagtccgggcagtggcacaagcacagctgcagtaccagaagctgggggactcagacctcctcatcagtgaggtcactcttggaacgatgacttttggcgagcaaaacacggagaaggaagcacatgacattatcgcttattctttcgatcaaggtgtcaatatcctagacacagcggaaattataattttggccaccaaagttgccggttattcagagcggtctacatttcttcgagacaatgcaaaagtggttcgtgttgatgctgccaatatcaaagaaagtattgaaaagagtcttaaacgcttgtctacagattacattgatttgcttcagatacactggccagataggtatgtggcactatttggtgagtttagttataatccgaccaaatggaggccaagcatcccttttgaagaacaattgaaggctttacaggagttagttgacgaaggaaaggttcgctatatcggtgtttcaaacgagacctcatacggagtaatggagtttgtacatgctgcaaaggctcaaggccttccaaagatcgtgagcatccagaacagttacagtctacttgtgagatgccgctttgaagttgatcttgttgaagtttgccacccgaataactgcaacgttggactgcttgcatactccccgttggctggtggggttctcactgggaagtatcttgacgctaacgctgacatctcaaagagcaggctaaatctcttccctggatacatggcacgctacaatgactctttggctaaagaagcgacattagagtacgttaagcttgccaagaagcacgggctaactccagtccagcttgcccttggcttcgtgcgtgatcgtccattcaccgctagctccatcattggagcgaccaccatggagcaggtgaaggagaacatcgacgcgtttaccagcactccacggcctctaccacaggaagttcttgacggcattgaggatcttttcaagagatacaaagatccagcaatcctctagtttttcattcaccttttttggcgaaaagtagcaatcctcggacaatacaaagcccagaaaacatattacaacctatgatcgtatggtcataccattttgttcatgctgatacaattattgctttgttcttgtattggctctacaggcaataccagcagagcagaattatgttttctttccttcactgtgtaagtagaatgcaggttttcactgtgtaagcgttcttttatactctgctagtaactgtatgatgtcttcgacattgacaggtctcaagtggacaggtttaaccactactctctgcatggtaacagtagtaaaagatcgttaaactacaagatgcatttttttaatgataaatccaatgatac

SEQ ID NO: 10580 - DNA, 1874 bp, Zea Mays
cacgagcgttggccgttgggctcttcgcatatccaccacccacccataaggcatcagcgccgctgccgacttcatcttttgcgttccccgtggcgggttggcaggccacttcatccgcctcgtcggcttcattcatcaccaggaatttccatcgccgcgcccggcgtctcctccactcgcctcccctactctatagcattccatttctgagctcgctaactgcgtttcttcggctcgccggtgagccacggattgggttcggcgggaggccgggaaacgggaatttatttcaccagtatgcaacagatggccatgccatcgttcgccgtaacctcacctccgtcgcatggcactaccttatgggcgcctcatgctcgtcgtcctcaaagactgcacaagagacacgtgcgcagccaagtccgggcagtggcacaagcacagctgcagtaccagaagctgggggactcagacctcctcatcagtgaggtcactcttggaacgatgacttttggcgagcaaaacacggagaaggaagcacatgacattatcgcttattctttcgatcaaggtgtcaatatcctagacacagcggaaatttacccagttccaatgaacaaggaaactcaagggagaactgatctttatattggcaggtggatgcaatcaaaaccacgagacaagataattttggccaccaaagttgccggttattcagagcggtctacatttcttcgagacaatgcaaaagtggttcgtgttgatgctgccaatatcaaagaaagtattgaaaagagtcttaaacgcttgtctacagattacattgatttgcttcagatacactggtatgtggcactatttggtgagtttagttataatccgaccaaatggaggccaagcatcccttttgaagaacaattgaaggctttacaggagttagttgacgaaggaaaggttcgctatatcggtgtttcaaacgagacctcatacggagtaatggagtttgtacatgctgcaaaggctcaaggccttccaaagatcgtgagcatccagaacagttacagtctacttgtgagatgccgctttgaagttgatcttgttgaagtttgccacccgaataactgcaacgttggactgcttgcatactccccgttggctggtggggttctcactgggaagtatcttgacgctaacgctgacatctcaaagagcaggctaaatctcttccctggatacatggcacgctacaatgactctttggctaaagaagcgacattagagtacgttaagcttgccaagaagcacgggctaactccagtccagcttgcccttggcttcgtgcgtgatcgtccattcaccgctagctccatcattggagcgaccaccatggagcaggtgaaggagaacatcgacgcgtttaccagcactccacggcctctaccacaggaagttcttgacggcattgaggatcttttcaagagatacaaagatccagcaatcctctagtttttcattcaccttttttggcgaaaagtagcaatcctcggacaatacaaagcccagaaaacatattacaacctatgatcgtatggtcataccattttgttcatgctgatacaattattgctttgttcttgtattggctctacaggcaataccagcagagcagaattatgttttctttccttcactgtgtaagtagaatgcaggttttcactgtgtaagcgttcttttatactctgctagtaactgtatgatgtcttcgacattgacaggtctcaagtggacaggtttaaccactactctctgcatggtaacagtagtaaaagatcgttaaactacaagatgcatttttttaatgataaatccaatgatac

SEQ ID NO: 10581 - DNA, 1154 bp, Zea Mays
cgaaaccctaacaagcgccgacgtacgtctcctgtcgttgcacacgccctatctctctttcatccctctctcgccactccctcccccgccgccctcctcttcgctgcccccgccactgccactgcccagaccacatcaccacacccgctcgccaaccagcttccccacaacctcgtgaacgaactgcatctccccgtcgacgcctacggctggactagcccagtggccggcgtcatcacagtgtcggacgtgatcaatacgaccaaactctggacatggaaggggctccaggcctccaacgaacaaagctgcttcaccgacaccgaccacatgatgcagttgacgcaaggagtcacacatccgtcttgatcccccttctcgccttcattctctgctaattaccttcttctcgtgttattaattccttggtacaatcaatatgcatgctgtgggtagatgcttcaattagttaccctaaagtccaaccgcatagtggcggacccagaaattgaagatagcctaggcgagattatctaatgctaacaattatagctgattttatataagaagacatgtgcatttgattttgatgtgcatttttatccggtgaggcagcccaggctgtggcctgtggtgcctggctagggcgtccgccactgcaaccgcatcacacagatggaggagtcgctcgtcgccggcaagacgttcaaccaagaacaggaggaggttaccagctccaagcccatcgtcgtgattctgatcgacgagctcgagcacctcagtacccgctcgcatcagctctcgcggaggagctctctcctcatcgcctaagtgtgacaactacctctgcgatgcaaaccgtagtggcaagctgccaaacaaactttacttgctggtggcgtagttctttctggtagaggtctgggctctggagacaatggtagtgaattcattggagaaaggggttttgtttcctttcttctttgggaggcgaagtgggttggagccagagagtccctaattttttagtgcattttgttgcagaagagccacatggtatgcgctgttttctattggttgatggccgaatttgcactttgtagtgtgatacagaagttgaaccctttaatataaggcacttacttttgttttct

SEQ ID NO: 10582 - DNA, 843 bp, Zea Mays
gcctttttagctcttcatcaggctgaagaggcattccagcgagaagatctatcggtgcatattggttgtttgacaaccagaatgtaatggcaagaaattaccctttgcacagtgtggcatgtgcggatgtgccatggcacatcaggtgcatttagaaagactgtagatgggaagtgggttcatgctttctgtgctgagtggttgttggacaccaagtatgtaaggggacaagataaacctgtagaaggaacggaaacccttgtagagggaaaggacacttgtgtctgcctccacaatgttggcgggtgcttaaggtgtagcagtggggattgcaacattactttccatcctacttgcgctagaagttgtggtttttacatgaacacaaaagggtttggtactacaccacaacacaaagcatactgtggcaaacacagcgtacaacagaaagaggctgatgcacaacaatatggacctgaggagctcacgagcatgaaacgaatgaggattagcatgccagatttacattattttgtttccctgtgtttggtagcataagaatgtttgcacaattactagaaatttaatgcaaatatttttatagaatatttcaaatgctcgaagcatttggacatctacatttagttgtcgttctattttattcaatcactaaatcatggccatttgtgctcttcaactatttatacagcttaacatttgcttcaaacaacagcttgtaatgttctcttttgaagtatcagatgcaagagctcattaatcactgccacttatgaagagatcagtctgaaatcaacatagtatctttagctaccttgtaaaaac

SEQ ID NO: 10583 - DNA, 4099 bp, Zea Mays
aattgatggcatcaaaatagtattctaacaaatcaatgcactgaaaaagaatattgatatgttttctcaaaacttgaacagtaacacttttggatatacaacatatcattgaatacaacaggacaaagccttgtaaaatattctagccttttgaaaggttatgctcgattcagacataaattagttgaaatataaatattaaaaattatagtgaacttacatgaactcctggatactgttaatgatcttctcaaggcaaagatggaggttgtattgtctgagacaagatcacaacaacaactttgatgactgagtttaactcgcttggtcacacttttcctattaaaaatgcaaaaacttgtgtatccattatgaaagctcagcagtttgagagacttgagtgttgctgacaaaaagattgctatatttgataaacaaaaaattgcataccataatgcttggagctgcatccataataacctggcttatgctagcaaaggtgaggatataagagatgacctgaatggtcttgacaaggctgttagtgttgttctagattgaggactaataagcattgataaaagtaaattcacaaagcaccgagatgaaaaaatgagcaaatcacgaagccagaagaacatatttggttatatgatctgcttattcagaatgtaacagacttgacagatttagttagctctagaagaagcaaaaatgaagaagagaactcttttattcatgtaacaccccgggatccacaaacaccccgagatgctactagacttcactaccaacggccgaacactaagcaaaacaaaatttggcagcgtctcctttgtaattataagcatcgcagaagcaaaagagatatatcaatacaaaatgaatcatactaatatgatataattctcatcaaagatgattaaccatgaatgaaccagcttatgcctacatcatatttcaaaatatgaacttcaaaagtcaataaccaaagctaattatttggttctttaaacagtgtgtgcaacgtgccgctacttcccactccccttgacgagcatcaagcacctgcactgagtaatgcaagagtgagatgaaacatctcagcaagcaaattgttttgacgagatatttaaaccacaaattgaattaatcaacattttaaagaaatcacaattaagatccaaaatacgtgtagatatagaactcaatagtcccaataaccgcaataccatctcatttcttcgaacaaccacaataggttgtataacacttccctgcttcaacaatacctgcaaatataacttcaatgtatgcataggaatgcaatatgtaggtcctctgccttcgtacctatgagagtataaaaccatgtcctctgcaaatatcacttcaagaatgcatatgaatgcaatgcatatgtcctctgccttcatacctctaagggtatgaagccgcatcgtacccctcctcgggcaacgtacgatgctaagttgtaccggtacagtcagacattaggtcacgacaaatttcagatgcaagtgaatcatgcaatgtatatggcatgctgcatttaacaatatacttcacttccttcacatacaatacaaacctcaaataatattttgtttaccttcaggggtgtgaattaatctcctgggtcatactcgaatcataatcatcatcaatatatggttgagcattagtataatacaagcaagtaaagcatcaccatagagttcaattatgaaagaattccataattctgaatattaaagtgtaggcgataaaaaaacaacaagtcaaaacggtagcaaccaccgctacattcacttgcctttatcgaagaagaaaagtgtactaggaatgatccagagtgtagccacctagggtttccccaagaagatctgcaagaagagatggggtagaacatctccttgatcctctcttcatcttcaattcaacatgctcctcctcttcttgatccttgctgcgtgggggagacctagagcgaggaggaagccatggagagggtagggggcggctgccaatggggaagagagggagggggcggcggccaaaggggtggaaagggtgggggtagctgcaaccattagggagaaggagagggggtcggctagggttggggaggagaggaggctcccatccatcagatcgagatcaatggcccaaactcgctctcccatttgagctcccgaccctagcggaaaaaatgccaaaagatctactgtttcctgaggaatgcctcttgaaactccaaaccccaatgccacagaacatgaaagaaaagagaaaaagaaatttaacttcttttcagaaaattggggtatcacaattcatgagtatgagctgaaaggattggctttccgagctgagtgatgtatctttttggctaagtcaaacagttcaacaggcaaaagagttgaaacatatgaattattctgctatgtccatactttcactgattctacactgcaacaacttttaaacagtcatgacaaggctttaatacaatcatacttacttccagcattagtgtttgagaaaaaaatagttaaagaaaccaaaatcctagattacagaagccttggcttaataataccatttgttgtaaaacttcttttctcttatgaaaaagtttgcttaggcatggttgcagagaaagaaagaaaagaagaatagatggaaggatcaagttattcatacatttattaaacctatatcagaattttagacttgcttttgtgcctgatgagacttcctgaaacatgtatgcatgttgcgctgctgccgaagcccaagaagcatgaatgttgacttgaatgctcaacctcaatgtaccagaattataatccttggcttcgaagcataaattcagttcttagcactttaacataaaaaatgaaagggtaaggctatgccagctgaacatgtacctttaatctaactaccttatcagttagaggggagctaggggtttagtgcacttggatgcaggtgatgcttgcgtctgttctcagttgaggtaacttgattgtaaccggcaggtttttaggatatactacaaaagttcctgtttccttaattgccttcagaaattaaagtggtgtcttatttgccattgaaacatttttctaccttaatatttgaatcaaaacattcatcatctgctccaactttcgcaacacatagaggagatcatgattggaggataataaacaatcatttaaaaaagatttgcatttactcacctcttcgagtagaaggctaagaaccaactcatagactatagcaattttttctgaaagaaataaaatagacaaaaaaataataaactaactaaaacctaatctctttcacaaaatgcctctaattgatcatagtttcacgggtttctggctaggctatattctttaggaaaatctccctaataactaccgtacaagtggaagcaagccgtcatccaccacactgtatcaagcaagaaagcatagaattgctactatttgtggacaacgaaaatccaaatgtacctacattttttgcagcaagaatacacatgtatgtccctggccatcactgatcagagcaacatatgtaaggaagaaacgttacttctgaaatttatagtttatcaattagtaccactaaaacaaaaatgtatttcaaaacttgatgattgcaagcttttatcaaaccaatagtcatgctggtctaaagtatgcattaaattcgcatcaaaggggagacactgcataggtagaaacaccacagatatgatccaaagggaggagggtgcataccttagccattggagaaagcgcataacatgtcatcgcagtgcgggcaagccagctagttcccatatctaaaattctaacctgcagaatagtttggtgttcacagggtcatataacaatgaaaaaacagaaagattgctcttggaagaccatttaagaataagggacgtgcgtgtaatagaacttcataagacacatgccccattgagaggaatttcttaatatgctccttggtttaaggatctgcagaaataagagtgactcaaatacttagatat

SEQ ID NO: 10584 - DNA, 1188 bp, Zea Mays
  misc_feature (1)..(2): n is a, c, g, or t
nntggcatttatttttacacgtgcatactacataaatagtaacccaaagagttatcttcagatgatgccatgtgagagtagtaaatggacaacctattcaagtcatttcttggacaatatttctatgtagaaatgatacacataagggtcctaagctaaaattgtagcatagaaatatatttgacagccaaagatggtaacgatgagcaaatttgctagaaccacaacaggctatcaagaattcaagtgagttgggactatctgtaaacaaacacaacaagtaatgaaaaaataaaaattgtataacgtgatggccccctcttcatccaagtcgaagtccaagtctgtgacggatgatctatcatcaaagctgaccaagcggggctgcttcttgctcccttcccctacctgtaacactgaattatcaccctgattcccatttcatgtgcaactgcatttaccgaccaggaacactggcacgacatgcaggaactctgccaatgtcttctatataatgctgcatgttgtgtcgtcacacaaagctgatccatgggtccaacatgccaaactggtgtgcaaagctaacagctattggagtggttaaagtaatgagattttacacagctcactatacaagtagaaaaagaaattactccctaccctattcttccactcttttctaattccttagtccaaagtgaagacctcgataagatttcaaggccaatgcagagctacatattcatgcgagaacatggaaattgtgacgcaaaactgaataacaattcattaaaaacaattttctgtaattatggctaatggcaagaaaacaagttgaaccaatctgttgtcagaaagaaattcatgacgacaggccacgcaaagtaccttgcccatgtaacactgtgtcaccgtgtaaaaaggggggcatgcaaagatgctacacaaacagaacattatttagtcgtccaaatccatatctaaattgcacatgtaatactgtgtcaccacctgcagtaaaagctagataattcatcttcgcaacaagaacactgcaaacagggaaaataaggataaacacaaagtggttggtttctcacgcatatggcctcgtcgtcgcctcgccgtcggtttcaagcgtgcaggtcctcgccggatgctctgttgtgcctctgtggtcaatacaag

SEQ ID NO: 10585 - DNA, 944 bp, Zea Mays
aaaatgacctccagtttctaattcgacaagtactcaaggagttacatgatctcaggagaaagaattctgccttacagatgcagcagtttgttggggaggaaaaaaacgacttgctggactatttgaggtcattaacaccagagaaggttgctgaactatcagaatcgacgtctcccggtgtgcaagaaactattcattctgtggttcatggtttgcttgctactctttcccccaaggtacattcaaaggcccctccaccgctagataacatttctggtggtgttctaaaccttgggggcgaggatgatgatcgtgcagaacttgtggagaatgcttccctcccatttcagcccctaatatctgttccccgtgattatcttgcacgtttgctgttctggtgcatgctgctgggtcactacattcggggtctggagtaccggttagagcttgctcggcttctgcgaatatccagcgtgggttctttctctggtggagatgatcatgttgtttgagggtaccacgtctactgatattcctcaccgggaagaatggaaaggaaagccctggtcaagaaatgggccatatggcagagctgcagaggtgtccgttacactgctgagctatatagttgtagttcctgtatattcagaaaacagtcactcggttgtaaagctagtgttacatatgcacgtgaaccattttctttttcttcctttgatgttgtgccgtataaaaagaatttggtggttcgttggtgtttatctcgtggtagcataataggcatccttgtattctagttgtatgtttctggtggttgtgactgctgtccagtgtccatttagcttttttgtctattcttgattcgagtaaagcttaacttctcattttggaggtcgcaagctcatactttcattgaattatgggtccttttgattgggctttgg

SEQ ID NO: 10586 - DNA, 1840 bp, Zea Mays
ctcatcccacccaattccaccgtccatccaccccgggaccaatagcggccgtccacgagttcctcagcctggcccgcccgtcagcaacccaatccccccgcgagtatccacgggcgcgtgggtcgcaagcagacgcggggcgaagaatcgcaccgcgggagaccgagacaggcagccagcgcggggcagctgaagcctatcttgtaggagtatcttctatcaccacctcggtaccccgagggaaagaagaagcggaggggaggcaggaatcgcctgcccgcgcctccatcgccctgccggcgacggcccacatgccgaccgcctacagcctccgcgcgccgccctccgcctcgcagcagcgcctcaggctgcccctaccgccgcccccgccgccgctgccgttttgcccgggtggaggggccgcccgccggaggaggggtgtcggggtggcgtctgcgtccgcgtcgcccttcgacgagctgcacgcgcgggggaggcccgtacatggaccctccaagaaatccatgctctggaacttgatccaggatatagagcccttggacctaagtgtcatccagaaagatgttgctcctgaaacagtagatgcaatgaagaggactatttctggcatgttgggtcttcttccatctgatcagttccgtgtcattgtagaagccctttggaatcccttcttcaagttattggtatcttcaattatgactgggtatactctgcgaaatgctgaatacaggctttcttttgaaagaaatctagaactgcctgaagaaggtgtagaatgcctaaaaagtgatgtcactgaagataatcatcataacatcaatttgggaagacctgtcactatttttagattatccgaagaagacatgcctcaggaccctggaaaaaccgatgaagcatcatcttatgaaaatatgggagaagagcttggtgacttaacaccacaggcagaggagtatattattcagatgcaatctcatttgaatgccatgaaaaaggagttacatgatctcaggagaaagaattctgccttacagatgcagcagtttgttggggaggaaaaaaacgacttgctggactatttgaggtcattaacaccagagaaggttgctgaactatcagaatcgacgtctcccggtgtgcaagaaactattcattctgtggttcatggtttgcttgctactctttcccccaagaacttgtggagaatgcttccctcccatttcagcccctaatatctgttccccgtgattatcttgcacgtttgctgttctggtgcatgctgctgggtcactacattcggggtctggagtaccggttagagcttgctcggcttctgcgaatatccagcgtgggttctttctctggtggagatgatcatgttgtttgagggtaccacgtctactgatattcctcaccgggaagaatggaaaggaaagccctggtcaagaaatgggccatatggcagagctgcagaggtgtccgttacactgctgagctatatagttgtagttcctgtatattcagaaaacagtcactcggttgtaaagctagtgttacatatgcacgtgaaccattttctttttcttcctttgatgttgtgccgtataaaaagaatttggtggttcgttggtgtttatctcgtggtagcataataggcatccttgtattctagttgtatgtttctggtggttgtgactgctgtccagtgtccatttagcttttttgtctattcttgattcgagtaaagcttaacttctcattttggaggtcgcaagctcatactttcattgaattatgggtccttttgattgggctttgg

SEQ ID NO: 10587 - DNA, 1183 bp, Zea Mays
ggggcatgtatgacatcggtttttttttctaccgacgtccggagaatttcattagcaatcggtggccacagagagttaactaaaaataattcagcgacagatatcttcgactcctcgttcgtggttccccatcgtcatcgccatggatttctcttaggctcacccgtccgctcggctcgcttccttccccactctctctgatcccgtcgcacttccctcctcgctgcagcccctctactattgcgattaccgtttcctcgctgccctttcctttttcggtcggcagcaatcaccggggcaagcgaaccctcgatttgcgtccccgctctctgctagcgcccctaaaagaggagcgaagcgatgtctatgtcgaagacgggtcaggccgcggagaaggatgagcagcagcagtcccgagggatagcactgatgcagggcatctgcgccgtggtgtaccgcaaggccgataacacgccctgccccatcaagcagggtctctacttgggatctgttggagcagcattcaataaggacgctctcaagagtttgaacatcacccatatcttgatcgttgcaaagtcactggatccagtatttccagctgaatttaattacaagaagatcgaagatgaagctataagctctggaggcaatgttttggtccattgctttgctgggcggtcaaggagcctcacaagcctgcggttaggggggcataaccccaaccggagaggacggccgacggctacgagctacgtagccgtggtccggcaagtcggggattccaggtccttgacaagaagtttcagaaatccttgcaagtggagcaggaatggagaatgcaacctgtgcagcactgataattatactagtgttataataggtgcagaaggcctcatatgtagtgaaggcgtatgcgttgtaagagcgtcttgaccgcgtattatgacatctggataacaagcgaggccttggcaaactttatgatgtaaacagcaagcaacgttgttcatccattgggatgcagtttacatgttgaataatattcactgcaatttctcttcaaatgaaccaaagaggggtaatagttggtgctctctctcctgcatagatgcggcacatcaatcaaccttagaagaagaatactccatcgtgcatagatgcagcacaccgttgacttttc

SEQ ID NO: 10588 - DNA, 1256 bp, Zea Mays
ggggcatgtatgacatcggtttttttttctaccgacgtccggagaatttcattagcaatcggtggccacagagagttaactaaaaataattcagcgacagatatcttcgactcctcgttcgtggttccccatcgtcatcgccatggatttctcttaggctcacccgtccgctcggctcgcttccttccccactctctctgatcccgtcgcacttccctcctcgctgcagcccctctactattgcgattaccgtttcctcgctgccctttcctttttcggtcggcagcaatcaccggggcaagcgaaccctcgatttgcgtccccgctctctgctagcgcccctaaaagaggagcgaagcgatgtctatgtcgaagacgggtcaggccgcggagaaggatgagcagcagcagtcccgagggatagcactgatgcagggcatctgcgccgtggtgtaccgcaaggccgataacacgccctgccccatcaagcagggtctctacttgggatctgttggagcagcattcaataaggacgctctcaagagtttgaacatcacccatatcttgatcgttgcaaagtcactggatccagtatttccagctgaatttaattacaagaagatcgaagtacttgatatcccagacactgatctgttaaagcattctgatgaatgctttggtttcatagatgaagctataagctctggaggcaatgttttggtccattgctttgctgggcggtcaaggagtgtgacaatcgttgttgcatatctcatgaagaagcatcaaatgagcctcgaaagtgccttgtcactagttagaagtaaacgacctcaagtggctcctaatggggggtttatttcccagctggagaagtttcagaaatccttgcaagtggagcaggaatggagaatgcaacctgtgcagcactgataattatactagtgttataataggtgcagaaggcctcatatgtagtgaaggcgtatgcgttgtaagagcgtcttgaccgcgtattatgacatctggataacaagcgaggccttggcaaactttatgatgtaaacagcaagcaacgttgttcatccattgggatgcagtttacatgttgaataatattcactgcaatttctcttcaaatgaaccaaagaggggtaatagttggtgctctctctcctgcatagatgcggcacatcaatcaaccttagaagaagaatactccatcgtgcatagatgcagcacaccgttgacttttc

SEQ ID NO: 10589 - DNA, 989 bp, Zea Mays
ggggcatgtatgacatcggtttttttttctaccgacgtccggagaatttcattagcaatcggtggccacagagagttaactaaaaataattcagcgacagatatcttcgactcctcgttcgtggttccccatcgtcatcgccatggatttctcttaggctcacccgtccgctcggctcgcttccttccccactctctctgatcccgtcgcacttccctcctcgctgcagcccctctactattgcgattaccgtttcctcgctgccctttcctttttcggtcggcagcaatcaccggggcaagcgaaccctcgatttgcgtccccgctctctgctagcgcccctaaaagaggagcgaagcgatgtctatgtcgaagacgggtcaggccgcggagaaggatgagcagcagcagtcccgagggatagcactgatgcagggcatctgcgccgtggtgtaccgcaaggccgataacacgccctgccccatcaagcagggtctctacttgggatctgttggagcagcattcaataaggacgctctcaagagtttgaacatcacccatatcttgatcgttgcaaagtcactggatccagtatttccagctgaatttaattacaagaagatcgaagtggagcaggaatggagaatgcaacctgtgcagcactgataattatactagtgttataataggtgcagaaggcctcatatgtagtgaaggcgtatgcgttgtaagagcgtcttgaccgcgtattatgacatctggataacaagcgaggccttggcaaactttatgatgtaaacagcaagcaacgttgttcatccattgggatgcagtttacatgttgaataatattcactgcaatttctcttcaaatgaaccaaagaggggtaatagttggtgctctctctcctgcatagatgcggcacatcaatcaaccttagaagaagaatactccatcgtgcatagatgcagcacaccgttgacttttc

SEQ ID NO: 10590 - DNA, 1215 bp, Zea Mays
ggggcatgtatgacatcggtttttttttctaccgacgtccggagaatttcattagcaatcggtggccacagagagttaactaaaaataattcagcgacagatatcttcgactcctcgttcgtggttccccatcgtcatcgccatggatttctcttaggctcacccgtccgctcggctcgcttccttccccactctctctgatcccgtcgcacttccctcctcgctgcagcccctctactattgcgattaccgtttcctcgctgccctttcctttttcggtcggcagcaatcaccggggcaagcgaaccctcgatttgcgtccccgctctctgctagcgcccctaaaagaggagcgaagcgatgtctatgtcgaagacgggtcaggccgcggagaaggatgagcagcagcagtcccgagggatagcactgatgcagggcatctgcgccgtggtgtaccgcaaggccgataacacgccctgccccatcaagcagcattcaataaggacgctctcaagagtttgaacatcacccatatcttgatcgttgcaaagtcactggatccagtatttccagctgaatttaattacaagaagatcgaagtacttgatatcccagacactgatctgttaaagcattctgatgaatgctttggtttcatagatgaagctataagctctggaggcaatgttttggtccattgctttgctgggcggtcaaggagcctcacaagcctgcggttaggggggcataaccccaaccggagaggacggccgacggctacgagctacgtagccgtggtccggcaagtcggggattccaggtccttgacaagaagtttcagaaatccttgcaagtggagcaggaatggagaatgcaacctgtgcagcactgataattatactagtgttataataggtgcagaaggcctcatatgtagtgaaggcgtatgcgttgtaagagcgtcttgaccgcgtattatgacatctggataacaagcgaggccttggcaaactttatgatgtaaacagcaagcaacgttgttcatccattgggatgcagtttacatgttgaataatattcactgcaatttctcttcaaatgaaccaaagaggggtaatagttggtgctctctctcctgcatagatgcggcacatcaatcaaccttagaagaagaatactccatcgtgcatagatgcagcacaccgttgacttttc

SEQ ID NO: 10591 - DNA, 1082 bp, Zea Mays
ggggcatgtatgacatcggtttttttttctaccgacgtccggagaatttcattagcaatcggtggccacagagagttaactaaaaataattcagcgacagatatcttcgactcctcgttcgtggttccccatcgtcatcgccatggatttctcttaggctcacccgtccgctcggctcgcttccttccccactctctctgatcccgtcgcacttccctcctcgctgcagcccctctactattgcgattaccgtttcctcgctgccctttcctttttcggtcggcagcaatcaccggggcaagcgaaccctcgatttgcgtccccgctctctgctagcgcccctaaaagaggagcgaagcgatgtctatgtcgaagacgggtcaggccgcggagaaggatgagcagcagcagtcccgagggatagcactgatgcagggcatctgcgccgtggtgtaccgcaaggccgataacacgccctgccccatcaagcagcattcaataaggacgctctcaagagtttgaacatcacccatatcttgatcgttgcaaagtcactggatccagtatttccagctgaatttaattacaagaagatcgaagtacttgatatcccagacactgatctgttaaagcattctgatgaatgctttggtttcatagatgaagctataagctctggaggcaatgttttggtccattgctttgctgggcggtcaaggagtggagcaggaatggagaatgcaacctgtgcagcactgataattatactagtgttataataggtgcagaaggcctcatatgtagtgaaggcgtatgcgttgtaagagcgtcttgaccgcgtattatgacatctggataacaagcgaggccttggcaaactttatgatgtaaacagcaagcaacgttgttcatccattgggatgcagtttacatgttgaataatattcactgcaatttctcttcaaatgaaccaaagaggggtaatagttggtgctctctctcctgcatagatgcggcacatcaatcaaccttagaagaagaatactccatcgtgcatagatgcagcacaccgttgacttttc

SEQ ID NO: 10592 - DNA, 1155 bp, Zea Mays
ggggcatgtatgacatcggtttttttttctaccgacgtccggagaatttcattagcaatcggtggccacagagagttaactaaaaataattcagcgacagatatcttcgactcctcgttcgtggttccccatcgtcatcgccatggatttctcttaggctcacccgtccgctcggctcgcttccttccccactctctctgatcccgtcgcacttccctcctcgctgcagcccctctactattgcgattaccgtttcctcgctgccctttcctttttcggtcggcagcaatcaccggggcaagcgaaccctcgatttgcgtccccgctctctgctagcgcccctaaaagaggagcgaagcgatgtctatgtcgaagacgggtcaggccgcggagaaggatgagcagcagcagtcccgagggatagcactgatgcagggcatctgcgccgtggtgtaccgcaaggccgataacacgccctgccccatcaagcagcattcaataaggacgctctcaagagtttgaacatcacccatatcttgatcgttgcaaagtcactggatccagtatttccagctgaatttaattacaagaagatcgaagatgaagctataagctctggaggcaatgttttggtccattgctttgctgggcggtcaaggagcctcacaagcctgcggttaggggggcataaccccaaccggagaggacggccgacggctacgagctacgtagccgtggtccggcaagtcggggattccaggtccttgacaagaagtttcagaaatccttgcaagtggagcaggaatggagaatgcaacctgtgcagcactgataattatactagtgttataataggtgcagaaggcctcatatgtagtgaaggcgtatgcgttgtaagagcgtcttgaccgcgtattatgacatctggataacaagcgaggccttggcaaactttatgatgtaaacagcaagcaacgttgttcatccattgggatgcagtttacatgttgaataatattcactgcaatttctcttcaaatgaaccaaagaggggtaatagttggtgctctctctcctgcatagatgcggcacatcaatcaaccttagaagaagaatactccatcgtgcatagatgcagcacaccgttgacttttc

SEQ ID NO: 10593 - DNA, 734 bp, Zea Mays
ggggcatgtatgacatcggtttttttttctaccgacgtccggagaatttcattagcaatcggtggccacagagagttaactaaaaataattcagcgacagatatcttcgactcctcgttcgtggttccccatcgtcatcgccatggatttctcttaggctcacccgtccgctcggctcgcttccttccccactctctctgatcccgtcgcacttccctcctcgctgcagcccctctactattgcgattaccgtttcctcgctgccctttcctttttcggtcggcagcaatcaccggggcaagcgaaccctcgatttgcgtccccgctctctgctagcgcccctaaaagaggagcgaagcgatgtctatgtcgaagacgggtcaggccgcggagaaggatgagcagcagcagtcccgagggatagcactgatgcagggcatctgcgccgtggtgtaccgcaaggccgataacacgccctgccccatcaagcagggtctctacttgggatctgttggagcagcattcaataaggacgctctcaagagtttgaacatcacccatatcttgatcgttgcaaagtcactggatccagtatttccagctgaatttaattacaagaagatcgaagatgaagctataagctctggaggcaatgttttggtccattgctttgctgggcggtcaaggagcatggctaattaggtcataactctcaaaagagttaacatcgtaca

SEQ ID NO: 10594 - DNA, 794 bp, Zea Mays
ggggcatgtatgacatcggtttttttttctaccgacgtccggagaatttcattagcaatcggtggccacagagagttaactaaaaataattcagcgacagatatcttcgactcctcgttcgtggttccccatcgtcatcgccatggatttctcttaggctcacccgtccgctcggctcgcttccttccccactctctctgatcccgtcgcacttccctcctcgctgcagcccctctactattgcgattaccgtttcctcgctgccctttcctttttcggtcggcagcaatcaccggggcaagcgaaccctcgatttgcgtccccgctctctgctagcgcccctaaaagaggagcgaagcgatgtctatgtcgaagacgggtcaggccgcggagaaggatgagcagcagcagtcccgagggatagcactgatgcagggcatctgcgccgtggtgtaccgcaaggccgataacacgccctgccccatcaagcagggtctctacttgggatctgttggagcagcattcaataaggacgctctcaagagtttgaacatcacccatatcttgatcgttgcaaagtcactggatccagtatttccagctgaatttaattacaagaagatcgaagtacttgatatcccagacactgatctgttaaagcattctgatgaatgctttggtttcatagatgaagctataagctctggaggcaatgttttggtccattgctttgctgggcggtcaaggagcatggctaattaggtcataactctcaaaagagttaacatcgtaca

SEQ ID NO: 10595 - DNA, 1767 bp, Zea Mays
gtgaggaattgaagatccaaagtggagatctacccactgagaatatatctatctgaagcaatgtatagaatgatgtgggattacttcttccctgaagaagacgattcacaacgaagacaggaagtttggagagtttcaacatcaaccgggcctagaagaacaagaaggctctcttctggtgtcgatgctgttacttctagcagctattctgtcagagatcatgaacttcctgggaaatcaagtacaactgtatctacatcaacaaatgtttcaagttggcaaggtatactcagcgataactcacaggtgtcaaagtttcagagtataaaagcaaatatggtatgtggttcgcatcaagagttgcaccggtcgtcttcatttgaaaggaattgggaagaaagcgctgcagaaagtgttgcaagtaatgatgtggtatcactcctgaattcttcaattgtttcttcaaaagtagatgctagcaattctgtcttagagaaccctgttgtgggaagtgagatgtggagaagtaaaacgaaagattctaagcctgccaagtctggacgtctatctcacgaagaaaagaagcttgggaagtctaatgatgaaaagaagacaaaacctcggaagtcaatggaatttcataacatcaagattggcaaggttgaacttcttgttacatacgagggatcaaggcttgctattaatgacctaaggttgcttatggatactttccacaaggcagaatttactggtacatggaggcgactattctctagagtcaaaaaagggaagaagtttagcaaccatagggaaacacttgagggttctattcctgaaaatgatcttaacttgagtgacagtgatgttggtcaacctggaagacatgatcaattaacagcttcatggttgaagaggccaggcgatggtgcaggtgatggatttgtcacgtcaattagggggcttttcaatacacagcgccgtaaagcgaaggcctttgtgattcggacaatgcgcggtgaagggcataatgacgaatatcaagacgaatggagcgagagcgatggtgaatacccttttgcgaggcagcttacaattacaaaggccaagaagctcatacgaaggaagttccgtccaagggtgcaaaagaacccaggtctgtcgatgcaagattcactcccatctagtccgcgggaaacaactccatatcaaagtgactcctccaggtcatcttacgaggacttccatgagcagtaaaacaatctggtgatgctgctttcagcttctacatttggtcgataagatgcagccatttatattggttatagtagggtgtatgtatatagtaggatgtaccatcaaaatccaatgtatcatgtatagtggttaggcaatactccgtaattatgtgcttgtaagttaataagaggccagctcgtactcctagaaaacaaaacccgtgatctatggcatggggcattctcattcccttgtacttcaggactagtatggattgtaaattcaacggtgaaggtgttgcaacatttattcagtaaagtatccttgttgaagaatttgtaaaaactatggcagaaacaatagggaaggagcaagtgactaggtgcctaggtgtattatgattcttttgctgactagttggaagttagaaatgcattgctccacgtcaaaaagaaatgcgtggcagacaaggttgttgcttaacagatcggtgagctatgaaatgctatctgttcacgtgtctagagtcta

SEQ ID NO: 10596 - DNA, 1810 bp, Zea Mays
agtgaggaattgaagatccaaagtggagatctacccactgagaatatatctatctgaagcaatgtatagaatgatgtgggattacttcttccctgaagaagacgattcacaacgaagacaggaagtttggagagtttcaacatcaaccgggcctagaagaacaagaaggctctcttctggtgtcgatgctgttacttctagcagctattctgtcagagatcatgaacttcctgggaaatcaagtacaactgtatctacatcaacaaatgtttcaagttggcaaggtatactcagcgataactcacaggtgtcaaagtttcagagtataaaagcaaatatggtatgtggttcgcatcaagagttgcaccggtcgtcttcatttgaaaggaattgggaagaaagcgctgcagaaagtgttgcaagtaatgatgtggtatcactcctgaattcttcaattgtttcttcaaaagtagatgctagcaattctgtcttagagaaccctgttgtgggaagtgagatgtggagaagtaaaacgaaagattctaagcctgccaagtctggacgtctatctcacgaagaaaagaagcttgggaagtctaatgatgaaaagaagacaaaacctcggaagtcaatggaatttcataacatcaagattggcaaggttgaacttcttgttacatacgagggatcaaggcttgctattaatgacctaaggttgcttatggatactttccacaaggcagaatttactggtacatggaggcgactattctctagagtcaaaaaacatatcatctggggagttttgaagtcggtaaccggaatgcaggggaagaagtttagcaaccatagggaaacacttgagggttctattcctgaaaatgatcttaacttgagtgacagtgatgttggtcaacctggaagacatgatcaattaacagcttcatggttgaagaggccaggcgatggtgcaggtgatggatttgtcacgtcaattagggggcttttcaatacacagcgccgtaaagcgaaggcctttgtgattcggacaatgcgcggtgaagggcataatgacgaatatcaagacgaatggagcgagagcgatggtgaatacccttttgcgaggcagcttacaattacaaaggccaagaagctcatacgaaggaagttccgtccaagggtgcaaaagaacccaggtctgtcgatgcaagattcactcccatctagtccgcgggaaacaactccatatcaaagtgactcctccaggtcatcttacgaggacttccatgagcagtaaaacaatctggtgatgctgctttcagcttctacatttggtcgataagatgcagccatttatattggttatagtagggtgtatgtatatagtaggatgtaccatcaaaatccaatgtatcatgtatagtggttaggcaatactccgtaattatgtgcttgtaagttaataagaggccagctcgtactcctagaaaacaaaacccgtgatctatggcatggggcattctcattcccttgtacttcaggactagtatggattgtaaattcaacggtgaaggtgttgcaacatttattcagtaaagtatccttgttgaagaatttgtaaaaactatggcagaaacaatagggaaggagcaagtgactaggtgcctaggtgtattatgattcttttgctgactagttggaagttagaaatgcattgctccacgtcaaaaagaaatgcgtggcagacaaggttgttgcttaacagatcggtgagctatgaaatgctatctgttcacgtgtctagagtcta

SEQ ID NO: 10597 - DNA, 7491 bp, Zea Mays
attcagggagaaaggtattaaaatcattaacctggaattgaaatgtgggtatgctattgccaacattgatgaaaggatgtttcacaagaagcgcacgattccagaatataacactgtctctttgaacaccggagattctatcacagatacttcagcgctcaaacaaacatcgaaaagcaaatctattctaccgctgttaaagaaacacatgctcacatttccagataagcttcagtgtgccgaagcttgatgtgaagttcagacacctgcatgaaggacttagtgttgacaacaacattacagggatccagtttacttgtgcaaaatccctaccacaagatgattttgaagaagcgacaccacacttcgatgttcaaattgatcttagcgaaattcatttaattagagaaggttctagttctctgttggaagttctgaaagtttttacaatagcttctttggatgtccctgttgacccatttcttccaatcagagctgagattgatgccaagcttggtggtacccaatgcaatattatgttaagcagactgatgccatggatgcggcttcattctttgagaaccaaaggaatgaaactttctaaaagaaactccaatcaagaaatttctcaaaaaaaggagatgaagccaattttgtggacttgcacggtcgctgccccagaaatgactgtcttgctttacagtctaaatggattggtcttgtaccatgcttgttcccagtcatcacatttgtttgcaaataatattgcaagcaaggggattcagatacacacagaacttggtgaattgctggtgcacatggaggaggaatatagagagttattaaaggaaaacatatttggtgtggatacttactctggttccctaatgcatattgctcggatgagccttgattggggatatagggaaagtgatgtccaagatatggttgaaactagcaggaatgcacttgttttttcgattgatataagtgatatggaagtgaaatttggcttcaagcatttggaatcaattgtgcttaatttgatgtcgtttaggactctatttaagagtctccagctatctggcggaagtgctaaagaaaagaatttggagcgtaaaggggagaagaaaatgaaaggtgtgaagaaactgaaattaagcctacaaaaattctctattacatactgtggtgatgcaaacataataagtatgccaattgctgatccaaagcgtgtgaactacggctctcaaggtggtcaagtaattgttagtgtttctgctgatggcacaccacgtagggcaagtataacatcagttttaccagactgccacttgcggttctccgcatctttggtaatatctcatctctctatgtgtatagacaaggagagaaagacaacagaagcggaattggaacgggtgaaggcaatctatgaggaattacctgaggatcgctctggtgtcagagtaactttactagatatgcagaatgctaaaattgttcgccgatccagtggtcatgcggaagttgctgtttgttccctctttagtgctactgatatttatttgagatgggaacctgatgctcatttagcactatatgagacattcatccgctttaagcatttcctacatcataatgtgtcccaaaattctgaaaagatgattaatactgaagttgcaagtaccaaatcaaatgaacatggcaacataactgccggtttcattaattctcagaaatccaacagaaaagggtcaatttttgccattgatgtggacatgttaagggtatctgctgaacttgctgatggtgttgaagcaaacatgcatgtacagtcaatctttactgaaaatgccaagataggtgtactgtctgaaggtctttctcttacttttaatggcgctagagttctaaagagcacccgtatacaaatatcctgtatacctttcagcactgggagtttacttgatgcaaagattgaaccatcatccaaaagagactgggttgttcaaggtctagatgtccatatttgcatgccttacaggttgccattgcgtgccatagaagatgctgttgaagatatgtttcgtgcccttaagcttgtctcatctgccaaaagaagtataatctgtcctgatgaaaaggaaaaatctagaaaggttaattctgggggatccaaatttggatctgtgaaatttgtattgcgtaaattgacagcagatatagaggaagagcccatccaaggttggctcgatgaacattaccatttgatgaggaacaaaatctgtgagctaggtgttaggttgaattatcttgaggaagctatatcaggaagtgtagatccgagcaatcacagctctgagagaaaagttctctacaatggtgttgaagttgacattcatgacaccacagctcttcaaaagttgcaggaagaaatccataagcaagcatttcgatcatattatgtgtcttgtcagaacatggtacttgcagaagggtcaggagcgtgctcagaaggttttcaagctggattcagacaaagctcgcgaagagcttctcttctttcactttctgcttccgatctggatgttactttgaccaggatagatggtggagagctaagagactatacttctcctctgttctcttcactcagtgggaaatgtcaaggccgtattgtgcttgctcagcaggcaacatgttttcaaccccaaatacaccaagagttgtatattggaagatggcaaaaggtcacgatgctacgttctgccagtggtactacgccagcaatgaaaatgtactctaatttacctatttatttccagaagggagagatatcttttggagttggttatgagccatctttcgctgatataagctatgcatttcaagtagccctgcggaaagttaaccttagcactagagcaagctgttctggtctagcagtccaactgcctaaaaaggagcgcagcttaccatggtgggatgacatgagatactacttgcatggaaagataattttatatttcaatgagaccaaatggaagttcctggcaacaactaatccttatgagcatgtggataaactccaaattgtctctgaatacatggagatccagcaaactgatggtcgtgtggatgtttctgcgaaagaattcaagatatacataagcagcgtagagagtattacaaagaaccgccgcataaaagttccatctcgtgtgcccagaccttttatatatgctcctctattctccctaaatgtggttattgattggcagtgcgaatctaggaatccattgaatcattatttgcatgcactccctgttgagggggaacctcggaagaaagtttatgatccatttcgatctacttatctctctcttaggtggaacttctccctcagaccattgcaatcccagtatggtaatggcccaccacctcccttttatggaaataattcaatgctccgtgggatcatgtctggtagtccttgcaaaatgactgatgatgacttccctaccatgaacctgggagctcatgaccttgcttgggttttcaaatggtggagcttgaattacagcccccctcacaaacttcgttccttctctagatggcgtcgttttggaattcctcgggctactagatctggtaacctctcgctggacaaagttttggttgaattctttttccgtgttgatgctactccctgttgcataaggcatgcacctttaagtgaggatgatgaccctgcttttggtttgacgtttaagatgtcaaatttgaagtacgagttatgttacagtcgaggtaaacaacagtacacatttgattgtaaacgtgaatcactggaccttgtttatcgtggtctggatcttcacaggccggaggtttatttgatgcgagataacaatttgtcttcagttgaaaatgtatccaaagtaaggactatggtccaacagtcacatggaaaatttgttcatgacagatgcaacatgggtaatttccaagaaaagcatgaggatggcttcctcttgtcttcagattatatcacgataagaaggcaaacacgtaaagcagatcctgaaagacttatgggatggcaggatactgggaggagtcatgagataacatatgttaggtctgagtttgaggatgacagtgaaagtgaccacactctatctgagcctagcgacgacgacgatgattttaatgtggtgcttgctgacaattgccaaagagtatttgtttatggccttaggattttatggactattgagaatcgagacgcggtttggtcgtgggttggaggaatttccaaagcatttgagcctccaaaaccctctccttcacgacaatatgcacaaagaaagatgattgaagaaaggaatgctgagggctccaaggtgccgcaagattccagctcttccatacatgtgggttctccatcagtgcaacatctggatgcttcgggttcatcttcctcgttgcatagtaaagccaatcgctcctctgatgtggctgtaaatcatgacatttttgatgattcggataaaggagggacagcccaatatatggttaatgttattacaccccaattcaacctacactctgaagaagcaaatggaaggtttctacttgctgcagccagtggtcgtgtactggctcgttcatttcattcagttgttcatcttgggaaagaaatactagaacaagcacttggaacaagcagtgcacagattcttgagttacaacctgaaatgacctggaacaagtcggaactctcggtgatgcttaaagatgttcaagctcatgtagcccccactgatgtggatcctggtgctggtctacagtggctccctaaggttctgggtagctctgagaaattgaagcgcacaggttaaaccactgaaggagctacgctttaactctccagacattactgcaacgatgacctctcgccagtttcaagttatgtttgacgtgcttagaaatcttctattcgcaagacttcccaagcctaggaaaaacagtcttcagtatccatcagatgatgaagatattgaagaagaggctgacgaggtagtacctgatggagttgaagaagtggagcttgcgaaaattacactcgaacagagggaaagggaaattaagttactgcttgatgatataaggtctctcactggaaatggtgataatgggaccgatcactgtcattctgcagaaaaaggtgattgtttatggatgatcaacagcgggaaagcttcattggtggaaggactgaaaagggatttcgcaaacctacaaaagtctagaatatttgcatcatcagcattgaggaaagcactttcaaatgcttcacaatcacatttggagaaagaaaagaacaaaaccacttcttgtgccatgcggatttctatgaaaattagcaaggttgtatggagcatgctcgcagatggaaacacttttgcagaagctgagatcaatgatatggtgtatgattttgatcgggattacaaagatataggcattgccctgtttacaactaaatactttgttgtgcggaattgcatggttaatgcgaaatgtgacaccttattgtctgcctggaacacacctcctggaaaaattaacatgcttcgtgtggatgccaagcaaggtgctcctaaggatggaagttctccacttgagctcttccaggtggagatctacccactgagaatatatctatctgaagcaatgtatagaatgatgtgggattacttcttccctgaagaagacgattcacaacgaagacaggaagtttggagagtttcaacatcaaccgggcctagaagaacaagaaggctctcttctggtgtcgatgctgttacttctagcagctattctgtcagagatcatgaacttcctgggaaatcaagtacaactgtatctacatcaacaaatgtttcaagttggcaaggtatactcagcgataactcacaggtgtcaaagtttcagagtataaaagcaaatatggtatgtggttcgcatcaagagttgcaccggtcgtcttcatttgaaaggaattgggaagaaagcgctgcagaaagtgttgcaagtaatgatgtggtatcactcctgaattcttcaattgtttcttcaaaagtagatgctagcaattctgtcttagagaaccctgttgtgggaagtgagatgtggagaagtaaaacgaaagattctaagcctgccaagtctggacgtctatctcacgaagaaaagaagcttgggaagtctaatgatgaaaagaagacaaaacctcggaagtcaatggaatttcataacatcaagattggcaaggttgaacttcttgttacatacgagggatcaaggcttgctattaatgacctaaggttgcttatggatactttccacaaggcagaatttactggtacatggaggcgactattctctagagtcaaaaaacatatcatctggggagttttgaagtcggtaaccggaatgcaggggaagaagtttagcaaccatagggaaacacttgagggttctattcctgaaaatgatcttaacttgagtgacagtgatgttggtcaacctggaagacatgatcaattaacagcttcatggttgaagaggccaggcgatggtgcaggtgatggatttgtcacgtcaattagggggcttttcaatacacagcgccgtaaagcgaaggcctttgtgattcggacaatgcgcggtgaagggcataatgacgaatatcaagacgaatggagcgagagcgatggtgaatacccttttgcgaggcagcttacaattacaaaggccaagaagctcatacgaaggaagttccgtccaagggtgcaaaagaacccaggtctgtcgatgcaagattcactcccatctagtccgcgggaaacaactccatatcaaagtgactcctccaggtcatcttacgaggacttccatgagcagtaaaacaatctggtgatgctgctttcagcttctacatttggtcgataagatgcagccatttatattggttatagtagggtgtatgtatatagtaggatgtaccatcaaaatccaatgtatcatgtatagtggttaggcaatactccgtaattatgtgcttgtaagttaataagaggccagctcgtactcctagaaaacaaaacccgtgatctatggcatggggcattctcattcccttgtacttcaggactagtatggattgtaaattcaacggtgaaggtgttgcaacatttattcagtaaagtatccttgttgaagaatttgtaaaaactatggcagaaacaatagggaaggagcaagtgactaggtgcctaggtgtattatgattcttttgctgactagttggaagttagaaatgcattgctccacgtcaaaaagaaatgcgtggcagacaaggttgttgcttaacagatcggtgagctatgaaatgctatctgttcacgtgtctagagtcta

SEQ ID NO: 10598 - DNA, 7670 bp, Zea Mays
ctgctcttggcaactgatatattcagggagaaaggtattaaaatcattaacctggaattgaaatgtgggtatgctattgccaacattgatgaaaggatgtttcacaagaagcgcacgattccagaatataacactgtctctttgaacaccggagattctatcacagatacttcagcgctcaaacaaacatcgaaaagcaaatctattctaccgctgttaaagaaacacatgctcacatttccagataagcttcagtgtgccgaagcttgatgtgaagttcagacacctgcatgaaggacttagtgttgacaacaacattacagggatccagtttacttgtgcaaaatccctaccacaagatgattttgaagaagcgacaccacacttcgatgttcaaattgatcttagcgaaattcatttaattagagaaggttctagttctctgttggaagttctgaaagtttttacaatagcttctttggatgtccctgttgacccatttcttccaatcagagctgagattgatgccaagcttggtggtacccaatgcaatattatgttaagcagactgatgccatggatgcggcttcattctttgagaaccaaaggaatgaaactttctaaaagaaactccaatcaagaaatttctcaaaaaaaggagatgaagccaattttgtggacttgcacggtcgctgccccagaaatgactgtcttgctttacagtctaaatggattggtcttgtaccatgcttgttcccagtcatcacatttgtttgcaaataatattgcaagcaaggggattcagatacacacagaacttggtgaattgctggtgcacatggaggaggaatatagagagttattaaaggaaaacatatttggtgtggatacttactctggttccctaatgcatattgctcggatgagccttgattggggatatagggaaagtgatgtccaagatatggttgaaactagcaggaatgcacttgttttttcgattgatataagtgatatggaagtgaaatttggcttcaagcatttggaatcaattgtgcttaatttgatgtcgtttaggactctatttaagagtctccagctatctggcggaagtgctaaagaaaagaatttggagcgtaaaggggagaagaaaatgaaaggtgtgaagaaactgaaattaagcctacaaaaattctctattacatactgtggtgatgcaaacataataagtatgccaattgctgatccaaagcgtgtgaactacggctctcaaggtggtcaagtaattgttagtgtttctgctgatggcacaccacgtagggcaagtataacatcagttttaccagactgccacttgcggttctccgcatctttggtaatatctcatctctctatgtgtatagacaaggagagaaagacaacagaagcggaattggaacgggtgaaggcaatctatgaggaattacctgaggatcgctctggtgtcagagtaactttactagatatgcagaatgctaaaattgttcgccgatccagtggtcatgcggaagttgctgtttgttccctctttagtgctactgatatttatttgagatgggaacctgatgctcatttagcactatatgagacattcatccgctttaagcatttcctacatcataatgtgtcccaaaattctgaaaagatgattaatactgaagttgcaagtaccaaatcaaatgaacatggcaacataactgccggtttcattaattctcagaaatccaacagaaaagggtcaatttttgccattgatgtggacatgttaagggtatctgctgaacttgctgatggtgttgaagcaaacatgcatgtacagtcaatctttactgaaaatgccaagataggtgtactgtctgaaggtctttctcttacttttaatggcgctagagttctaaagagcacccgtatacaaatatcctgtatacctttcagcactgggagtttacttgatgcaaagattgaaccatcatccaaaagagactgggttgttcaaggtctagatgtccatatttgcatgccttacaggttgccattgcgtgccatagaagatgctgttgaagatatgtttcgtgcccttaagcttgtctcatctgccaaaagaagtataatctgtcctgatgaaaaggaaaaatctagaaaggttaattctgggggatccaaatttggatctgtgaaatttgtattgcgtaaattgacagcagatatagaggaagagcccatccaaggttggctcgatgaacattaccatttgatgaggaacaaaatctgtgagctaggtgttaggttgaattatcttgaggaagctatatcaggaagtgtagatccgagcaatcacagctctgagagaaaagttctctacaatggtgttgaagttgacattcatgacaccacagctcttcaaaagttgcaggaagaaatccataagcaagcatttcgatcatattatgtgtcttgtcagaacatggtacttgcagaagggtcaggagcgtgctcagaaggttttcaagctggattcagacaaagctcgcgaagagcttctcttctttcactttctgcttccgatctggatgttactttgaccaggatagatggtggagagctaagagactatacttctcctctgttctcttcactcagtgggaaatgtcaaggccgtattgtgcttgctcagcaggcaacatgttttcaaccccaaatacaccaagagttgtatattggaagatggcaaaaggtcacgatgctacgttctgccagtggtactacgccagcaatgaaaatgtactctaatttacctatttatttccagaagggagagatatcttttggagttggttatgagccatctttcgctgatataagctatgcatttcaagtagccctgcggaaagttaaccttagcactagagcaagctgttctggtctagcagtccaactgcctaaaaaggagcgcagcttaccatggtgggatgacatgagatactacttgcatggaaagataattttatatttcaatgagaccaaatggaagttcctggcaacaactaatccttatgagcatgtggataaactccaaattgtctctgaatacatggagatccagcaaactgatggtcgtgtggatgtttctgcgaaagaattcaagatatacataagcagcgtagagagtattacaaagaaccgccgcataaaagttccatctcgtgtgcccagaccttttatatatgctcctctattctccctaaatgtggttattgattggcagtgcgaatctaggaatccattgaatcattatttgcatgcactccctgttgagggggaacctcggaagaaagtttatgatccatttcgatctacttatctctctcttaggtggaacttctccctcagaccattgcaatcccagtatggtaatggcccaccacctcccttttatggaaataattcaatgctccgtgggatcatgtctggtagtccttgcaaaatgactgatgatgacttccctaccatgaacctgggagctcatgaccttgcttgggttttcaaatggtggagcttgaattacagcccccctcacaaacttcgttccttctctagatggcgtcgttttggaattcctcgggctactagatctggtaacctctcgctggacaaagttttggttgaattctttttccgtgttgatgctactccctgttgcataaggcatgcacctttaagtgaggatgatgaccctgcttttggtttgacgtttaagatgtcaaatttgaagtacgagttatgttacagtcgaggtaaacaacagtacacatttgattgtaaacgtgaatcactggaccttgtttatcgtggtctggatcttcacaggccggaggtttatttgatgcgagataacaatttgtcttcagttgaaaatgtatccaaagtaaggactatggtccaacagtcacatggaaaatttgttcatgacagatgcaacatgggtaatttccaagaaaagcatgaggatggcttcctcttgtcttcagattatatcacgataagaaggcaaacacgtaaagcagatcctgaaagacttatgggatggcaggatactgggaggagtcatgagataacatatgttaggtctgagtttgaggatgacagtgaaagtgaccacactctatctgagcctagcgacgacgacgatgattttaatgtggtgcttgctgacaattgccaaagagtatttgtttatggccttaggattttatggactattgagaatcgagacgcggtttggtcgtgggttggaggaatttccaaagcatttgagcctccaaaaccctctccttcacgacaatatgcacaaagaaagatgattgaagaaaggaatgctgagggctccaaggtgccgcaagattccagctcttccatacatgtgggttctccatcagtgcaacatctggatgcttcgggttcatcttcctcgttgcatagtaaagccaatcgctcctctgatgtggctgtaaatcatgacatttttgatgattcggataaaggagggacagcccaatatatggttaatgttattacaccccaattcaacctacactctgaagaagcaaatggaaggtttctacttgctgcagccagtggtcgtgtactggctcgttcatttcattcagttgttcatcttgggaaagaaatactagaacaagcacttggaacaagcagtgcacagattcttgagttacaacctgaaatgacctggaacaagtcggaactctcggtgatgcttaaagatgttcaagctcatgtagcccccactgatgtggatcctggtgctggtctacagtggctccctaaggttctgggtagctctgagaaattgaagcgcacaggtgccttgttagagagagtgtttatgccttgtcaaatgtatttccgttacactagacacaagggtggaactgcagacttgagggttaaaccactgaaggagctacgctttaactctccagacattactgcaacgatgacctctcgccagtttcaagttatgtttgacgtgcttagaaatcttctattcgcaagacttcccaagagtagaattagtgatgaactagaaatgtttggttccaaatgagcacaacttaatagtgttagtttcctgtcacaggcctaggaaaaacagtcttcagtatccatcagatgatgaagatattgaagaagaggctgacgaggtagtacctgatggagttgaagaagtggagcttgcgaaaattacactcgaacagagggaaagggaaattaagttactgcttgatgatataaggtctctcactggaaatggtgataatgggaccgatcactgtcattctgcagaaaaaggtgattgtttatggatgatcaacagcgggaaagcttcattggtggaaggactgaaaagggatttcgcaaacctacaaaagtctagaatatttgcatcatcagcattgaggaaagcactttcaaatgcttcacaatcacatttggagaaagaaaagaacaaaaccacttcttgtgccatgcggatttctatgaaaattagcaaggttgtatggagcatgctcgcagatggaaacacttttgcagaagctgagatcaatgatatggtgtatgattttgatcgggattacaaagatataggcattgccctgtttacaactaaatactttgttgtgcggaattgcatggttaatgcgaaatgtgacaccttattgtctgcctggaacacacctcctggaaaaattaacatgcttcgtgtggatgccaagcaaggtgctcctaaggatggaagttctccacttgagctcttccaggtggagatctacccactgagaatatatctatctgaagcaatgtatagaatgatgtgggattacttcttccctgaagaagacgattcacaacgaagacaggaagtttggagagtttcaacatcaaccgggcctagaagaacaagaaggctctcttctggtgtcgatgctgttacttctagcagctattctgtcagagatcatgaacttcctgggaaatcaagtacaactgtatctacatcaacaaatgtttcaagttggcaaggtatactcagcgataactcacaggtgtcaaagtttcagagtataaaagcaaatatggtatgtggttcgcatcaagagttgcaccggtcgtcttcatttgaaaggaattgggaagaaagcgctgcagaaagtgttgcaagtaatgatgtggtatcactcctgaattcttcaattgtttcttcaaaagtagatgctagcaattctgtcttagagaaccctgttgtgggaagtgagatgtggagaagtaaaacgaaagattctaagcctgccaagtctggacgtctatctcacgaagaaaagaagcttgggaagtctaatgatgaaaagaagacaaaacctcggaagtcaatggaatttcataacatcaagattggcaaggttgaacttcttgttacatacgagggatcaaggcttgctattaatgacctaaggttgcttatggatactttccacaaggcagaatttactggtacatggaggcgactattctctagagtcaaaaaacatatcatctggggagttttgaagtcggtaaccggaatgcaggggaagaagtttagcaaccatagggaaacacttgagggttctattcctgaaaatgatcttaacttgagtgacagtgatgttggtcaacctggaagacatgatcaattaacagcttcatggttgaagaggccaggcgatggtgcaggtgatggatttgtcacgtcaattagggggcttttcaatacacagcgccgtaaagcgaaggcctttgtgattcggacaatgcgcggtgaagggcataatgacgaatatcaagacgaatggagcgagagcgatggtgaatacccttttgcgaggcagcttacaattacaaaggccaagaagctcatacgaaggaagttccgtccaagggtgcaaaagaacccaggtctgtcgatgcaagattcactcccatctagtccgcgggaaacaactccatatcaaagtgactcctccaggtcatcttacgaggacttccatgagcagtaaaacaatctggtgatgctgctttcagcttctacatttggtcgataagatgcagccatttatattggttatagtagggtgtatgtatatagtaggatgtaccatcaaaatccaatgtatcatgtatagtggttaggcaatactccgtaattatgtgcttgtaagttaataagaggccagctcgtactcctagaaaacaaaacccgtgatctatggcatggggcattctcattcccttgtacttcaggactagtatggattgtaaattcaacggtgaaggtgttgcaacatttattcagtaaagtatccttgttgaagaatttgtaaaaactatggcagaaacaatagggaaggagcaagtgactaggtgcctaggtgtattatgattcttttgctgactagttggaagttagaaatgcattgctccacgtcaaaaagaaatgcgtggcagacaaggttgttgcttaacagatcggtgagctatgaaatgctatctgttcacgtgtctagagtcta

SEQ ID NO: 10599 - DNA, 7725 bp, Zea Mays
gtttctcttctgctcttggcaactgatatattcagggagaaaggtattaaaatcattaacctggaattgaaatgtgggtatgctattgccaacattgatgaaaggatgtttcacaagaagcgcacgattccagaatataacactgtctctttgaacaccggagattctatcacagatacttcagcgctcaaacaaacatcgaaaagcaaatctattctaccgctgttaaagaaacacatgctcacatttccagataaggttagcttcagtgtgccgaagcttgatgtgaagttcagacacctgcatgaaggacttagtgttgacaacaacattacagggatccagtttacttgtgcaaaatccctaccacaagatgattttgaagaagcgacaccacacttcgatgttcaaattgatcttagcgaaattcatttaattagagaaggttctagttctctgttggaagttctgaaagtttttacaatagcttctttggatgtccctgttgacccatttcttccaatcagagctgagattgatgccaagcttggtggtacccaatgcaatattatgttaagcagactgatgccatggatgcggcttcattctttgagaaccaaaggaatgaaactttctaaaagaaactccaatcaagaaatttctcaaaaaaaggagatgaagccaattttgtggacttgcacggtcgctgccccagaaatgactgtcttgctttacagtctaaatggattggtcttgtaccatgcttgttcccagtcatcacatttgtttgcaaataatattgcaagcaaggggattcagatacacacagaacttggtgaattgctggtgcacatggaggaggaatatagagagttattaaaggaaaacatatttggtgtggatacttactctggttccctaatgcatattgctcggatgagccttgattggggatatagggaaagtgatgtccaagatatggttgaaactagcaggaatgcacttgttttttcgattgatataagtgatatggaagtgaaatttggcttcaagcatttggaatcaattgtgcttaatttgatgtcgtttaggactctatttaagagtctccagctatctggcggaagtgctaaagaaaagaatttggagcgtaaaggggagaagaaaatgaaaggtgtgaagaaactgaaattaagcctacaaaaattctctattacatactgtggtgatgcaaacataataagtatgccaattgctgatccaaagcgtgtgaactacggctctcaaggtggtcaagtaattgttagtgtttctgctgatggcacaccacgtagggcaagtataacatcagttttaccagactgccacttgcggttctccgcatctttggtaatatctcatctctctatgtgtatagacaaggagagaaagacaacagaagcggaattggaacgggtgaaggcaatctatgaggaattacctgaggatcgctctggtgtcagagtaactttactagatatgcagaatgctaaaattgttcgccgatccagtggtcatgcggaagttgctgtttgttccctctttagtgctactgatatttatttgagatgggaacctgatgctcatttagcactatatgagacattcatccgctttaagcatttcctacatcataatgtgtcccaaaattctgaaaagatgattaatactgaagttgcaagtaccaaatcaaatgaacatggcaacataactgccggtttcattaattctcagaaatccaacagaaaagggtcaatttttgccattgatgtggacatgttaagggtatctgctgaacttgctgatggtgttgaagcaaacatgcatgtacagtcaatctttactgaaaatgccaagataggtgtactgtctgaaggtctttctcttacttttaatggcgctagagttctaaagagcacccgtatacaaatatcctgtatacctttcagcactgggagtttacttgatgcaaagattgaaccatcatccaaaagagactgggttgttcaaggtctagatgtccatatttgcatgccttacaggttgccattgcgtgccatagaagatgctgttgaagatatgtttcgtgcccttaagcttgtctcatctgccaaaagaagtataatctgtcctgatgaaaaggaaaaatctagaaaggttaattctgggggatccaaatttggatctgtgaaatttgtattgcgtaaattgacagcagatatagaggaagagcccatccaaggttggctcgatgaacattaccatttgatgaggaacaaaatctgtgagctaggtgttaggttgaattatcttgaggaagctatatcaggaagtgtagatccgagcaatcacagctctgagagaaaagttctctacaatggtgttgaagttgacattcatgacaccacagctcttcaaaagttgcaggaagaaatccataagcaagcatttcgatcatattatgtgtcttgtcagaacatggtacttgcagaagggtcaggagcgtgctcagaaggttttcaagctggattcagacaaagctcgcgaagagcttctcttctttcactttctgcttccgatctggatgttactttgaccaggatagatggtggagagatagaaatggttgaatttataaaggggcttgaccctgtctgtcaggagcaaaacataccattttctcggttgtatggtagtgatgtttctgtcgttgctgggtccttggttgtacagctaagagactatacttctcctctgttctcttcactcagtgggaaatgtcaaggccgtattgtgcttgctcagcaggcaacatgttttcaaccccaaatacaccaagagttgtatattggaagatggcaaaaggtcacgatgctacgttctgccagtggtactacgccagcaatgaaaatgtactctaatttacctatttatttccagaagggagagatatcttttggagttggttatgagccatctttcgctgatataagctatgcatttcaagtagccctgcggaaagttaaccttagcactagagcaagctgttctggtctagcagtccaactgcctaaaaaggagcgcagcttaccatggtgggatgacatgagatactacttgcatggaaagataattttatatttcaatgagaccaaatggaagttcctggcaacaactaatccttatgagcatgtggataaactccaaattgtctctgaatacatggagatccagcaaactgatggtcgtgtggatgtttctgcgaaagaattcaagatatacataagcagcgtagagagtattacaaagaaccgccgcataaaagttccatctcgtgtgcccagaccttttatatatgctcctctattctccctaaatgtggttattgattggcagtgcgaatctaggaatccattgaatcattatttgcatgcactccctgttgagggggaacctcggaagaaagtttatgatccatttcgatctacttatctctctcttaggtggaacttctccctcagaccattgcaatcccagtatggtaatggcccaccacctcccttttatggaaataattcaatgctccgtgggatcatgtctggtagtccttgcaaaatgactgatgatgacttccctaccatgaacctgggagctcatgaccttgcttgggttttcaaatggtggagcttgaattacagcccccctcacaaacttcgttccttctctagatggcgtcgttttggaattcctcgggctactagatctggtaacctctcgctggacaaagttttggttgaattctttttccgtgttgatgctactccctgttgcataaggcatgcacctttaagtgaggatgatgaccctgcttttggtttgacgtttaagatgtcaaatttgaagtacgagttatgttacagtcgaggtaaacaacagtacacatttgattgtaaacgtgaatcactggaccttgtttatcgtggtctggatcttcacaggccggaggtttatttgatgcgagataacaatttgtcttcagttgaaaatgtatccaaagtaaggactatggtccaacagtcacatggaaaatttgttcatgacagatgcaacatgggtaatttccaagaaaagcatgaggatggcttcctcttgtcttcagattatatcacgataagaaggcaaacacgtaaagcagatcctgaaagacttatgggatggcaggatactgggaggagtcatgagataacatatgttaggtctgagtttgaggatgacagtgaaagtgaccacactctatctgagcctagcgacgacgacgatgattttaatgtggtgcttgctgacaattgccaaagagtatttgtttatggccttaggattttatggactattgagaatcgagacgcggtttggtcgtgggttggaggaatttccaaagcatttgagcctccaaaaccctctccttcacgacaatatgcacaaagaaagatgattgaagaaaggaatgctgagggctccaaggtgccgcaagattccagctcttccatacatgtgggttctccatcagtgcaacatctggatgcttcgggttcatcttcctcgttgcatagtaaagccaatcgctcctctgatgtggctgtaaatcatgacatttttgatgattcggataaaggagggacagcccaatatatggttaatgttattacaccccaattcaacctacactctgaagaagcaaatggaaggtttctacttgctgcagccagtggtcgtgtactggctcgttcatttcattcagttgttcatcttgggaaagaaatactagaacaagcacttggaacaagcagtgcacagattcttgagttacaacctgaaatgacctggaacaagtcggaactctcggtgatgcttaaagatgttcaagctcatgtagcccccactgatgtggatcctggtgctggtctacagtggctccctaaggttctgggtagctctgagaaattgaagcgcacaggtgccttgttagagagagtgtttatgccttgtcaaatgtatttccgttacactagacacaagggtggaactgcagacttgagggttaaaccactgaaggagctacgctttaactctccagacattactgcaacgatgacctctcgccagtttcaagttatgtttgacgtgcttagaaatcttctattcgcaagacttcccaagcctaggaaaaacagtcttcagtatccatcagatgatgaagatattgaagaagaggctgacgaggtagtacctgatggagttgaagaagtggagcttgcgaaaattacactcgaacagagggaaagggaaattaagttactgcttgatgatataaggtctctcactggaaatggtgataatgggaccgatcactgtcattctgcagaaaaaggtgattgtttatggatgatcaacagcgggaaagcttcattggtggaaggactgaaaagggatttcgcaaacctacaaaagtctagaatatttgcatcatcagcattgaggaaagcactttcaaatgcttcacaatcacatttggagaaagaaaagaacaaaaccacttcttgtgccatgcggatttctatgaaaattagcaaggttgtatggagcatgctcgcagatggaaacacttttgcagaagctgagatcaatgatatggtgtatgattttgatcgggattacaaagatataggcattgccctgtttacaactaaatactttgttgtgcggaattgcatggttaatgcgaaatgtgacaccttattgtctgcctggaacacacctcctggaaaaattaacatgcttcgtgtggatgccaagcaaggtgctcctaaggatggaagttctccacttgagctcttccaggtggagatctacccactgagaatatatctatctgaagcaatgtatagaatgatgtgggattacttcttccctgaagaagacgattcacaacgaagacaggaagtttggagagtttcaacatcaaccgggcctagaagaacaagaaggctctcttctggtgtcgatgctgttacttctagcagctattctgtcagagatcatgaacttcctgggaaatcaagtacaactgtatctacatcaacaaatgtttcaagttggcaaggtatactcagcgataactcacaggtgtcaaagtttcagagtataaaagcaaatatggtatgtggttcgcatcaagagttgcaccggtcgtcttcatttgaaaggaattgggaagaaagcgctgcagaaagtgttgcaagtaatgatgtggtatcactcctgaattcttcaattgtttcttcaaaagtagatgctagcaattctgtcttagagaaccctgttgtgggaagtgagatgtggagaagtaaaacgaaagattctaagcctgccaagtctggacgtctatctcacgaagaaaagaagcttgggaagtctaatgatgaaaagaagacaaaacctcggaagtcaatggaatttcataacatcaagattggcaaggttgaacttcttgttacatacgagggatcaaggcttgctattaatgacctaaggttgcttatggatactttccacaaggcagaatttactggtacatggaggcgactattctctagagtcaaaaaacatatcatctggggagttttgaagtcggtaaccggaatgcaggggaagaagtttagcaaccatagggaaacacttgagggttctattcctgaaaatgatcttaacttgagtgacagtgatgttggtcaacctggaagacatgatcaattaacagcttcatggttgaagaggccaggcgatggtgcaggtgatggatttgtcacgtcaattagggggcttttcaatacacagcgccgtaaagcgaaggcctttgtgattcggacaatgcgcggtgaagggcataatgacgaatatcaagacgaatggagcgagagcgatggtgaatacccttttgcgaggcagcttacaattacaaaggccaagaagctcatacgaaggaagttccgtccaagggtgcaaaagaacccaggtctgtcgatgcaagattcactcccatctagtccgcgggaaacaactccatatcaaagtgactcctccaggtcatcttacgaggacttccatgagcagtaaaacaatctggtgatgctgctttcagcttctacatttggtcgataagatgcagccatttatattggttatagtagggtgtatgtatatagtaggatgtaccatcaaaatccaatgtatcatgtatagtggttaggcaatactccgtaattatgtgcttgtaagttaataagaggccagctcgtactcctagaaaacaaaacccgtgatctatggcatggggcattctcattcccttgtacttcaggactagtatggattgtaaattcaacggtgaaggtgttgcaacatttattcagtaaagtatccttgttgaagaatttgtaaaaactatggcagaaacaatagggaaggagcaagtgactaggtgcctaggtgtattatgattcttttgctgactagttggaagttagaaatgcattgctccacgtcaaaaagaaatgcgtggcagacaaggttgttgcttaacagatcggtgagctatgaaatgctatctgttcacgtgtctagagtcta

SEQ ID NO: 10600 - DNA, 8237 bp, Zea Mays
atggcgtcctccccagtcaagttcttctcggtgttcctggccgtctccgtcgtcggatggatcgtcttcacgtttgcttcaagattgttagcttggttcttgagccgtgtattctctgcttctgtcggatttcgagttgctggtttcaactgtttgagggatgtaacaataaagttctgtaagggttcagttgaatctgtttcgattggtgaaataaaactaagtttccgcaagtctctagtcaaactaagttttggtgttatctcaaaagacccgaagttgcaattgcttataaatgatctcgaaattgtaactagatcatcttctgaaaataaaaagatacgaaagtcagcaaagcctcgctctacaggaaaagggaaatggctggttacatcaagcatggcaagacttttatcagtttccgtgacagatctgataatcaaggtaccgaaaggcgctcttgacatcaaagaactaacggtggatacatttaaaattgctgggcctaatcatactcttggtgtcaagttgcatcttttacctttgaatatactccttggagatttgggattgactactgatccaatgggcagttgtagtctgtttgatgctttccagtctgatcaagcttctgtatctaactcagagaaaagcttggccccatttgtttgtgaagatttgttggttacttgtaaccttggccatgaaaaggagaaaggtattaaaatcattaacctggaattgaaatgtgggtatgctattgccaacattgatgaaaggatgtttcacaagaagcgcacgattccagaatataacactgtctctttgaacaccggagattctatcacagatacttcagcgctcaaacaaacatcgaaaagcaaatctattctaccgctgttaaagaaacacatgctcacatttccagataaggttagcttcagtgtgccgaagcttgatgtgaagttcagacacctgcatgaaggacttagtgttgacaacaacattacagggatccagtttacttgtgcaaaatccctaccacaagatgattttgaagaagcgacaccacacttcgatgttcaaattgatcttagcgaaattcatttaattagagaaggttctagttctctgttggaagttctgaaagtttttacaatagcttctttggatgtccctgttgacccatttcttccaatcagagctgagattgatgccaagcttggtggtacccaatgcaatattatgttaagcagactgatgccatggatgcggcttcattctttgagaaccaaaggaatgaaactttctaaaagaaactccaatcaagaaatttctcaaaaaaaggagatgaagccaattttgtggacttgcacggtcgctgccccagaaatgactgtcttgctttacagtctaaatggattggtcttgtaccatgcttgttcccagtcatcacatttgtttgcaaataatattgcaagcaaggggattcagatacacacagaacttggtgaattgctggtgcacatggaggaggaatatagagagttattaaaggaaaacatatttggtgtggatacttactctggttccctaatgcatattgctcggatgagccttgattggggatatagggaaagtgatgtccaagatatggttgaaactagcaggaatgcacttgttttttcgattgatataagtgatatggaagtgaaatttggcttcaagcatttggaatcaattgtgcttaatttgatgtcgtttaggactctatttaagagtctccagctatctggcggaagtgctaaagaaaagaatttggagcgtaaaggggagaagaaaatgaaaggtgtgaagaaactgaaattaagcctacaaaaattctctattacatactgtggtgatgcaaacataataagtatgccaattgctgatccaaagcgtgtgaactacggctctcaaggtggtcaagtaattgttagtgtttctgctgatggcacaccacgtagggcaagtataacatcagttttaccagactgccacttgcggttctccgcatctttggtaatatctcatctctctatgtgtatagacaaggagagaaagacaacagaagcggaattggaacgggtgaaggcaatctatgaggaattacctgaggatcgctctggtgtcagagtaactttactagatatgcagaatgctaaaattgttcgccgatccagtggtcatgcggaagttgctgtttgttccctctttagtgctactgatatttatttgagatgggaacctgatgctcatttagcactatatgagacattcatccgctttaagcatttcctacatcataatgtgtcccaaaattctgaaaagatgattaatactgaagttgcaagtaccaaatcaaatgaacatggcaacataactgccggtttcattaattctcagaaatccaacagaaaagggtcaatttttgccattgatgtggacatgttaagggtatctgctgaacttgctgatggtgttgaagcaaacatgcatgtacagtcaatctttactgaaaatgccaagataggtgtactgtctgaaggtctttctcttacttttaatggcgctagagttctaaagagcacccgtatacaaatatcctgtatacctttcagcactgggagtttacttgatgcaaagattgaaccatcatccaaaagagactgggttgttcaaggtctagatgtccatatttgcatgccttacaggttgccattgcgtgccatagaagatgctgttgaagatatgtttcgtgcccttaagcttgtctcatctgccaaaagaagtataatctgtcctgatgaaaaggaaaaatctagaaaggttaattctgggggatccaaatttggatctgtgaaatttgtattgcgtaaattgacagcagatatagaggaagagcccatccaaggttggctcgatgaacattaccatttgatgaggaacaaaatctgtgagctaggtgttaggttgaattatcttgaggaagctatatcaggaagtgtagatccgagcaatcacagctctgagagaaaagttctctacaatggtgttgaagttgacattcatgacaccacagctcttcaaaagttgcaggaagaaatccataagcaagcatttcgatcatattatgtgtcttgtcagaacatggtacttgcagaagggtcaggagcgtgctcagaaggttttcaagctggattcagacaaagctcgcgaagagcttctcttctttcactttctgcttccgatctggatgttactttgaccaggatagatggtggagagctaagagactatacttctcctctgttctcttcactcagtgggaaatgtcaaggccgtattgtgcttgctcagcaggcaacatgttttcaaccccaaatacaccaagagttgtatattggaagatggcaaaaggtcacgatgctacgttctgccagtggtactacgccagcaatgaaaatgtactctaatttacctatttatttccagaagggagagatatcttttggagttggttatgagccatctttcgctgatataagctatgcatttcaagtagccctgcggaaagttaaccttagcactagagcaagctgttctggtctagcagtccaactgcctaaaaaggagcgcagcttaccatggtgggatgacatgagatactacttgcatggaaagataattttatatttcaatgagaccaaatggaagttcctggcaacaactaatccttatgagcatgtggataaactccaaattgtctctgaatacatggagatccagcaaactgatggtcgtgtggatgtttctgcgaaagaattcaagatatacataagcagcgtagagagtattacaaagaaccgccgcataaaagttccatctcgtgtgcccagaccttttatatatgctcctctattctccctaaatgtggttattgattggcagtgcgaatctaggaatccattgaatcattatttgcatgcactccctgttgagggggaacctcggaagaaagtttatgatccatttcgatctacttatctctctcttaggtggaacttctccctcagaccattgcaatcccagtatggtaatggcccaccacctcccttttatggaaataattcaatgctccgtgggatcatgtctggtagtccttgcaaaatgactgatgatgacttccctaccatgaacctgggagctcatgaccttgcttgggttttcaaatggtggagcttgaattacagcccccctcacaaacttcgttccttctctagatggcgtcgttttggaattcctcgggctactagatctggtaacctctcgctggacaaagttttggttgaattctttttccgtgttgatgctactccctgttgcataaggcatgcacctttaagtgaggatgatgaccctgcttttggtttgacgtttaagatgtcaaatttgaagtacgagttatgttacagtcgaggtaaacaacagtacacatttgattgtaaacgtgaatcactggaccttgtttatcgtggtctggatcttcacaggccggaggtttatttgatgcgagataacaatttgtcttcagttgaaaatgtatccaaagtaaggactatggtccaacagtcacatggaaaatttgttcatgacagatgcaacatgggtaatttccaagaaaagcatgaggatggcttcctcttgtcttcagattatatcacgataagaaggcaaacacgtaaagcagatcctgaaagacttatgggatggcaggatactgggaggagtcatgagataacatatgttaggtctgagtttgaggatgacagtgaaagtgaccacactctatctgagcctagcgacgacgacgatgattttaatgtggtgcttgctgacaattgccaaagagtatttgtttatggccttaggattttatggactattgagaatcgagacgcggtttggtcgtgggttggaggaatttccaaagcatttgagcctccaaaaccctctccttcacgacaatatgcacaaagaaagatgattgaagaaaggaatgctgagggctccaaggtgccgcaagattccagctcttccatacatgtgggttctccatcagtgcaacatctggatgcttcgggttcatcttcctcgttgcatagtaaagccaatcgctcctctgatgtggctgtaaatcatgacatttttgatgattcggataaaggagggacagcccaatatatggttaatgttattacaccccaattcaacctacactctgaagaagcaaatggaaggtttctacttgctgcagccagtggtcgtgtactggctcgttcatttcattcagttgttcatcttgggaaagaaatactagaacaagcacttggaacaagcagtgcacagattcttgagttacaacctgaaatgacctggaacaagtcggaactctcggtgatgcttaaagatgttcaagctcatgtagcccccactgatgtggatcctggtgctggtctacagtggctccctaaggttctgggtagctctgagaaattgaagcgcacaggtgccttgttagagagagtgtttatgccttgtcaaatgtatttccgttacactagacacaagggtggaactgcagacttgagggttaaaccactgaaggagctacgctttaactctccagacattactgcaacgatgacctctcgccagtttcaagttatgtttgacgtgcttagaaatcttctattcgcaagacttcccaagcctaggaaaaacagtcttcagtatccatcagatgatgaagatattgaagaagaggctgacgaggtagtacctgatggagttgaagaagtggagcttgcgaaaattacactcgaacagagggaaagggaaattaagttactgcttgatgatataaggtctctcactggaaatggtgataatgggaccgatcactgtcattctgcagaaaaaggtgattgtttatggatgatcaacagcgggaaagcttcattggtggaaggactgaaaagggatttcgcaaacctacaaaagtctagaatatttgcatcatcagcattgaggaaagcactttcaaatgcttcacaatcacatttggagaaagaaaagaacaaaaccacttcttgtgccatgcggatttctatgaaaattagcaaggttgtatggagcatgctcgcagatggaaacacttttgcagaagctgagatcaatgatatggtgtatgattttgatcgggattacaaagatataggcattgccctgtttacaactaaatactttgttgtgcggaattgcatggttaatgcgaaatgtgacaccttattgtctgcctggaacacacctcctggaaaaattaacatgcttcgtgtggatgccaagcaaggtgctcctaaggatggaagttctccacttgagctcttccaggtggagatctacccactgagaatatatctatctgaagcaatgtatagaatgatgtgggattacttcttccctgaagaagacgattcacaacgaagacagtttggagagtttcaacatcaaccgggcctagaagaacaagaaggctctcttctggtgtcgatgctgttacttctagcagctattctgtcagagatcatgaacttcctgggaaatcaagtacaactgtatctacatcaacaaatgtttcaagttggcaaggtatactcagcgataactcacaggtgtcaaagtttcagagtataaaagcaaatatggtatgtggttcgcatcaagagttgcaccggtcgtcttcatttgaaaggaattgggaagaaagcgctgcagaaagtgttgcaagtaatgatgtggtatcactcctgaattcttcaattgtttcttcaaaagtagatgctagcaattctgtcttagagaaccctgttgtgggaagtgagatgtggagaagtaaaacgaaagattctaagcctgccaagtctggacgtctatctcacgaagaaaagaagcttgggaagtctaatgatgaaaagaagacaaaacctcggaagtcaatggaatttcataacatcaagattggcaaggttgaacttcttgttacatacgagggatcaaggcttgctattaatgacctaaggttgcttatggatactttccacaaggcagaatttactggtacatggaggcgactattctctagagtcaaaaaagggaagaagtttagcaaccatagggaaacacttgagggttctattcctgaaaatgatcttaacttgagtgacagtgatgttggtcaacctggaagacatgatcaattaacagcttcatggttgaagaggccaggcgatggtgcaggtgatggatttgtcacgtcaattagggggcttttcaatacacagcgccgtaaagcgaaggcctttgtgattcggacaatgcgcggtgaagggcataatgacgaatatcaagacgaatggagcgagagcgatggtgaatacccttttgcgaggcagcttacaattacaaaggccaagaagctcatacgaaggaagttccgtccaagggtgcaaaagaacccaggtctgtcgatgcaagattcactcccatctagtccgcgggaaacaactccatatcaaagtgactcctccaggtcatcttacgaggacttccatgagcagtaaaacaatctggtgatgctgctttcagcttctacatttggtcgataagatgcagccatttatattggttatagtagggtgtatgtatatagtaggatgtaccatcaaaatccaatgtatcatgtatagtggttaggcaatactccgtaattatgtgcttgtaagttaataagaggccagctcgtactcctagaaaacaaaacccgtgatctatggcatggggcattctcattcccttgtacttcaggactagtatggattgtaaattcaacggtgaaggtgttgcaacatttattcagtaaagtatccttgttgaagaatttgtaaaaactatggcagaaacaatagggaaggagcaagtgactaggtgcctaggtgtattatgattcttttgctgactagttggaagttagaaatgcattgctccacgtcaaaaagaaatgcgtggcagacaaggttgttgcttaacagatcggtgagctatgaaatgctatctgttcacgtgtctagagtcta

SEQ ID NO: 10601 - DNA, 8322 bp, Zea Mays
atggcgtcctccccagtcaagttcttctcggtgttcctggccgtctccgtcgtcggatggatcgtcttcacgtttgcttcaagattgttagcttggttcttgagccgtgtattctctgcttctgtcggatttcgagttgctggtttcaactgtttgagggatgtaacaataaagttctgtaagggttcagttgaatctgtttcgattggtgaaataaaactaagtttccgcaagtctctagtcaaactaagttttggtgttatctcaaaagacccgaagttgcaattgcttataaatgatctcgaaattgtaactagatcatcttctgaaaataaaaagatacgaaagtcagcaaagcctcgctctacaggaaaagggaaatggctggttacatcaagcatggcaagacttttatcagtttccgtgacagatctgataatcaaggtaccgaaaggcgctcttgacatcaaagaactaacggtggatacatttaaaattgctgggcctaatcatactcttggtgtcaagttgcatcttttacctttgaatatactccttggagatttgggattgactactgatccaatgggcagttgtagtctgtttgatgctttccagtctgatcaagcttctgtatctaactcagagaaaagcttggccccatttgtttgtgaagatttgttggttacttgtaaccttggccatgaaaaggagaaaggtattaaaatcattaacctggaattgaaatgtgggtatgctattgccaacattgatgaaaggatgtttcacaagaagcgcacgattccagaatataacactgtctctttgaacaccggagattctatcacagatacttcagcgctcaaacaaacatcgaaaagcaaatctattctaccgctgttaaagaaacacatgctcacatttccagataaggttagcttcagtgtgccgaagcttgatgtgaagttcagacacctgcatgaaggacttagtgttgacaacaacattacagggatccagtttacttgtgcaaaatccctaccacaagatgattttgaagaagcgacaccacacttcgatgttcaaattgatcttagcgaaattcatttaattagagaaggttctagttctctgttggaagttctgaaagtttttacaatagcttctttggatgtccctgttgacccatttcttccaatcagagctgagattgatgccaagcttggtggtacccaatgcaatattatgttaagcagactgatgccatggatgcggcttcattctttgagaaccaaaggaatgaaactttctaaaagaaactccaatcaagaaatttctcaaaaaaaggagatgaagccaattttgtggacttgcacggtcgctgccccagaaatgactgtcttgctttacagtctaaatggattggtcttgtaccatgcttgttcccagtcatcacatttgtttgcaaataatattgcaagcaaggggattcagatacacacagaacttggtgaattgctggtgcacatggaggaggaatatagagagttattaaaggaaaacatatttggtgtggatacttactctggttccctaatgcatattgctcggatgagccttgattggggatatagggaaagtgatgtccaagatatggttgaaactagcaggaatgcacttgttttttcgattgatataagtgatatggaagtgaaatttggcttcaagcatttggaatcaattgtgcttaatttgatgtcgtttaggactctatttaagagtctccagctatctggcggaagtgctaaagaaaagaatttggagcgtaaaggggagaagaaaatgaaaggtgtgaagaaactgaaattaagcctacaaaaattctctattacatactgtggtgatgcaaacataataagtatgccaattgctgatccaaagcgtgtgaactacggctctcaaggtggtcaagtaattgttagtgtttctgctgatggcacaccacgtagggcaagtataacatcagttttaccagactgccacttgcggttctccgcatctttggtaatatctcatctctctatgtgtatagacaaggagagaaagacaacagaagcggaattggaacgggtgaaggcaatctatgaggaattacctgaggatcgctctggtgtcagagtaactttactagatatgcagaatgctaaaattgttcgccgatccagtggtcatgcggaagttgctgtttgttccctctttagtgctactgatatttatttgagatgggaacctgatgctcatttagcactatatgagacattcatccgctttaagcatttcctacatcataatgtgtcccaaaattctgaaaagatgattaatactgaagttgcaagtaccaaatcaaatgaacatggcaacataactgccggtttcattaattctcagaaatccaacagaaaagggtcaatttttgccattgatgtggacatgttaagggtatctgctgaacttgctgatggtgttgaagcaaacatgcatgtacagtcaatctttactgaaaatgccaagataggtgtactgtctgaaggtctttctcttacttttaatggcgctagagttctaaagagcacccgtatacaaatatcctgtatacctttcagcactgggagtttacttgatgcaaagattgaaccatcatccaaaagagactgggttgttcaaggtctagatgtccatatttgcatgccttacaggttgccattgcgtgccatagaagatgctgttgaagatatgtttcgtgcccttaagcttgtctcatctgccaaaagaagtataatctgtcctgatgaaaaggaaaaatctagaaaggttaattctgggggatccaaatttggatctgtgaaatttgtattgcgtaaattgacagcagatatagaggaagagcccatccaaggttggctcgatgaacattaccatttgatgaggaacaaaatctgtgagctaggtgttaggttgaattatcttgaggaagctatatcaggaagtgtagatccgagcaatcacagctctgagagaaaagttctctacaatggtgttgaagttgacattcatgacaccacagctcttcaaaagttgcaggaagaaatccataagcaagcatttcgatcatattatgtgtcttgtcagaacatggtacttgcagaagggtcaggagcgtgctcagaaggttttcaagctggattcagacaaagctcgcgaagagcttctcttctttcactttctgcttccgatctggatgttactttgaccaggatagatggtggagagatagaaatggttgaatttataaaggggcttgaccctgtctgtcaggagcaaaacataccattttctcggttgtatggtagtgatgtttctgtcgttgctgggtccttggttgtacagctaagagactatacttctcctctgttctcttcactcagtgggaaatgtcaaggccgtattgtgcttgctcagcaggcaacatgttttcaaccccaaatacaccaagagttgtatattggaagatggcaaaaggtcacgatgctacgttctgccagtggtactacgccagcaatgaaaatgtactctaatttacctatttatttccagaagggagagatatcttttggagttggttatgagccatctttcgctgatataagctatgcatttcaagtagccctgcggaaagttaaccttagcactagagcaagctgttctggtctagcagtccaactgcctaaaaaggagcgcagcttaccatggtgggatgacatgagatactacttgcatggaaagataattttatatttcaatgagaccaaatggaagttcctggcaacaactaatccttatgagcatgtggataaactccaaattgtctctgaatacatggagatccagcaaactgatggtcgtgtggatgtttctgcgaaagaattcaagatatacataagcagcgtagagagtattacaaagaaccgccgcataaaagttccatctcgtgtgcccagaccttttatatatgctcctctattctccctaaatgtggttattgattggcagtgcgaatctaggaatccattgaatcattatttgcatgcactccctgttgagggggaacctcggaagaaagtttatgatccatttcgatctacttatctctctcttaggtggaacttctccctcagaccattgcaatcccagtatggtaatggcccaccacctcccttttatggaaataattcaatgctccgtgggatcatgtctggtagtccttgcaaaatgactgatgatgacttccctaccatgaacctgggagctcatgaccttgcttgggttttcaaatggtggagcttgaattacagcccccctcacaaacttcgttccttctctagatggcgtcgttttggaattcctcgggctactagatctggtaacctctcgctggacaaagttttggttgaattctttttccgtgttgatgctactccctgttgcataaggcatgcacctttaagtgaggatgatgaccctgcttttggtttgacgtttaagatgtcaaatttgaagtacgagttatgttacagtcgaggtaaacaacagtacacatttgattgtaaacgtgaatcactggaccttgtttatcgtggtctggatcttcacaggccggaggtttatttgatgcgagataacaatttgtcttcagttgaaaatgtatccaaagtaaggactatggtccaacagtcacatggaaaatttgttcatgacagatgcaacatgggtaatttccaagaaaagcatgaggatggcttcctcttgtcttcagattatatcacgataagaaggcaaacacgtaaagcagatcctgaaagacttatgggatggcaggatactgggaggagtcatgagataacatatgttaggtctgagtttgaggatgacagtgaaagtgaccacactctatctgagcctagcgacgacgacgatgattttaatgtggtgcttgctgacaattgccaaagagtatttgtttatggccttaggattttatggactattgagaatcgagacgcggtttggtcgtgggttggaggaatttccaaagcatttgagcctccaaaaccctctccttcacgacaatatgcacaaagaaagatgattgaagaaaggaatgctgagggctccaaggtgccgcaagattccagctcttccatacatgtgggttctccatcagtgcaacatctggatgcttcgggttcatcttcctcgttgcatagtaaagccaatcgctcctctgatgtggctgtaaatcatgacatttttgatgattcggataaaggagggacagcccaatatatggttaatgttattacaccccaattcaacctacactctgaagaagcaaatggaaggtttctacttgctgcagccagtggtcgtgtactggctcgttcatttcattcagttgttcatcttgggaaagaaatactagaacaagcacttggaacaagcagtgcacagattcttgagttacaacctgaaatgacctggaacaagtcggaactctcggtgatgcttaaagatgttcaagctcatgtagcccccactgatgtggatcctggtgctggtctacagtggctccctaaggttctgggtagctctgagaaattgaagcgcacaggtgccttgttagagagagtgtttatgccttgtcaaatgtatttccgttacactagacacaagggtggaactgcagacttgagggttaaaccactgaaggagctacgctttaactctccagacattactgcaacgatgacctctcgccagtttcaagttatgtttgacgtgcttagaaatcttctattcgcaagacttcccaagcctaggaaaaacagtcttcagtatccatcagatgatgaagatattgaagaagaggctgacgaggtagtacctgatggagttgaagaagtggagcttgcgaaaattacactcgaacagagggaaagggaaattaagttactgcttgatgatataaggtctctcactggaaatggtgataatgggaccgatcactgtcattctgcagaaaaaggtgattgtttatggatgatcaacagcgggaaagcttcattggtggaaggactgaaaagggatttcgcaaacctacaaaagtctagaatatttgcatcatcagcattgaggaaagcactttcaaatgcttcacaatcacatttggagaaagaaaagaacaaaaccacttcttgtgccatgcggatttctatgaaaattagcaaggttgtatggagcatgctcgcagatggaaacacttttgcagaagctgagatcaatgatatggtgtatgattttgatcgggattacaaagatataggcattgccctgtttacaactaaatactttgttgtgcggaattgcatggttaatgcgaaatgtgacaccttattgtctgcctggaacacacctcctggaaaaattaacatgcttcgtgtggatgccaagcaaggtgctcctaaggatggaagttctccacttgagctcttccaggtggagatctacccactgagaatatatctatctgaagcaatgtatagaatgatgtgggattacttcttccctgaagaagacgattcacaacgaagacagtttggagagtttcaacatcaaccgggcctagaagaacaagaaggctctcttctggtgtcgatgctgttacttctagcagctattctgtcagagatcatgaacttcctgggaaatcaagtacaactgtatctacatcaacaaatgtttcaagttggcaaggtatactcagcgataactcacaggtgtcaaagtttcagagtataaaagcaaatatggtatgtggttcgcatcaagagttgcaccggtcgtcttcatttgaaaggaattgggaagaaagcgctgcagaaagtgttgcaagtaatgatgtggtatcactcctgaattcttcaattgtttcttcaaaagtagatgctagcaattctgtcttagagaaccctgttgtgggaagtgagatgtggagaagtaaaacgaaagattctaagcctgccaagtctggacgtctatctcacgaagaaaagaagcttgggaagtctaatgatgaaaagaagacaaaacctcggaagtcaatggaatttcataacatcaagattggcaaggttgaacttcttgttacatacgagggatcaaggcttgctattaatgacctaaggttgcttatggatactttccacaaggcagaatttactggtacatggaggcgactattctctagagtcaaaaaacatatcatctggggagttttgaagtcggtaaccggaatgcagtgatgttggtcaacctggaagacatgatcaattaacagcttcatggttgaagaggccaggcgatggtgcaggtgatggatttgtcacgtcaattagggggcttttcaatacacagcgccgtaaagcgaaggcctttgtgattcggacaatgcgcggtgaagggcataatgacgaatatcaagacgaatggagcgagagcgatggtgaatacccttttgcgaggcagcttacaattacaaaggccaagaagctcatacgaaggaagttccgtccaagggtgcaaaagaacccaggtctgtcgatgcaagattcactcccatctagtccgcgggaaacaactccatatcaaagtgactcctccaggtcatcttacgaggacttccatgagcagtaaaacaatctggtgatgctgctttcagcttctacatttggtcgataagatgcagccatttatattggttatagtagggtgtatgtatatagtaggatgtaccatcaaaatccaatgtatcatgtatagtggttaggcaatactccgtaattatgtgcttgtaagttaataagaggccagctcgtactcctagaaaacaaaacccgtgatctatggcatggggcattctcattcccttgtacttcaggactagtatggattgtaaattcaacggtgaaggtgttgcaacatttattcagtaaagtatccttgttgaagaatttgtaaaaactatggcagaaacaatagggaaggagcaagtgactaggtgcctaggtgtattatgattcttttgctgactagttggaagttagaaatgcattgctccacgtcaaaaagaaatgcgtggcagacaaggttgttgcttaacagatcggtgagctatgaaatgctatctgttcacgtgtctagagtcta

SEQ ID NO: 10602 - DNA, 8481 bp, Zea Mays
cacggatccgggcggcgtgacgcggatccgccggacgctggcagggtcggccatggcgtcctccccagtcaagttcttctcggtgttcctggccgtctccgtcgtcggatggatcgtcttcacgtttgcttcaagattgttagcttggttcttgagccgtgtattctctgcttctgtcggatttcgagttgctggtttcaactgtttgagggatgtaacaataaagttctgtaagggttcagttgaatctgtttcgattggtgaaataaaactaagtttccgcaagtctctagtcaaactaagttttggtgttatctcaaaagacccgaagttgcaattgcttataaatgatctcgaaattgtaactagatcatcttctgaaaataaaaagatacgaaagtcagcaaagcctcgctctacaggaaaagggaaatggctggttacatcaagcatggcaagacttttatcagtttccgtgacagatctgataatcaaggtaccgaaaggcgctcttgacatcaaagaactaacggtggatacatttaaaattgctgggcctaatcatactcttggtgtcaagttgcatcttttacctttgaatatactccttggagatttgggattgactactgatccaatgggcagttgtagtctgtttgatgctttccagtctgatcaagcttctgtatctaactcagagaaaagcttggccccatttgtttgtgaagatttgttggttacttgtaaccttggccatgaaaaggagaaaggtattaaaatcattaacctggaattgaaatgtgggtatgctattgccaacattgatgaaaggatgtttcacaagaagcgcacgattccagaatataacactgtctctttgaacaccggagattctatcacagatacttcagcgctcaaacaaacatcgaaaagcaaatctattctaccgctgttaaagaaacacatgctcacatttccagataaggttagcttcagtgtgccgaagcttgatgtgaagttcagacacctgcatgaaggacttagtgttgacaacaacattacagggatccagtttacttgtgcaaaatccctaccacaagatgattttgaagaagcgacaccacacttcgatgttcaaattgatcttagcgaaattcatttaattagagaaggttctagttctctgttggaagttctgaaagtttttacaatagcttctttggatgtccctgttgacccatttcttccaatcagagctgagattgatgccaagcttggtggtacccaatgcaatattatgttaagcagactgatgccatggatgcggcttcattctttgagaaccaaaggaatgaaactttctaaaagaaactccaatcaagaaatttctcaaaaaaaggagatgaagccaattttgtggacttgcacggtcgctgccccagaaatgactgtcttgctttacagtctaaatggattggtcttgtaccatgcttgttcccagtcatcacatttgtttgcaaataatattgcaagcaaggggattcagatacacacagaacttggtgaattgctggtgcacatggaggaggaatatagagagttattaaaggaaaacatatttggtgtggatacttactctggttccctaatgcatattgctcggatgagccttgattggggatatagggaaagtgatgtccaagatatggttgaaactagcaggaatgcacttgttttttcgattgatataagtgatatggaagtgaaatttggcttcaagcatttggaatcaattgtgcttaatttgatgtcgtttaggactctatttaagagtctccagctatctggcggaagtgctaaagaaaagaatttggagcgtaaaggggagaagaaaatgaaaggtgtgaagaaactgaaattaagcctacaaaaattctctattacatactgtggtgatgcaaacataataagtatgccaattgctgatccaaagcgtgtgaactacggctctcaaggtggtcaagtaattgttagtgtttctgctgatggcacaccacgtagggcaagtataacatcagttttaccagactgccacttgcggttctccgcatctttggtaatatctcatctctctatgtgtatagacaaggagagaaagacaacagaagcggaattggaacgggtgaaggcaatctatgaggaattacctgaggatcgctctggtgtcagagtaactttactagatatgcagaatgctaaaattgttcgccgatccagtggtcatgcggaagttgctgtttgttccctctttagtgctactgatatttatttgagatgggaacctgatgctcatttagcactatatgagacattcatccgctttaagcatttcctacatcataatgtgtcccaaaattctgaaaagatgattaatactgaagttgcaagtaccaaatcaaatgaacatggcaacataactgccggtttcattaattctcagaaatccaacagaaaagggtcaatttttgccattgatgtggacatgttaagggtatctgctgaacttgctgatggtgttgaagcaaacatgcatgtacagtcaatctttactgaaaatgccaagataggtgtactgtctgaaggtctttctcttacttttaatggcgctagagttctaaagagcacccgtatacaaatatcctgtatacctttcagcactgggagtttacttgatgcaaagattgaaccatcatccaaaagagactgggttgttcaaggtctagatgtccatatttgcatgccttacaggttgccattgcgtgccatagaagatgctgttgaagatatgtttcgtgcccttaagcttgtctcatctgccaaaagaagtataatctgtcctgatgaaaaggaaaaatctagaaaggttaattctgggggatccaaatttggatctgtgaaatttgtattgcgtaaattgacagcagatatagaggaagagcccatccaaggttggctcgatgaacattaccatttgatgaggaacaaaatctgtgagctaggtgttaggttgaattatcttgaggaagctatatcaggaagtgtagatccgagcaatcacagctctgagagaaaagttctctacaatggtgttgaagttgacattcatgacaccacagctcttcaaaagttgcaggaagaaatccataagcaagcatttcgatcatattatgtgtcttgtcagaacatggtacttgcagaagggtcaggagcgtgctcagaaggttttcaagctggattcagacaaagctcgcgaagagcttctcttctttcactttctgcttccgatctggatgttactttgaccaggatagatggtggagagatagaaatggttgaatttataaaggggcttgaccctgtctgtcaggagcaaaacataccattttctcggttgtatggtagtgatgtttctgtcgttgctgggtccttggttgtacagctaagagactatacttctcctctgttctcttcactcagtgggaaatgtcaaggccgtattgtgcttgctcagcaggcaacatgttttcaaccccaaatacaccaagagttgtatattggaagatggcaaaaggtcacgatgctacgttctgccagtggtactacgccagcaatgaaaatgtactctaatttacctatttatttccagaagggagagatatcttttggagttggttatgagccatctttcgctgatataagctatgcatttcaagtagccctgcggaaagttaaccttagcactagagcaagctgttctggtctagcagtccaactgcctaaaaaggagcgcagcttaccatggtgggatgacatgagatactacttgcatggaaagataattttatatttcaatgagaccaaatggaagttcctggcaacaactaatccttatgagcatgtggataaactccaaattgtctctgaatacatggagatccagcaaactgatggtcgtgtggatgtttctgcgaaagaattcaagatatacataagcagcgtagagagtattacaaagaaccgccgcataaaagttccatctcgtgtgcccagaccttttatatatgctcctctattctccctaaatgtggttattgattggcagtgcgaatctaggaatccattgaatcattatttgcatgcactccctgttgagggggaacctcggaagaaagtttatgatccatttcgatctacttatctctctcttaggtggaacttctccctcagaccattgcaatcccagtatggtaatggcccaccacctcccttttatggaaataattcaatgctccgtgggatcatgtctggtagtccttgcaaaatgactgatgatgacttccctaccatgaacctgggagctcatgaccttgcttgggttttcaaatggtggagcttgaattacagcccccctcacaaacttcgttccttctctagatggcgtcgttttggaattcctcgggctactagatctggtaacctctcgctggacaaagttttggttgaattctttttccgtgttgatgctactccctgttgcataaggcatgcacctttaagtgaggatgatgaccctgcttttggtttgacgtttaagatgtcaaatttgaagtacgagttatgttacagtcgaggtaaacaacagtacacatttgattgtaaacgtgaatcactggaccttgtttatcgtggtctggatcttcacaggccggaggtttatttgatgcgagataacaatttgtcttcagttgaaaatgtatccaaagtaaggactatggtccaacagtcacatggaaaatttgttcatgacagatgcaacatgggtaatttccaagaaaagcatgaggatggcttcctcttgtcttcagattatatcacgataagaaggcaaacacgtaaagcagatcctgaaagacttatgggatggcaggatactgggaggagtcatgagataacatatgttaggtctgagtttgaggatgacagtgaaagtgaccacactctatctgagcctagcgacgacgacgatgattttaatgtggtgcttgctgacaattgccaaagagtatttgtttatggccttaggattttatggactattgagaatcgagacgcggtttggtcgtgggttggaggaatttccaaagcatttgagcctccaaaaccctctccttcacgacaatatgcacaaagaaagatgattgaagaaaggaatgctgagggctccaaggtgccgcaagattccagctcttccatacatgtgggttctccatcagtgcaacatctggatgcttcgggttcatcttcctcgttgcatagtaaagccaatcgctcctctgatgtggctgtaaatcatgacatttttgatgattcggataaaggagggacagcccaatatatggttaatgttattacaccccaattcaacctacactctgaagaagcaaatgtttctacttgctgcagccagtggtcgtgtactggctcgttcatttcattcagttgttcatcttgggaaagaaatactagaacaagcacttggaacaagcagtgcacagattcttgagttacaacctgaaatgacctggaacaagtcggaactctcggtgatgcttaaagatgttcaagctcatgtagcccccactgatgtggatcctggtgctggtctacagtggctccctaaggttctgggtagctctgagaaattgaagcgcacaggtgccttgttagagagagtgtttatgccttgtcaaatgtatttccgttacactagacacaagggtggaactgcagacttgagggttaaaccactgaaggagctacgctttaactctccagacattactgcaacgatgacctctcgccagtttcaagttatgtttgacgtgcttagaaatcttctattcgcaagacttcccaagagtagaattagtgatgaactagaaatgtttggttccaaatgagcacaacttaatagtgttagtttcctgtcacaggcctaggaaaaacagtcttcagtatccatcagatgatgaagatattgaagaagaggctgacgaggtagtacctgatggagttgaagaagtggagcttgcgaaaattacactcgaacagagggaaagggaaattaagttactgcttgatgatataaggtctctcactggaaatggtgataatgggaccgatcactgtcattctgcagaaaaaggtgattgtttatggatgatcaacagcgggaaagcttcattggtggaaggactgaaaagggatttcgcaaacctacaaaagtctagaatatttgcatcatcagcattgaggaaagcactttcaaatgcttcacaatcacatttggagaaagaaaagaacaaaaccacttcttgtgccatgcggatttctatgaaaattagcaaggttgtatggagcatgctcgcagatggaaacacttttgcagaagctgagatcaatgatatggtgtatgattttgatcgggattacaaagatataggcattgccctgtttacaactaaatactttgttgtgcggaattgcatggttaatgcgaaatgtgacaccttattgtctgcctggaacacacctcctggaaaaattaacatgcttcgtgtggatgccaagcaaggtgctcctaaggatggaagttctccacttgagctcttccaggtggagatctacccactgagaatatatctatctgaagcaatgtatagaatgatgtgggattacttcttccctgaagaagacgattcacaacgaagacaggaagtttggagagtttcaacatcaaccgggcctagaagaacaagaaggctctcttctggtgtcgatgctgttacttctagcagctattctgtcagagatcatgaacttcctgggaaatcaagtacaactgtatctacatcaacaaatgtttcaagttggcaaggtatactcagcgataactcacaggtgtcaaagtttcagagtataaaagcaaatatggtatgtggttcgcatcaagagttgcaccggtcgtcttcatttgaaaggaattgggaagaaagcgctgcagaaagtgttgcaagtaatgatgtggtatcactcctgaattcttcaattgtttcttcaaaagtagatgctagcaattctgtcttagagaaccctgttgtgggaagtgagatgtggagaagtaaaacgaaagattctaagcctgccaagtctggacgtctatctcacgaagaaaagaagcttgggaagtctaatgatgaaaagaagacaaaacctcggaagtcaatggaatttcataacatcaagattggcaaggttgaacttcttgttacatacgagggatcaaggcttgctattaatgacctaaggttgcttatggatactttccacaaggcagaatttactggtacatggaggcgactattctctagagtcaaaaaagggaagaagtttagcaaccatagggaaacacttgagggttctattcctgaaaatgatcttaacttgagtgacagtgatgttggtcaacctggaagacatgatcaattaacagcttcatggttgaagaggccaggcgatggtgcaggtgatggatttgtcacgtcaattagggggcttttcaatacacagcgccgtaaagcgaaggcctttgtgattcggacaatgcgcggtgaagggcataatgacgaatatcaagacgaatggagcgagagcgatggtgaatacccttttgcgaggcagcttacaattacaaaggccaagaagctcatacgaaggaagttccgtccaagggtgcaaaagaacccaggtctgtcgatgcaagattcactcccatctagtccgcgggaaacaactccatatcaaagtgactcctccaggtcatcttacgaggacttccatgagcagtaaaacaatctggtgatgctgctttcagcttctacatttggtcgataagatgcagccatttatattggttatagtagggtgtatgtatatagtaggatgtaccatcaaaatccaatgtatcatgtatagtggttaggcaatactccgtaattatgtgcttgtaagttaataagaggccagctcgtactcctagaaaacaaaacccgtgatctatggcatggggcattctcattcccttgtacttcaggactagtatggattgtaaattcaacggtgaaggtgttgcaacatttattcagtaaagtatccttgttgaagaatttgtaaaaactatggcagaaacaatagggaaggagcaagtgactaggtgcctaggtgtattatgattcttttgctgactagttggaagttagaaatgcattgctccacgtcaaaaagaaatgcgtggcagacaaggttgttgcttaacagatcggtgagctatgaaatgctatctgttcacgtgtctagagtcta

SEQ ID NO: 10603 - DNA, 8553 bp, Zea Mays
cacggatccgggcggcgtgacgcggatccgccggacgctggcagggtcggccatggcgtcctccccagtcaagttcttctcggtgttcctggccgtctccgtcgtcggatggatcgtcttcacgtttgcttcaagattgttagcttggttcttgagccgtgtattctctgcttctgtcggatttcgagttgctggtttcaactgtttgagggatgtaacaataaagttctgtaagggttcagttgaatctgtttcgattggtgaaataaaactaagtttccgcaagtctctagtcaaactaagttttggtgttatctcaaaagacccgaagttgcaattgcttataaatgatctcgaaattgtaactagatcatcttctgaaaataaaaagatacgaaagtcagcaaagcctcgctctacaggaaaagggaaatggctggttacatcaagcatggcaagacttttatcagtttccgtgacagatctgataatcaaggtaccgaaaggcgctcttgacatcaaagaactaacggtggatacatttaaaattgctgggcctaatcatactcttggtgtcaagttgcatcttttacctttgaatatactccttggagatttgggattgactactgatccaatgggcagttgtagtctgtttgatgctttccagtctgatcaagcttctgtatctaactcagagaaaagcttggccccatttgtttgtgaagatttgttggttacttgtaaccttggccatgaaaaggagaaaggtattaaaatcattaacctggaattgaaatgtgggtatgctattgccaacattgatgaaaggatgtttcacaagaagcgcacgattccagaatataacactgtctctttgaacaccggagattctatcacagatacttcagcgctcaaacaaacatcgaaaagcaaatctattctaccgctgttaaagaaacacatgctcacatttccagataaggttagcttcagtgtgccgaagcttgatgtgaagttcagacacctgcatgaaggacttagtgttgacaacaacattacagggatccagtttacttgtgcaaaatccctaccacaagatgattttgaagaagcgacaccacacttcgatgttcaaattgatcttagcgaaattcatttaattagagaaggttctagttctctgttggaagttctgaaagtttttacaatagcttctttggatgtccctgttgacccatttcttccaatcagagctgagattgatgccaagcttggtggtacccaatgcaatattatgttaagcagactgatgccatggatgcggcttcattctttgagaaccaaaggaatgaaactttctaaaagaaactccaatcaagaaatttctcaaaaaaaggagatgaagccaattttgtggacttgcacggtcgctgccccagaaatgactgtcttgctttacagtctaaatggattggtcttgtaccatgcttgttcccagtcatcacatttgtttgcaaataatattgcaagcaaggggattcagatacacacagaacttggtgaattgctggtgcacatggaggaggaatatagagagttattaaaggaaaacatatttggtgtggatacttactctggttccctaatgcatattgctcggatgagccttgattggggatatagggaaagtgatgtccaagatatggttgaaactagcaggaatgcacttgttttttcgattgatataagtgatatggaagtgaaatttggcttcaagcatttggaatcaattgtgcttaatttgatgtcgtttaggactctatttaagagtctccagctatctggcggaagtgctaaagaaaagaatttggagcgtaaaggggagaagaaaatgaaaggtgtgaagaaactgaaattaagcctacaaaaattctctattacatactgtggtgatgcaaacataataagtatgccaattgctgatccaaagcgtgtgaactacggctctcaaggtggtcaagtaattgttagtgtttctgctgatggcacaccacgtagggcaagtataacatcagttttaccagactgccacttgcggttctccgcatctttggtaatatctcatctctctatgtgtatagacaaggagagaaagacaacagaagcggaattggaacgggtgaaggcaatctatgaggaattacctgaggatcgctctggtgtcagagtaactttactagatatgcagaatgctaaaattgttcgccgatccagtggtcatgcggaagttgctgtttgttccctctttagtgctactgatatttatttgagatgggaacctgatgctcatttagcactatatgagacattcatccgctttaagcatttcctacatcataatgtgtcccaaaattctgaaaagatgattaatactgaagttgcaagtaccaaatcaaatgaacatggcaacataactgccggtttcattaattctcagaaatccaacagaaaagggtcaatttttgccattgatgtggacatgttaagggtatctgctgaacttgctgatggtgttgaagcaaacatgcatgtacagtcaatctttactgaaaatgccaagataggtgtactgtctgaaggtctttctcttacttttaatggcgctagagttctaaagagcacccgtatacaaatatcctgtatacctttcagcactgggagtttacttgatgcaaagattgaaccatcatccaaaagagactgggttgttcaaggtctagatgtccatatttgcatgccttacaggttgccattgcgtgccatagaagatgctgttgaagatatgtttcgtgcccttaagcttgtctcatctgccaaaagaagtataatctgtcctgatgaaaaggaaaaatctagaaaggttaattctgggggatccaaatttggatctgtgaaatttgtattgcgtaaattgacagcagatatagaggaagagcccatccaaggttggctcgatgaacattaccatttgatgaggaacaaaatctgtgagctaggtgttaggttgaattatcttgaggaagctatatcaggaagtgtagatccgagcaatcacagctctgagagaaaagttctctacaatggtgttgaagttgacattcatgacaccacagctcttcaaaagttgcaggaagaaatccataagcaagcatttcgatcatattatgtgtcttgtcagaacatggtacttgcagaagggtcaggagcgtgctcagaaggttttcaagctggattcagacaaagctcgcgaagagcttctcttctttcactttctgcttccgatctggatgttactttgaccaggatagatggtggagagatagaaatggttgaatttataaaggggcttgaccctgtctgtcaggagcaaaacataccattttctcggttgtatggtagtgatgtttctgtcgttgctgggtccttggttgtacagctaagagactatacttctcctctgttctcttcactcagtgggaaatgtcaaggccgtattgtgcttgctcagcaggcaacatgttttcaaccccaaatacaccaagagttgtatattggaagatggcaaaaggtcacgatgctacgttctgccagtggtactacgccagcaatgaaaatgtactctaatttacctatttatttccagaagggagagatatcttttggagttggttatgagccatctttcgctgatataagctatgcatttcaagtagccctgcggaaagttaaccttagcactagagcaagctgttctggtctagcagtccaactgcctaaaaaggagcgcagcttaccatggtgggatgacatgagatactacttgcatggaaagataattttatatttcaatgagaccaaatggaagttcctggcaacaactaatccttatgagcatgtggataaactccaaattgtctctgaatacatggagatccagcaaactgatggtcgtgtggatgtttctgcgaaagaattcaagatatacataagcagcgtagagagtattacaaagaaccgccgcataaaagttccatctcgtgtgcccagaccttttatatatgctcctctattctccctaaatgtggttattgattggcagtgcgaatctaggaatccattgaatcattatttgcatgcactccctgttgagggggaacctcggaagaaagtttatgatccatttcgatctacttatctctctcttaggtggaacttctccctcagaccattgcaatcccagtatggtaatggcccaccacctcccttttatggaaataattcaatgctccgtgggatcatgtctggtagtccttgcaaaatgactgatgatgacttccctaccatgaacctgggagctcatgaccttgcttgggttttcaaatggtggagcttgaattacagcccccctcacaaacttcgttccttctctagatggcgtcgttttggaattcctcgggctactagatctggtaacctctcgctggacaaagttttggttgaattctttttccgtgttgatgctactccctgttgcataaggcatgcacctttaagtgaggatgatgaccctgcttttggtttgacgtttaagatgtcaaatttgaagtacgagttatgttacagtcgaggtaaacaacagtacacatttgattgtaaacgtgaatcactggaccttgtttatcgtggtctggatcttcacaggccggaggtttatttgatgcgagataacaatttgtcttcagttgaaaatgtatccaaagtaaggactatggtccaacagtcacatggaaaatttgttcatgacagatgcaacatgggtaatttccaagaaaagcatgaggatggcttcctcttgtcttcagattatatcacgataagaaggcaaacacgtaaagcagatcctgaaagacttatgggatggcaggatactgggaggagtcatgagataacatatgttaggtctgagtttgaggatgacagtgaaagtgaccacactctatctgagcctagcgacgacgacgatgattttaatgtggtgcttgctgacaattgccaaagagtatttgtttatggccttaggattttatggactattgagaatcgagacgcggtttggtcgtgggttggaggaatttccaaagcatttgagcctccaaaaccctctccttcacgacaatatgcacaaagaaagatgattgaagaaaggaatgctgagggctccaaggtgccgcaagattccagctcttccatacatgtgggttctccatcagtgcaacatctggatgcttcgggttcatcttcctcgttgcatagtaaagccaatcgctcctctgatgtggctgtaaatcatgacatttttgatgattcggataaaggagggacagcccaatatatggttaatgttattacaccccaattcaacctacactctgaagaagcaaatggaaggtttctacttgctgcagccagtggtcgtgtactggctcgttcatttcattcagttgttcatcttgggaaagaaatactagaacaagcacttggaacaagcagtgcacagattcttgagttacaacctgaaatgacctggaacaagtcggaactctcggtgatgcttaaagatgttcaagctcatgtagcccccactgatgtggatcctggtgctggtctacagtggctccctaaggttctgggtagctctgagaaattgaagcgcacaggtgccttgttagagagagtgtttatgccttgtcaaatgtatttccgttacactagacacaagggtggaactgcagacttgagggttaaaccactgaaggagctacgctttaactctccagacattactgcaacgatgacctctcgccagtttcaagttatgtttgacgtgcttagaaatcttctattcgcaagacttcccaagcctaggaaaaacagtcttcagtatccatcagatgatgaagatattgaagaagaggctgacgaggtagtacctgatggagttgaagaagtggagcttgcgaaaattacactcgaacagagggaaagggaaattaagttactgcttgatgatataaggtctctcactggaaatggtgataatgggaccgatcactgtcattctgcagaaaaaggtgattgtttatggatgatcaacagcgggaaagcttcattggtggaaggactgaaaagggatttcgcaaacctacaaaagtctagaatatttgcatcatcagcattgaggaaagcactttcaaatgcttcacaatcacatttggagaaagaaaagaacaaaaccacttcttgtgccatgcggatttctatgaaaattagcaaggttgtatggagcatgctcgcagatggaaacacttttgcagaagctgagatcaatgatatggtgtgtgctcagccttgtcccttcacctctgtggctgtctgtagcttcaatcgggttggagagagcgagaggcgtcaaggaggatgaacggcgagggtgtatgattttgatcgggattacaaagatataggcattgccctgtttacaactaaatactttgttgtgcggaattgcatggttaatgcgaaatgtgacaccttattgtctgcctggaacacacctcctggaaaaattaacatgcttcgtgtggatgccaagcaaggtgctcctaaggatggaagttctccacttgagctcttccaggtggagatctacccactgagaatatatctatctgaagcaatgtatagaatgatgtgggattacttcttccctgaagaagacgattcacaacgaagacagaaaaggaagtttggagagtttcaacatcaaccgggcctagaagaacaagaaggctctcttctggtgtcgatgctgttacttctagcagctattctgtcagagatcatgaacttcctgggaaatcaagtacaactgtatctacatcaacaaatgtttcaagttggcaaggtatactcagcgataactcacaggtgtcaaagtttcagagtataaaagcaaatatggtatgtggttcgcatcaagagttgcaccggtcgtcttcatttgaaaggaattgggaagaaagcgctgcagaaagtgttgcaagtaatgatgtggtatcactcctgaattcttcaattgtttcttcaaaagtagatgctagcaattctgtcttagagaaccctgttgtgggaagtgagatgtggagaagtaaaacgaaagattctaagcctgccaagtctggacgtctatctcacgaagaaaagaagcttgggaagtctaatgatgaaaagaagacaaaacctcggaagtcaatggaatttcataacatcaagattggcaaggttgaacttcttgttacatacgagggatcaaggcttgctattaatgacctaaggttgcttatggatactttccacaaggcagaatttactggtacatggaggcgactattctctagagtcaaaaaacatatcatctggggagttttgaagtcggtaaccggaatgcaggggaagaagtttagcaaccatagggaaacacttgagggttctattcctgaaaatgatcttaacttgagtgacagtgatgttggtcaacctggaagacatgatcaattaacagcttcatggttgaagaggccaggcgatggtgcaggtgatggatttgtcacgtcaattagggggcttttcaatacacagcgccgtaaagcgaaggcctttgtgattcggacaatgcgcggtgaagggcataatgacgaatatcaagacgaatggagcgagagcgatggtgaatacccttttgcgaggcagcttacaattacaaaggccaagaagctcatacgaaggaagttccgtccaagggtgcaaaagaacccaggtctgtcgatgcaagattcactcccatctagtccgcgggaaacaactccatatcaaagtgactcctccaggtcatcttacgaggacttccatgagcagtaaaacaatctggtgatgctgctttcagcttctacatttggtcgataagatgcagccatttatattggttatagtagggtgtatgtatatagtaggatgtaccatcaaaatccaatgtatcatgtatagtggttaggcaatactccgtaattatgtgcttgtaagttaataagaggccagctcgtactcctagaaaacaaaacccgtgatctatggcatggggcattctcattcccttgtacttcaggactagtatggattgtaaattcaacggtgaaggtgttgcaacatttattcagtaaagtatccttgttgaagaatttgtaaaaactatggcagaaacaatagggaaggagcaagtgactaggtgcctaggtgtattatgattcttttgctgactagttggaagttagaaatgcattgctccacgtcaaaaagaaatgcgtggcagacaaggttgttgcttaacagatcggtgagctatgaaatgctatctgttcacgtgtctagagtcta

SEQ ID NO: 10604 - DNA, 8465 bp, Zea Mays
agggttcgagggaggttatgccggcgctgtcgcaggcacggatccgggcggcgtgacgcggatccgccggacgctggcagggtcggccatggcgtcctccccagtcaagttcttctcggtgttcctggccgtctccgtcgtcggatggatcgtcttcacgtttgcttcaagattgttagcttggttcttgagccgtgtattctctgcttctgtcggatttcgagttgctggtttcaactgtttgagggatgtaacaataaagttctgtaagggttcagttgaatctgtttcgattggtgaaataaaactaagtttccgcaagtctctagtcaaactaagttttggtgttatctcaaaagacccgaagttgcaattgcttataaatgatctcgaaattgtaactagatcatcttctgaaaataaaaagatacgaaagtcagcaaagcctcgctctacaggaaaagggaaatggctggttacatcaagcatggcaagacttttatcagtttccgtgacagatctgataatcaaggtaccgaaaggcgctcttgacatcaaagaactaacggtggatacatttaaaattgctgggcctaatcatactcttggtgtcaagttgcatcttttacctttgaatatactccttggagatttgggattgactactgatccaatgggcagttgtagtctgtttgatgctttccagtctgatcaagcttctgtatctaactcagagaaaagcttggccccatttgtttgtgaagatttgttggttacttgtaaccttggccatgaaaaggagaaaggtattaaaatcattaacctggaattgaaatgtgggtatgctattgccaacattgatgaaaggatgtttcacaagaagcgcacgattccagaatataacactgtctctttgaacaccggagattctatcacagatacttcagcgctcaaacaaacatcgaaaagcaaatctattctaccgctgttaaagaaacacatgctcacatttccagataaggttagcttcagtgtgccgaagcttgatgtgaagttcagacacctgcatgaaggacttagtgttgacaacaacattacagggatccagtttacttgtgcaaaatccctaccacaagatgattttgaagaagcgacaccacacttcgatgttcaaattgatcttagcgaaattcatttaattagagaaggttctagttctctgttggaagttctgaaagtttttacaatagcttctttggatgtccctgttgacccatttcttccaatcagagctgagattgatgccaagcttggtggtacccaatgcaatattatgttaagcagactgatgccatggatgcggcttcattctttgagaaccaaaggaatgaaactttctaaaagaaactccaatcaagaaatttctcaaaaaaaggagatgaagccaattttgtggacttgcacggtcgctgccccagaaatgactgtcttgctttacagtctaaatggattggtcttgtaccatgcttgttcccagtcatcacatttgtttgcaaataatattgcaagcaaggggattcagatacacacagaacttggtgaattgctggtgcacatggaggaggaatatagagagttattaaaggaaaacatatttggtgtggatacttactctggttccctaatgcatattgctcggatgagccttgattggggatatagggaaagtgatgtccaagatatggttgaaactagcaggaatgcacttgttttttcgattgatataagtgatatggaagtgaaatttggcttcaagcatttggaatcaattgtgcttaatttgatgtcgtttaggactctatttaagagtctccagctatctggcggaagtgctaaagaaaagaatttggagcgtaaaggggagaagaaaatgaaaggtgtgaagaaactgaaattaagcctacaaaaattctctattacatactgtggtgatgcaaacataataagtatgccaattgctgatccaaagcgtgtgaactacggctctcaaggtggtcaagtaattgttagtgtttctgctgatggcacaccacgtagggcaagtataacatcagttttaccagactgccacttgcggttctccgcatctttggtaatatctcatctctctatgtgtatagacaaggagagaaagacaacagaagcggaattggaacgggtgaaggcaatctatgaggaattacctgaggatcgctctggtgtcagagtaactttactagatatgcagaatgctaaaattgttcgccgatccagtggtcatgcggaagttgctgtttgttccctctttagtgctactgatatttatttgagatgggaacctgatgctcatttagcactatatgagacattcatccgctttaagcatttcctacatcataatgtgtcccaaaattctgaaaagatgattaatactgaagttgcaagtaccaaatcaaatgaacatggcaacataactgccggtttcattaattctcagaaatccaacagaaaagggtcaatttttgccattgatgtggacatgttaagggtatctgctgaacttgctgatggtgttgaagcaaacatgcatgtacagtcaatctttactgaaaatgccaagataggtgtactgtctgaaggtctttctcttacttttaatggcgctagagttctaaagagcacccgtatacaaatatcctgtatacctttcagcactgggagtttacttgatgcaaagattgaaccatcatccaaaagagactgggttgttcaaggtctagatgtccatatttgcatgccttacaggttgccattgcgtgccatagaagatgctgttgaagatatgtttcgtgcccttaagcttgtctcatctgccaaaagaagtataatctgtcctgatgaaaaggaaaaatctagaaaggttaattctgggggatccaaatttggatctgtgaaatttgtattgcgtaaattgacagcagatatagaggaagagcccatccaaggttggctcgatgaacattaccatttgatgaggaacaaaatctgtgagctaggtgttaggttgaattatcttgaggaagctatatcaggaagtgtagatccgagcaatcacagctctgagagaaaagttctctacaatggtgttgaagttgacattcatgacaccacagctcttcaaaagttgcaggaagaaatccataagcaagcatttcgatcatattatgtgtcttgtcagaacatggtacttgcagaagggtcaggagcgtgctcagaaggttttcaagctggattcagacaaagctcgcgaagagcttctcttctttcactttctgcttccgatctggatgttactttgaccaggatagatggtggagagatagaaatggttgaatttataaaggggcttgaccctgtctgtcaggagcaaaacataccattttctcggttgtatggtagtgatgtttctgtcgttgctgggtccttggttgtacagctaagagactatacttctcctctgttctcttcactcagtgggaaatgtcaaggccgtattgtgcttgctcagcaggcaacatgttttcaaccccaaatacaccaagagttgtatattggaagatggcaaaaggtcacgatgctacgttctgccagtggtactacgccagcaatgaaaatgtactctaatttacctatttatttccagaagggagagatatcttttggagttggttatgagccatctttcgctgatataagctatgcatttcaagtagccctgcggaaagttaaccttagcactagagcaagctgttctggtctagcagtccaactgcctaaaaaggagcgcagcttaccatggtgggatgacatgagatactacttgcatggaaagataattttatatttcaatgagaccaaatggaagttcctggcaacaactaatccttatgagcatgtggataaactccaaattgtctctgaatacatggagatccagcaaactgatggtcgtgtggatgtttctgcgaaagaattcaagatatacataagcagcgtagagagtattacaaagaaccgccgcataaaagttccatctcgtgtgcccagaccttttatatatgctcctctattctccctaaatgtggttattgattggcagtgcgaatctaggaatccattgaatcattatttgcatgcactccctgttgagggggaacctcggaagaaagtttatgatccatttcgatctacttatctctctcttaggtggaacttctccctcagaccattgcaatcccagtatggtaatggcccaccacctcccttttatggaaataattcaatgctccgtgggatcatgtctggtagtccttgcaaaatgactgatgatgacttccctaccatgaacctgggagctcatgaccttgcttgggttttcaaatggtggagcttgaattacagcccccctcacaaacttcgttccttctctagatggcgtcgttttggaattcctcgggctactagatctggtaacctctcgctggacaaagttttggttgaattctttttccgtgttgatgctactccctgttgcataaggcatgcacctttaagtgaggatgatgaccctgcttttggtttgacgtttaagatgtcaaatttgaagtacgagttatgttacagtcgaggtaaacaacagtacacatttgattgtaaacgtgaatcactggaccttgtttatcgtggtctggatcttcacaggccggaggtttatttgatgcgagataacaatttgtcttcagttgaaaatgtatccaaagtaaggactatggtccaacagtcacatggaaaatttgttcatgacagatgcaacatgggtaatttccaagaaaagcatgaggatggcttcctcttgtcttcagattatatcacgataagaaggcaaacacgtaaagcagatcctgaaagacttatgggatggcaggatactgggaggagtcatgagataacatatgttaggtctgagtttgaggatgacagtgaaagtgaccacactctatctgagcctagcgacgacgacgatgattttaatgtggtgcttgctgacaattgccaaagagtatttgtttatggccttaggattttatggactattgagaatcgagacgcggtttggtcgtgggttggaggaatttccaaagcatttgagcctccaaaaccctctccttcacgacaatatgcacaaagaaagatgattgaagaaaggaatgctgagggctccaaggtgccgcaagattccagctcttccatacatgtgggttctccatcagtgcaacatctggatgcttcgggttcatcttcctcgttgcatagtaaagccaatcgctcctctgatgtggctgtaaatcatgacatttttgatgattcggataaaggagggacagcccaatatatggttaatgttattacaccccaattcaacctacactctgaagaagcaaatggaaggtttctacttgctgcagccagtggtcgtgtactggctcgttcatttcattcagttgttcatcttgggaaagaaatactagaacaagcacttggaacaagcagtgcacagattcttgagttacaacctgaaatgacctggaacaagtcggaactctcggtgatgcttaaagatgttcaagctcatgtagcccccactgatgtggatcctggtgctggtctacagtggctccctaaggttctgggtagctctgagaaattgaagcgcacaggtgccttgttagagagagtgtttatgccttgtcaaatgtatttccgttacactagacacaagggtggaactgcagacttgagggttaaaccactgaaggagctacgctttaactctccagacattactgcaacgatgacctctcgccagtttcaagttatgtttgacgtgcttagaaatcttctattcgcaagacttcccaagcctaggaaaaacagtcttcagtatccatcagatgatgaagatattgaagaagaggctgacgaggtagtacctgatggagttgaagaagtggagcttgcgaaaattacactcgaacagagggaaagggaaattaagttactgcttgatgatataaggtctctcactggaaatggtgataatgggaccgatcactgtcattctgcagaaaaaggtgattgtttatggatgatcaacagcgggaaagcttcattggtggaaggactgaaaagggatttcgcaaacctacaaaagtctagaatatttgcatcatcagcattgaggaaagcactttcaaatgcttcacaatcacatttggagaaagaaaagaacaaaaccacttcttgtgccatgcggatttctatgaaaattagcaaggttgtatggagcatgctcgcagatggaaacacttttgcagaagctgagatcaatgatatggtgtatgattttgatcgggattacaaagatataggcattgccctgtttacaactaaatactttgttgtgcggaattgcatggttaatgcgaaatgtgacaccttattgtctgcctggaacacacctcctggaaaaattaacatgcttcgtgtggatgccaagcaaggtgctcctaaggatggaagttctccacttgagctcttccaggtggagatctacccactgagaatatatctatctgaagcaatgtatagaatgatgtgggattacttcttccctgaagaagacgattcacaacgaagacaggaagtttggagagtttcaacatcaaccgggcctagaagaacaagaaggctctcttctggtgtcgatgctgttacttctagcagctattctgtcagagatcatgaacttcctgggaaatcaagtacaactgtatctacatcaacaaatgtttcaagttggcaaggtgtcaaagtttcagagtataaaagcaaatatggtatgtggttcgcatcaagagttgcaccggtcgtcttcatttgaaaggaattgggaagaaagcgctgcagaaagtgttgcaagtaatgatgtggtatcactcctgaattcttcaattgtttcttcaaaagtagatgctagcaattctgtcttagagaaccctgttgtgggaagtgagatgtggagaagtaaaacgaaagattctaagcctgccaagtctggacgtctatctcacgaagaaaagaagcttgggaagtctaatgatgaaaagaagacaaaacctcggaagtcaatggaatttcataacatcaagattggcaaggttgaacttcttgttacatacgagggatcaaggcttgctattaatgacctaaggttgcttatggatactttccacaaggcagaatttactggtacatggaggcgactattctctagagtcaaaaaacatatcatctggggagttttgaagtcggtaaccggaatgcaggggaagaagtttagcaaccatagggaaacacttgagggttctattcctgaaaatgatcttaacttgagtgacagtgatgttggtcaacctggaagacatgatcaattaacagcttcatggttgaagaggccaggcgatggtgcaggtgatggatttgtcacgtcaattagggggcttttcaatacacagcgccgtaaagcgaaggcctttgtgattcggacaatgcgcggtgaagggcataatgacgaatatcaagacgaatggagcgagagcgatggtgaatacccttttgcgaggcagcttacaattacaaaggccaagaagctcatacgaaggaagttccgtccaagggtgcaaaagaacccaggtctgtcgatgcaagattcactcccatctagtccgcgggaaacaactccatatcaaagtgactcctccaggtcatcttacgaggacttccatgagcagtaaaacaatctggtgatgctgctttcagcttctacatttggtcgataagatgcagccatttatattggttatagtagggtgtatgtatatagtaggatgtaccatcaaaatccaatgtatcatgtatagtggttaggcaatactccgtaattatgtgcttgtaagttaataagaggccagctcgtactcctagaaaacaaaacccgtgatctatggcatggggcattctcattcccttgtacttcaggactagtatggattgtaaattcaacggtgaaggtgttgcaacatttattcagtaaagtatccttgttgaagaatttgtaaaaactatggcagaaacaatagggaaggagcaagtgactaggtgcctaggtgtattatgattcttttgctgactagttggaagttagaaatgcattgctccacgtcaaaaagaaatgcgtggcagacaaggttgttgcttaacagatcggtgagctatgaaatgctatctgttcacgtgtctagagtcta

SEQ ID NO: 10605 - DNA, 8492 bp, Zea Mays
ccgagatcgctcgtcgccgccgccgtctctttactgaacagggattccctcgcggaccgcggcccgaccgcctccccgaagctagggttcgagggaggttatgccggcgctgtcgcaggcacggatccgggcggcgtgacgcggatccgccggacgctggcagggtcggccatggcgtcctccccagtcaagttcttctcggtgttcctggccgtctccgtcgtcggatggatcgtcttcacgtttgcttcaagattgttagcttggttcttgagccgtgtattctctgcttctgtcggatttcgagttgctggtttcaactgtttgagggatgtaacaataaagttctgtaagggttcagttgaatctgtttcgattggtgaaataaaactaagtttccgcaagtctctagtcaaactaagttttggtgttatctcaaaagacccgaagttgcaattgcttataaatgatctcgaaattgtaactagatcatcttctgaaaataaaaagatacgaaagtcagcaaagcctcgctctacaggaaaagggaaatggctggttacatcaagcatggcaagacttttatcagtttccgtgacagatctgataatcaaggtaccgaaaggcgctcttgacatcaaagaactaacggtggatacatttaaaattgctgggcctaatcatactcttggtgtcaagttgcatcttttacctttgaatatactccttggagatttgggattgactactgatccaatgggcagttgtagtctgtttgatgctttccagtctgatcaagcttctgtatctaactcagagaaaagcttggccccatttgtttgtgaagatttgttggttacttgtaaccttggccatgaaaaggagaaaggtattaaaatcattaacctggaattgaaatgtgggtatgctattgccaacattgatgaaaggatgtttcacaagaagcgcacgattccagaatataacactgtctctttgaacaccggagattctatcacagatacttcagcgctcaaacaaacatcgaaaagcaaatctattctaccgctgttaaagaaacacatgctcacatttccagataagggatccagtttacttgtgcaaaatccctaccacaagatgattttgaagaagcgacaccacacttcgatgttcaaattgatcttagcgaaattcatttaattagagaaggttctagttctctgttggaagttctgaaagtttttacaatagcttctttggatgtccctgttgacccatttcttccaatcagagctgagattgatgccaagcttggtggtacccaatgcaatattatgttaagcagactgatgccatggatgcggcttcattctttgagaaccaaaggaatgaaactttctaaaagaaactccaatcaagaaatttctcaaaaaaaggagatgaagccaattttgtggacttgcacggtcgctgccccagaaatgactgtcttgctttacagtctaaatggattggtcttgtaccatgcttgttcccagtcatcacatttgtttgcaaataatattgcaagcaaggggattcagatacacacagaacttggtgaattgctggtgcacatggaggaggaatatagagagttattaaaggaaaacatatttggtgtggatacttactctggttccctaatgcatattgctcggatgagccttgattggggatatagggaaagtgatgtccaagatatggttgaaactagcaggaatgcacttgttttttcgattgatataagtgatatggaagtgaaatttggcttcaagcatttggaatcaattgtgcttaatttgatgtcgtttaggactctatttaagagtctccagctatctggcggaagtgctaaagaaaagaatttggagcgtaaaggggagaagaaaatgaaaggtgtgaagaaactgaaattaagcctacaaaaattctctattacatactgtggtgatgcaaacataataagtatgccaattgctgatccaaagcgtgtgaactacggctctcaaggtggtcaagtaattgttagtgtttctgctgatggcacaccacgtagggcaagtataacatcagttttaccagactgccacttgcggttctccgcatctttggtaatatctcatctctctatgtgtatagacaaggagagaaagacaacagaagcggaattggaacgggtgaaggcaatctatgaggaattacctgaggatcgctctggtgtcagagtaactttactagatatgcagaatgctaaaattgttcgccgatccagtggtcatgcggaagttgctgtttgttccctctttagtgctactgatatttatttgagatgggaacctgatgctcatttagcactatatgagacattcatccgctttaagcatttcctacatcataatgtgtcccaaaattctgaaaagatgattaatactgaagttgcaagtaccaaatcaaatgaacatggcaacataactgccggtttcattaattctcagaaatccaacagaaaagggtcaatttttgccattgatgtggacatgttaagggtatctgctgaacttgctgatggtgttgaagcaaacatgcatgtacagtcaatctttactgaaaatgccaagataggtgtactgtctgaaggtctttctcttacttttaatggcgctagagttctaaagagcacccgtatacaaatatcctgtatacctttcagcactgggagtttacttgatgcaaagattgaaccatcatccaaaagagactgggttgttcaaggtctagatgtccatatttgcatgccttacaggttgccattgcgtgccatagaagatgctgttgaagatatgtttcgtgcccttaagcttgtctcatctgccaaaagaagtataatctgtcctgatgaaaaggaaaaatctagaaaggttaattctgggggatccaaatttggatctgtgaaatttgtattgcgtaaattgacagcagatatagaggaagagcccatccaaggttggctcgatgaacattaccatttgatgaggaacaaaatctgtgagctaggtgttaggttgaattatcttgaggaagctatatcaggaagtgtagatccgagcaatcacagctctgagagaaaagttctctacaatggtgttgaagttgacattcatgacaccacagctcttcaaaagttgcaggaagaaatccataagcaagcatttcgatcatattatgtgtcttgtcagaacatggtacttgcagaagggtcaggagcgtgctcagaaggttttcaagctggattcagacaaagctcgcgaagagcttctcttctttcactttctgcttccgatctggatgttactttgaccaggatagatggtggagagatagaaatggttgaatttataaaggggcttgaccctgtctgtcaggagcaaaacataccattttctcggttgtatggtagtgatgtttctgtcgttgctgggtccttggttgtacagctaagagactatacttctcctctgttctcttcactcagtgggaaatgtcaaggccgtattgtgcttgctcagcaggcaacatgttttcaaccccaaatacaccaagagttgtatattggaagatggcaaaaggtcacgatgctacgttctgccagtggtactacgccagcaatgaaaatgtactctaatttacctatttatttccagaagggagagatatcttttggagttggttatgagccatctttcgctgatataagctatgcatttcaagtagccctgcggaaagttaaccttagcactagagcaagctgttctggtctagcagtccaactgcctaaaaaggagcgcagcttaccatggtgggatgacatgagatactacttgcatggaaagataattttatatttcaatgagaccaaatggaagttcctggcaacaactaatccttatgagcatgtggataaactccaaattgtctctgaatacatggagatccagcaaactgatggtcgtgtggatgtttctgcgaaagaattcaagatatacataagcagcgtagagagtattacaaagaaccgccgcataaaagttccatctcgtgtgcccagaccttttatatatgctcctctattctccctaaatgtggttattgattggcagtgcgaatctaggaatccattgaatcattatttgcatgcactccctgttgagggggaacctcggaagaaagtttatgatccatttcgatctacttatctctctcttaggtggaacttctccctcagaccattgcaatcccagtatggtaatggcccaccacctcccttttatggaaataattcaatgctccgtgggatcatgtctggtagtccttgcaaaatgactgatgatgacttccctaccatgaacctgggagctcatgaccttgcttgggttttcaaatggtggagcttgaattacagcccccctcacaaacttcgttccttctctagatggcgtcgttttggaattcctcgggctactagatctggtaacctctcgctggacaaagttttggttgaattctttttccgtgttgatgctactccctgttgcataaggcatgcacctttaagtgaggatgatgaccctgcttttggtttgacgtttaagatgtcaaatttgaagtacgagttatgttacagtcgaggtaaacaacagtacacatttgattgtaaacgtgaatcactggaccttgtttatcgtggtctggatcttcacaggccggaggtttatttgatgcgagataacaatttgtcttcagttgaaaatgtatccaaagtaaggactatggtccaacagtcacatggaaaatttgttcatgacagatgcaacatgggtaatttccaagaaaagcatgaggatggcttcctcttgtcttcagattatatcacgataagaaggcaaacacgtaaagcagatcctgaaagacttatgggatggcaggatactgggaggagtcatgagataacatatgttaggtctgagtttgaggatgacagtgaaagtgaccacactctatctgagcctagcgacgacgacgatgattttaatgtggtgcttgctgacaattgccaaagagtatttgtttatggccttaggattttatggactattgagaatcgagacgcggtttggtcgtgggttggaggaatttccaaagcatttgagcctccaaaaccctctccttcacgacaatatgcacaaagaaagatgattgaagaaaggaatgctgagggctccaaggtgccgcaagattccagctcttccatacatgtgggttctccatcagtgcaacatctggatgcttcgggttcatcttcctcgttgcatagtaaagccaatcgctcctctgatgtggctgtaaatcatgacatttttgatgattcggataaaggagggacagcccaatatatggttaatgttattacaccccaattcaacctacactctgaagaagcaaatggaaggtttctacttgctgcagccagtggtcgtgtactggctcgttcatttcattcagttgttcatcttgggaaagaaatactagaacaagcacttggaacaagcagtgcacagattcttgagttacaacctgaaatgacctggaacaagtcggaactctcggtgatgcttaaagatgttcaagctcatgtagcccccactgatgtggatcctggtgctggtctacagtggctccctaaggttctgggtagctctgagaaattgaagcgcacaggtgccttgttagagagagtgtttatgccttgtcaaatgtatttccgttacactagacacaagggtggaactgcagacttgagggttaaaccactgaaggagctacgctttaactctccagacattactgcaacgatgacctctcgccagtttcaagttatgtttgacgtgcttagaaatcttctattcgcaagacttcccaagcctaggaaaaacagtcttcagtatccatcagatgatgaagatattgaagaagaggctgacgaggtagtacctgatggagttgaagaagtggagcttgcgaaaattacactcgaacagagggaaagggaaattaagttactgcttgatgatataaggtctctcactggaaatggtgataatgggaccgatcactgtcattctgcagaaaaaggtgattgtttatggatgatcaacagcgggaaagcttcattggtggaaggactgaaaagggatttcgcaaacctacaaaagtctagaatatttgcatcatcagcattgaggaaagcactttcaaatgcttcacaatcacatttggagaaagaaaagaacaaaaccacttcttgtgccatgcggatttctatgaaaattagcaaggttgtatggagcatgctcgcagatggaaacacttttgcagaagctgagatcaatgatatggtgtatgattttgatcgggattacaaagatataggcattgccctgtttacaactaaatactttgttgtgcggaattgcatggttaatgcgaaatgtgacaccttattgtctgcctggaacacacctcctggaaaaattaacatgcttcgtgtggatgccaagcaaggtgctcctaaggatggaagttctccacttgagctcttccaggtggagatctacccactgagaatatatctatctgaagcaatgtatagaatgatgtgggattacttcttccctgaagaagacgattcacaacgaagacaggaagtttggagagtttcaacatcaaccgggcctagaagaacaagaaggctctcttctggtgtcgatgctgttacttctagcagctattctgtcagagatcatgaacttcctgggaaatcaagtacaactgtatctacatcaacaaatgtttcaagttggcaaggtatactcagcgataactcacaggtgtcaaagtttcagagtataaaagcaaatatggtatgtggttcgcatcaagagttgcaccggtcgtcttcatttgaaaggaattgggaagaaagcgctgcagaaagtgttgcaagtaatgatgtggtatcactcctgaattcttcaattgtttcttcaaaagtagatgctagcaattctgtcttagagaaccctgttgtgggaagtgagatgtggagaagtaaaacgaaagattctaagcctgccaagtctggacgtctatctcacgaagaaaagaagcttgggaagtctaatgatgaaaagaagacaaaacctcggaagtcaatggaatttcataacatcaagattggcaaggttgaacttcttgttacatacgagggatcaaggcttgctattaatgacctaaggttgcttatggatactttccacaaggcagaatttactggtacatggaggcgactattctctagagtcaaaaaacatatcatctggggagttttgaagtcggtaaccggaatgcaggggaagaagtttagcaaccatagggaaacacttgagggttctattcctgaaaatgatcttaacttgagtgacagtgatgttggtcaacctggaagacatgatcaattaacagcttcatggttgaagaggccaggcgatggtgcaggtgatggatttgtcacgtcaattagggggcttttcaatacacagcgccgtaaagcgaaggcctttgtgattcggacaatgcgcggtgaagggcataatgacgaatatcaagacgaatggagcgagagcgatggtgaatacccttttgcgaggcagcttacaattacaaaggccaagaagctcatacgaaggaagttccgtccaagggtgcaaaagaacccaggtctgtcgatgcaagattcactcccatctagtccgcgggaaacaactccatatcaaagtgactcctccaggtcatcttacgaggacttccatgagcagtaaaacaatctggtgatgctgctttcagcttctacatttggtcgataagatgcagccatttatattggttatagtagggtgtatgtatatagtaggatgtaccatcaaaatccaatgtatcatgtatagtggttaggcaatactccgtaattatgtgcttgtaagttaataagaggccagctcgtactcctagaaaacaaaacccgtgatctatggcatggggcattctcattcccttgtacttcaggactagtatggattgtaaattcaacggtgaaggtgttgcaacatttattcagtaaagtatccttgttgaagaatttgtaaaaactatggcagaaacaatagggaaggagcaagtgactaggtgcctaggtgtattatgattcttttgctgactagttggaagttagaaatgcattgctccacgtcaaaaagaaatgcgtggcagacaaggttgttgcttaacagatcggtgagctatgaaatgctatctgttcacgtgtctagagtcta

SEQ ID NO: 10606 - DNA, 8480 bp, Zea Mays
cccagtccccaccccgagatcgctcgtcgccgccgccgtctctttactgaacagggattccctcgcggaccgcggcccgaccgcctccccgaagctagggttcgagggaggttatgccggcgctgtcgcaggcacggatccgggcggcgtgacgcggatccgccggacgctggcagggtcggccatggcgtcctccccagtcaagttcttctcggtgttcctggccgtctccgtcgtcggatggatcgtcttcacgtttgcttcaagattgttagcttggttcttgagccgtgtattctctgcttctgtcggatttcgagttgctggtttcaactgtttgagggatgtaacaataaagttctgtaagggttcagttgaatctgtttcgattggtgaaataaaactaagtttccgcaagtctctagtcaaactaagttttggtgttatctcaaaagacccgaagttgcaattgcttataaatgatctcgaaattgtaactagatcatcttctgaaaataaaaagatacgaaagtcagcaaagcctcgctctacaggaaaagggaaatggctggttacatcaagcatggcaagacttttatcagtttccgtgacagatctgataatcaaggtaccgaaaggcgctcttgacatcaaagaactaacggtggatacatttaaaattgctgggcctaatcatactcttggtgtcaagttgcatcttttacctttgaatatactccttggagatttgggattgactactgatccaatgggcagttgtagtctgtttgatgctttccagtctgatcaagcttctgtatctaactcagagaaaagcttggccccatttgtttgtgaagatttgttggttacttgtaaccttggccatgaaaaggagaaaggtattaaaatcattaacctggaattgaaatgtgggtatgctattgccaacattgatgaaaggatgtttcacaagaagcgcacgattccagaatataacactgtctctttgaacaccggagattctatcacagatacttcagcgctcaaacaaacatcgaaaagcaaatctattctaccgctgttaaagaaacacatgctcacatttccagataaggttagcttcagtgtgccgaagcttgatgtgaagttcagacacctgcatgaaggacttagtgttgacaacaacattacagggatccagtttacttgtgcaaaatccctaccacaagatgattttgaagaagcgacaccacacttcgatgttcaaattgatcttagcgaaattcatttaattagagaaggttctagttctctgttggaagttctgaaagtttttacaatagcttctttggatgtccctgttgacccatttcttccaatcagagctgagattgatgccaagcttggtggtacccaatgcaatattatgttaagcagactgatgccatggatgcggcttcattctttgagaaccaaaggaatgaaactttctaaaagaaactccaatcaagaaatttctcaaaaaaaggagatgaagccaattttgtggacttgcacggtcgctgccccagaaatgactgtcttgctttacagtctaaatggattggtcttgtaccatgcttgttcccagtcatcacatttgtttgcaaataatattgcaagcaaggggattcagatacacacagaacttggtgaattgctggtgcacatggaggaggaatatagagagttattaaaggaaaacatatttggtgtggatacttactctggttccctaatgcatattgctcggatgagccttgattggggatatagggaaagtgatgtccaagatatggttgaaactagcaggaatgcacttgttttttcgattgatataagtgatatggaagtgaaatttggcttcaagcatttggaatcaattgtgcttaatttgatgtcgtttaggactctatttaagagtctccagctatctggcggaagtgctaaagaaaagaatttggagcgtaaaggggagaagaaaatgaaaggtgtgaagaaactgaaattaagcctacaaaaattctctattacatactgtggtgatgcaaacataataagtatgccaattgctgatccaaagcgtgtgaactacggctctcaaggtggtcaagtaattgttagtgtttctgctgatggcacaccacgtagggcaagtataacatcagttttaccagactgccacttgcggttctccgcatctttggtaatatctcatctctctatgtgtatagacaaggagagaaagacaacagaagcggaattggaacgggtgaaggcaatctatgaggaattacctgaggatcgctctggtgtcagagtaactttactagatatgcagaatgctaaaattgttcgccgatccagtggtcatgcggaagttgctgtttgttccctctttagtgctactgatatttatttgagatgggaacctgatgctcatttagcactatatgagacattcatccgctttaagcatttcctacatcataatgtgtcccaaaattctgaaaagatgattaatactgaagttgcaagtaccaaatcaaatgaacatggcaacataactgccggtttcattaattctcagaaatccaacagaaaagggtcaatttttgccattgatgtggacatgttaagggtatctgctgaacttgctgatggtgttgaagcaaacatgcatgtacagtcaatctttactgaaaatgccaagataggtgtactgtctgaaggtctttctcttacttttaatggcgctagagttctaaagagcacccgtatacaaatatcctgtatacctttcagcactgggagtttacttgatgcaaagattgaaccatcatccaaaagagactgggttgttcaaggtctagatgtccatatttgcatgccttacaggttgccattgcgtgccatagaagatgctgttgaagatatgtttcgtgcccttaagcttgtctcatctgccaaaagaagtataatctgtcctgatgaaaaggaaaaatctagaaaggttaattctgggggatccaaatttggatctgtgaaatttgtattgcgtaaattgacagcagatatagaggaagagcccatccaaggttggctcgatgaacattaccatttgatgaggaacaaaatctgtgagctaggtgttaggttgaattatcttgaggaagctatatcaggaagtgtagatccgagcaatcacagctctgagagaaaagttctctacaatggtgttgaagttgacattcatgacaccacagctcttcaaaagttgcaggaagaaatccataagcaagcatttcgatcatattatgtgtcttgtcagaacatggtacttgcagaagggtcaggagcgtgctcagaaggttttcaagctggattcagacaaagctcgcgaagagcttctcttctttcactttctgcttccgatctggatgttactttgaccaggatagatggtggagagctaagagactatacttctcctctgttctcttcactcagtgggaaatgtcaaggccgtattgtgcttgctcagcaggcaacatgttttcaaccccaaatacaccaagagttgtatattggaagatggcaaaaggtcacgatgctacgttctgccagtggtactacgccagcaatgaaaatgtactctaatttacctatttatttccagaagggagagatatcttttggagttggttatgagccatctttcgctgatataagctatgcatttcaagtagccctgcggaaagttaaccttagcactagagcaagctgttctggtctagcagtccaactgcctaaaaaggagcgcagcttaccatggtgggatgacatgagatactacttgcatggaaagataattttatatttcaatgagaccaaatggaagttcctggcaacaactaatccttatgagcatgtggataaactccaaattgtctctgaatacatggagatccagcaaactgatggtcgtgtggatgtttctgcgaaagaattcaagatatacataagcagcgtagagagtattacaaagaaccgccgcataaaagttccatctcgtgtgcccagaccttttatatatgctcctctattctccctaaatgtggttattgattggcagtgcgaatctaggaatccattgaatcattatttgcatgcactccctgttgagggggaacctcggaagaaagtttatgatccatttcgatctacttatctctctcttaggtggaacttctccctcagaccattgcaatcccagtatggtaatggcccaccacctcccttttatggaaataattcaatgctccgtgggatcatgtctggtagtccttgcaaaatgactgatgatgacttccctaccatgaacctgggagctcatgaccttgcttgggttttcaaatggtggagcttgaattacagcccccctcacaaacttcgttccttctctagatggcgtcgttttggaattcctcgggctactagatctggtaacctctcgctggacaaagttttggttgaattctttttccgtgttgatgctactccctgttgcataaggcatgcacctttaagtgaggatgatgaccctgcttttggtttgacgtttaagatgtcaaatttgaagtacgagttatgttacagtcgaggtaaacaacagtacacatttgattgtaaacgtgaatcactggaccttgtttatcgtggtctggatcttcacaggccggaggtttatttgatgcgagataacaatttgtcttcagttgaaaatgtatccaaagtaaggactatggtccaacagtcacatggaaaatttgttcatgacagatgcaacatgggtaatttccaagaaaagcatgaggatggcttcctcttgtcttcagattatatcacgataagaaggcaaacacgtaaagcagatcctgaaagacttatgggatggcaggatactgggaggagtcatgagataacatatgttaggtctgagtttgaggatgacagtgaaagtgaccacactctatctgagcctagcgacgacgacgatgattttaatgtggtgcttgctgacaattgccaaagagtatttgtttatggccttaggattttatggactattgagaatcgagacgcggtttggtcgtgggttggaggaatttccaaagcatttgagcctccaaaaccctctccttcacgacaatatgcacaaagaaagatgattgaagaaaggaatgctgagggctccaaggtgccgcaagattccagctcttccatacatgtgggttctccatcagtgcaacatctggatgcttcgggttcatcttcctcgttgcatagtaaagccaatcgctcctctgatgtggctgtaaatcatgacatttttgatgattcggataaaggagggacagcccaatatatggttaatgttattacaccccaattcaacctacactctgaagaagcaaatggaaggtttctacttgctgcagccagtggtcgtgtactggctcgttcatttcattcagttgttcatcttgggaaagaaatactagaacaagcacttggaacaagcagtgcacagattcttgagttacaacctgaaatgacctggaacaagtcggaactctcggtgatgcttaaagatgttcaagctcatgtagcccccactgatgtggatcctggtgctggtctacagtggctccctaaggttctgggtagctctgagaaattgaagcgcacaggttaaaccactgaaggagctacgctttaactctccagacattactgcaacgatgacctctcgccagtttcaagttatgtttgacgtgcttagaaatcttctattcgcaagacttcccaagcctaggaaaaacagtcttcagtatccatcagatgatgaagatattgaagaagaggctgacgaggtagtacctgatggagttgaagaagtggagcttgcgaaaattacactcgaacagagggaaagggaaattaagttactgcttgatgatataaggtctctcactggaaatggtgataatgggaccgatcactgtcattctgcagaaaaaggtgattgtttatggatgatcaacagcgggaaagcttcattggtggaaggactgaaaagggatttcgcaaacctacaaaagtctagaatatttgcatcatcagcattgaggaaagcactttcaaatgcttcacaatcacatttggagaaagaaaagaacaaaaccacttcttgtgccatgcggatttctatgaaaattagcaaggttgtatggagcatgctcgcagatggaaacacttttgcagaagctgagatcaatgatatggtgtgtgctcagccttgtcccttcacctctgtggctgtctgtagcttcaatcgggttggagagagcgagaggcgtcaaggaggatgaacggcgagggtgtatgattttgatcgggattacaaagatataggcattgccctgtttacaactaaatactttgttgtgcggaattgcatggttaatgcgaaatgtgacaccttattgtctgcctggaacacacctcctggaaaaattaacatgcttcgtgtggatgccaagcaaggtgctcctaaggatggaagttctccacttgagctcttccaggtggagatctacccactgagaatatatctatctgaagcaatgtatagaatgatgtgggattacttcttccctgaagaagacgattcacaacgaagacaggaagtttggagagtttcaacatcaaccgggcctagaagaacaagaaggctctcttctggtgtcgatgctgttacttctagcagctattctgtcagagatcatgaacttcctgggaaatcaagtacaactgtatctacatcaacaaatgtttcaagttggcaaggtatactcagcgataactcacaggtgtcaaagtttcagagtataaaagcaaatatggtatgtggttcgcatcaagagttgcaccggtcgtcttcatttgaaaggaattgggaagaaagcgctgcagaaagtgttgcaagtaatgatgtggtatcactcctgaattcttcaattgtttcttcaaaagtagatgctagcaattctgtcttagagaaccctgttgtgggaagtgagatgtggagaagtaaaacgaaagattctaagcctgccaagtctggacgtctatctcacgaagaaaagaagcttgggaagtctaatgatgaaaagaagacaaaacctcggaagtcaatggaatttcataacatcaagattggcaaggttgaacttcttgttacatacgagggatcaaggcttgctattaatgacctaaggttgcttatggatactttccacaaggcagaatttactggtacatggaggcgactattctctagagtcaaaaaacatatcatctggggagttttgaagtcggtaaccggaatgcaggggaagaagtttagcaaccatagggaaacacttgagggttctattcctgaaaatgatcttaacttgagtgacagtgatgttggtcaacctggaagacatgatcaattaacagcttcatggttgaagaggccaggcgatggtgcaggtgatggatttgtcacgtcaattagggggcttttcaatacacagcgccgtaaagcgaaggcctttgtgattcggacaatgcgcggtgaagggcataatgacgaatatcaagacgaatggagcgagagcgatggtgaatacccttttgcgaggcagcttacaattacaaaggccaagaagctcatacgaaggaagttccgtccaagggtgcaaaagaacccaggtctgtcgatgcaagattcactcccatctagtccgcgggaaacaactccatatcaaagtgactcctccaggtcatcttacgaggacttccatgagcagtaaaacaatctggtgatgctgctttcagcttctacatttggtcgataagatgcagccatttatattggttatagtagggtgtatgtatatagtaggatgtaccatcaaaatccaatgtatcatgtatagtggttaggcaatactccgtaattatgtgcttgtaagttaataagaggccagctcgtactcctagaaaacaaaacccgtgatctatggcatggggcattctcattcccttgtacttcaggactagtatggattgtaaattcaacggtgaaggtgttgcaacatttattcagtaaagtatccttgttgaagaatttgtaaaaactatggcagaaacaatagggaaggagcaagtgactaggtgcctaggtgtattatgattcttttgctgactagttggaagttagaaatgcattgctccacgtcaaaaagaaatgcgtggcagacaaggttgttgcttaacagatcggtgagctatgaaatgctatctgttcacgtgtctagagtcta

SEQ ID NO: 10607 - DNA, 8438 bp, Zea Mays
ggcatctcgtctcgtctccccagtccccaccccgagatcgctcgtcgccgccgccgtctctttactgaacagggattccctcgcggaccgcggcccgaccgcctccccgaagctagggttcgagggaggttatgccggcgctgtcgcaggcacggatccgggcggcgtgacgcggatccgccggacgctggcagggtcggccatggcgtcctccccagtcaagttcttctcggtgttcctggccgtctccgtcgtcggatggatcgtcttcacgtttgcttcaagattgttagcttggttcttgagccgtgtattctctgcttctgtcggatttcgagttgctggtttcaactgtttgagggatgtaacaataaagttctgtaagggttcagttgaatctgtttcgattggtgaaataaaactaagtttccgcaagtctctagtcaaactaagttttggtgttatctcaaaagacccgaagttgcaattgcttataaatgatctcgaaattgtaactagatcatcttctgaaaataaaaagatacgaaagtcagcaaagcctcgctctacaggaaaagggaaatggctggttacatcaagcatggcaagacttttatcagtttccgtgacagatctgataatcaaggtaccgaaaggcgctcttgacatcaaagaactaacggtggatacatttaaaattgctgggcctaatcatactcttggtgtcaagttgcatcttttacctttgaatatactccttggagatttgggattgactactgatccaatgggcagttgtagtctgtttgatgctttccagtctgatcaagcttctgtatctaactcagagaaaagcttggccccatttgtttgtgaagatttgttggttacttgtaaccttggccatgaaaaggagaaaggtattaaaatcattaacctggaattgaaatgtgggtatgctattgccaacattgatgaaaggatgtttcacaagaagcgcacgattccagaatataacactgtctctttgaacaccggagattctatcacagatacttcagcgctcaaacaaacatcgaaaagcaaatctattctaccgctgttaaagaaacacatgctcacatttccagataagcttcagtgtgccgaagcttgatgtgaagttcagacacctgcatgaaggacttagtgttgacaacaacattacagggatccagtttacttgtgcaaaatccctaccacaagatgattttgaagaagcgacaccacacttcgatgttcaaattgatcttagcgaaattcatttaattagagaaggttctagttctctgttggaagttctgaaagtttttacaatagcttctttggatgtccctgttgacccatttcttccaatcagagctgagattgatgccaagcttggtggtacccaatgcaatattatgttaagcagactgatgccatggatgcggcttcattctttgagaaccaaaggaatgaaactttctaaaagaaactccaatcaagaaatttctcaaaaaaaggagatgaagccaattttgtggacttgcacggtcgctgccccagaaatgactgtcttgctttacagtctaaatggattggtcttgtaccatgcttgttcccagtcatcacatttgtttgcaaataatattgcaagcaaggggattcagatacacacagaacttggtgaattgctggtgcacatggaggaggaatatagagagttattaaaggaaaacatatttggtgtggatacttactctggttccctaatgcatattgctcggatgagccttgattggggatatagggaaagtgatgtccaagatatggttgaaactagcaggaatgcacttgttttttcgattgatataagtgatatggaagtgaaatttggcttcaagcatttggaatcaattgtgcttaatttgatgtcgtttaggactctatttaagagtctccagctatctggcggaagtgctaaagaaaagaatttggagcgtaaaggggagaagaaaatgaaaggtgtgaagaaactgaaattaagcctacaaaaattctctattacatactgtggtgatgcaaacataataagtatgccaattgctgatccaaagcgtgtgaactacggctctcaaggtggtcaagtaattgttagtgtttctgctgatggcacaccacgtagggcaagtataacatcagttttaccagactgccacttgcggttctccgcatctttggtaatatctcatctctctatgtgtatagacaaggagagaaagacaacagaagcggaattggaacgggtgaaggcaatctatgaggaattacctgaggatcgctctggtgtcagagtaactttactagatatgcagaatgctaaaattgttcgccgatccagtggtcatgcggaagttgctgtttgttccctctttagtgctactgatatttatttgagatgggaacctgatgctcatttagcactatatgagacattcatccgctttaagcatttcctacatcataatgtgtcccaaaattctgaaaagatgattaatactgaagttgcaagtaccaaatcaaatgaacatggcaacataactgccggtttcattaattctcagaaatccaacagaaaagggtcaatttttgccattgatgtggacatgttaagggtatctgctgaacttgctgatggtgttgaagcaaacatgcatgtacagtcaatctttactgaaaatgccaagataggtgtactgtctgaaggtctttctcttacttttaatggcgctagagttctaaagagcacccgtatacaaatatcctgtatacctttcagcactgggagtttacttgatgcaaagattgaaccatcatccaaaagagactgggttgttcaaggtctagatgtccatatttgcatgccttacaggttgccattgcgtgccatagaagatgctgttgaagatatgtttcgtgcccttaagcttgtctcatctgccaaaagaagtataatctgtcctgatgaaaaggaaaaatctagaaaggttaattctgggggatccaaatttggatctgtgaaatttgtattgcgtaaattgacagcagatatagaggaagagcccatccaaggttggctcgatgaacattaccatttgatgaggaacaaaatctgtgagctaggtgttaggttgaattatcttgaggaagctatatcaggaagtgtagatccgagcaatcacagctctgagagaaaagttctctacaatggtgttgaagttgacattcatgacaccacagctcttcaaaagttgcaggaagaaatccataagcaagcatttcgatcatattatgtgtcttgtcagaacatggtacttgcagaagggtcaggagcgtgctcagaaggttttcaagctggattcagacaaagctcgcgaagagcttctcttctttcactttctgcttccgatctggatgttactttgaccaggatagatggtggagagctaagagactatacttctcctctgttctcttcactcagtgggaaatgtcaaggccgtattgtgcttgctcagcaggcaacatgttttcaaccccaaatacaccaagagttgtatattggaagatggcaaaaggtcacgatgctacgttctgccagtggtactacgccagcaatgaaaatgtactctaatttacctatttatttccagaagggagagatatcttttggagttggttatgagccatctttcgctgatataagctatgcatttcaagtagccctgcggaaagttaaccttagcactagagcaagctgttctggtctagcagtccaactgcctaaaaaggagcgcagcttaccatggtgggatgacatgagatactacttgcatggaaagataattttatatttcaatgagaccaaatggaagttcctggcaacaactaatccttatgagcatgtggataaactccaaattgtctctgaatacatggagatccagcaaactgatggtcgtgtggatgtttctgcgaaagaattcaagatatacataagcagcgtagagagtattacaaagaaccgccgcataaaagttccatctcgtgtgcccagaccttttatatatgctcctctattctccctaaatgtggttattgattggcagtgcgaatctaggaatccattgaatcattatttgcatgcactccctgttgagggggaacctcggaagaaagtttatgatccatttcgatctacttatctctctcttaggtggaacttctccctcagaccattgcaatcccagtatggtaatggcccaccacctcccttttatggaaataattcaatgctccgtgggatcatgtctggtagtccttgcaaaatgactgatgatgacttccctaccatgaacctgggagctcatgaccttgcttgggttttcaaatggtggagcttgaattacagcccccctcacaaacttcgttccttctctagatggcgtcgttttggaattcctcgggctactagatctggtaacctctcgctggacaaagttttggttgaattctttttccgtgttgatgctactccctgttgcataaggcatgcacctttaagtgaggatgatgaccctgcttttggtttgacgtttaagatgtcaaatttgaagtacgagttatgttacagtcgaggtaaacaacagtacacatttgattgtaaacgtgaatcactggaccttgtttatcgtggtctggatcttcacaggccggaggtttatttgatgcgagataacaatttgtcttcagttgaaaatgtatccaaagtaaggactatggtccaacagtcacatggaaaatttgttcatgacagatgcaacatgggtaatttccaagaaaagcatgaggatggcttcctcttgtcttcagattatatcacgataagaaggcaaacacgtaaagcagatcctgaaagacttatgggatggcaggatactgggaggagtcatgagataacatatgttaggtctgagtttgaggatgacagtgaaagtgaccacactctatctgagcctagcgacgacgacgatgattttaatgtggtgcttgctgacaattgccaaagagtatttgtttatggccttaggattttatggactattgagaatcgagacgcggtttggtcgtgggttggaggaatttccaaagcatttgagcctccaaaaccctctccttcacgacaatatgcacaaagaaagatgattgaagaaaggaatgctgagggctccaaggtgccgcaagattccagctcttccatacatgtgggttctccatcagtgcaacatctggatgcttcgggttcatcttcctcgttgcatagtaaagccaatcgctcctctgatgtggctgtaaatcatgacatttttgatgattcggataaaggagggacagcccaatatatggttaatgttattacaccccaattcaacctacactctgaagaagcaaatggaaggtttctacttgctgcagccagtggtcgtgtactggctcgttcatttcattcagttgttcatcttgggaaagaaatactagaacaagcacttggaacaagcagtgcacagattcttgagttacaacctgaaatgacctggaacaagtcggaactctcggtgatgcttaaagatgttcaagctcatgtagcccccactgatgtggatcctggtgctggtctacagtggctccctaaggttctgggtagctctgagaaattgaagcgcacaggtgccttgttagagagagtgtttatgccttgtcaaatgtatttccgttacactagacacaagggtggaactgcagacttgagggttaaaccactgaaggagctacgctttaactctccagacattactgcaacgatgacctctcgccagtttcaagttatgtttgacgtgcttagaaatcttctattcgcaagacttcccaagcctaggaaaaacagtcttcagtatccatcagatgatgaagatattgaagaagaggctgacgaggtagtacctgatggagttgaagaagtggagcttgcgaaaattacactcgaacagagggaaagggaaattaagttactgcttgatgatataaggtctctcactggaaatggtgataatgggaccgatcactgtcattctgcagaaaaaggtgattgtttatggatgatcaacagcgggaaagcttcattggtggaaggactgaaaagggatttcgcaaacctacaaaagtctagaatatttgcatcatcagcattgaggaaagcactttcaaatgcttcacaatcacatttggagaaagaaaagaacaaaaccacttcttgtgccatgcggatttctatgaaaattagcaaggttgtatggagcatgctcgcagatggaaacacttttgcagaagctgagatcaatgatatggtgtatgattttgatcgggattacaaagatataggcattgccctgtttacaactaaatactttgttgtgcggaattgcatggttaatgcgaaatgtgacaccttattgtctgcctggaacacacctcctggaaaaattaacatgcttcgtgtggatgccaagcaaggtgctcctaaggatggaagttctccacttgagctcttccaggtggagatctacccactgagaatatatctatctgaagcaatgtatagaatgatgtgggattacttcttccctgaagaagacgattcacaacgaagacaggaagtttggagagtttcaacatcaaccgggcctagaagaacaagaaggctctcttctggtgtcgatgctgttacttctagcagctattctgtcagagatcatgaacttcctgggaaatcaagtacaactgtatctacatcaacaaatgtttcaagttggcaaggtatactcagcgataactcacaggtgtcaaagtttcagagtataaaagcaaatatggtatgtggttcgcatcaagagttgcaccggtcgtcttcatttgaaaggaattgggaagaaagcgctgcagaaagtgttgcaagtaatgatgtggtatcactcctgaattcttcaattgtttcttcaaaagtagatgctagcaattctgtcttagagaaccctgttgtgggaagtgagatgtggagaagtaaaacgaaagattctaagcctgccaagtctggacgtctatctcacgaagaaaagaagcttgggaagtctaatgatgaaaagaagacaaaacctcggaagtcaatggaatttcataacatcaagattggcaaggttgaacttcttgttacatacgagggatcaaggcttgctattaatgacctaaggttgcttatggatactttccacaaggcagaatttactggtacatggaggcgactattctctagagtcaaaaaagggaagaagtttagcaaccatagggaaacacttgagggttctattcctgaaaatgatcttaacttgagtgacagtgatgttggtcaacctggaagacatgatcaattaacagcttcatggttgaagaggccaggcgatggtgcaggtgatggatttgtcacgtcaattagggggcttttcaatacacagcgccgtaaagcgaaggcctttgtgattcggacaatgcgcggtgaagggcataatgacgaatatcaagacgaatggagcgagagcgatggtgaatacccttttgcgaggcagcttacaattacaaaggccaagaagctcatacgaaggaagttccgtccaagggtgcaaaagaacccaggtctgtcgatgcaagattcactcccatctagtccgcgggaaacaactccatatcaaagtgactcctccaggtcatcttacgaggacttccatgagcagtaaaacaatctggtgatgctgctttcagcttctacatttggtcgataagatgcagccatttatattggttatagtagggtgtatgtatatagtaggatgtaccatcaaaatccaatgtatcatgtatagtggttaggcaatactccgtaattatgtgcttgtaagttaataagaggccagctcgtactcctagaaaacaaaacccgtgatctatggcatggggcattctcattcccttgtacttcaggactagtatggattgtaaattcaacggtgaaggtgttgcaacatttattcagtaaagtatccttgttgaagaatttgtaaaaactatggcagaaacaatagggaaggagcaagtgactaggtgcctaggtgtattatgattcttttgctgactagttggaagttagaaatgcattgctccacgtcaaaaagaaatgcgtggcagacaaggttgttgcttaacagatcggtgagctatgaaatgctatctgttcacgtgtctagagtcta

SEQ ID NO: 10608 - DNA, 8300 bp, Zea Mays
ctctctgctctagttgctactcctgctgctacagtgctgcccctctcgctctgacttgtgaaaagtcctgaggatacaaggtttgcttcaagattgttagcttggttcttgagccgtgtattctctgcttctgtcggatttcgagttgctggtttcaactgtttgagggatgtaacaataaagttctgtaagggttcagttgaatctgtttcgattggtgaaataaaactaagtttccgcaagtctctagtcaaactaagttttggtgttatctcaaaagacccgaagttgcaattgcttataaatgatctcgaaattgtaactagatcatcttctgaaaataaaaagatacgaaagtcagcaaagcctcgctctacaggaaaagggaaatggctggttacatcaagcatggcaagacttttatcagtttccgtgacagatctgataatcaaggtaccgaaaggcgctcttgacatcaaagaactaacggtggatacatttaaaattgctgggcctaatcatactcttggtgtcaagttgcatcttttacctttgaatatactccttggagatttgggattgactactgatccaatgggcagttgtagtctgtttgatgctttccagtctgatcaagcttctgtatctaactcagagaaaagcttggccccatttgtttgtgaagatttgttggttacttgtaaccttggccatgaaaaggagaaaggtattaaaatcattaacctggaattgaaatgtgggtatgctattgccaacattgatgaaaggatgtttcacaagaagcgcacgattccagaatataacactgtctctttgaacaccggagattctatcacagatacttcagcgctcaaacaaacatcgaaaagcaaatctattctaccgctgttaaagaaacacatgctcacatttccagataagcttcagtgtgccgaagcttgatgtgaagttcagacacctgcatgaaggacttagtgttgacaacaacattacagggatccagtttacttgtgcaaaatccctaccacaagatgattttgaagaagcgacaccacacttcgatgttcaaattgatcttagcgaaattcatttaattagagaaggttctagttctctgttggaagttctgaaagtttttacaatagcttctttggatgtccctgttgacccatttcttccaatcagagctgagattgatgccaagcttggtggtacccaatgcaatattatgttaagcagactgatgccatggatgcggcttcattctttgagaaccaaaggaatgaaactttctaaaagaaactccaatcaagaaatttctcaaaaaaaggagatgaagccaattttgtggacttgcacggtcgctgccccagaaatgactgtcttgctttacagtctaaatggattggtcttgtaccatgcttgttcccagtcatcacatttgtttgcaaataatattgcaagcaaggggattcagatacacacagaacttggtgaattgctggtgcacatggaggaggaatatagagagttattaaaggaaaacatatttggtgtggatacttactctggttccctaatgcatattgctcggatgagccttgattggggatatagggaaagtgatgtccaagatatggttgaaactagcaggaatgcacttgttttttcgattgatataagtgatatggaagtgaaatttggcttcaagcatttggaatcaattgtgcttaatttgatgtcgtttaggactctatttaagagtctccagctatctggcggaagtgctaaagaaaagaatttggagcgtaaaggggagaagaaaatgaaaggtgtgaagaaactgaaattaagcctacaaaaattctctattacatactgtggtgatgcaaacataataagtatgccaattgctgatccaaagcgtgtgaactacggctctcaaggtggtcaagtaattgttagtgtttctgctgatggcacaccacgtagggcaagtataacatcagttttaccagactgccacttgcggttctccgcatctttggtaatatctcatctctctatgtgtatagacaaggagagaaagacaacagaagcggaattggaacgggtgaaggcaatctatgaggaattacctgaggatcgctctggtgtcagagtaactttactagatatgcagaatgctaaaattgttcgccgatccagtggtcatgcggaagttgctgtttgttccctctttagtgctactgatatttatttgagatgggaacctgatgctcatttagcactatatgagacattcatccgctttaagcatttcctacatcataatgtgtcccaaaattctgaaaagatgattaatactgaagttgcaagtaccaaatcaaatgaacatggcaacataactgccggtttcattaattctcagaaatccaacagaaaagggtcaatttttgccattgatgtggacatgttaagggtatctgctgaacttgctgatggtgttgaagcaaacatgcatgtacagtcaatctttactgaaaatgccaagataggtgtactgtctgaaggtctttctcttacttttaatggcgctagagttctaaagagcacccgtatacaaatatcctgtatacctttcagcactgggagtttacttgatgcaaagattgaaccatcatccaaaagagactgggttgttcaaggtctagatgtccatatttgcatgccttacaggttgccattgcgtgccatagaagatgctgttgaagatatgtttcgtgcccttaagcttgtctcatctgccaaaagaagtataatctgtcctgatgaaaaggaaaaatctagaaaggttaattctgggggatccaaatttggatctgtgaaatttgtattgcgtaaattgacagcagatatagaggaagagcccatccaaggttggctcgatgaacattaccatttgatgaggaacaaaatctgtgagctaggtgttaggttgaattatcttgaggaagctatatcaggaagtgtagatccgagcaatcacagctctgagagaaaagttctctacaatggtgttgaagttgacattcatgacaccacagctcttcaaaagttgcaggaagaaatccataagcaagcatttcgatcatattatgtgtcttgtcagaacatggtacttgcagaagggtcaggagcgtgctcagaaggttttcaagctggattcagacaaagctcgcgaagagcttctcttctttcactttctgcttccgatctggatgttactttgaccaggatagatggtggagagctaagagactatacttctcctctgttctcttcactcagtgggaaatgtcaaggccgtattgtgcttgctcagcaggcaacatgttttcaaccccaaatacaccaagagttgtatattggaagatggcaaaaggtcacgatgctacgttctgccagtggtactacgccagcaatgaaaatgtactctaatttacctatttatttccagaagggagagatatcttttggagttggttatgagccatctttcgctgatataagctatgcatttcaagtagccctgcggaaagttaaccttagcactagagcaagctgttctggtctagcagtccaactgcctaaaaaggagcgcagcttaccatggtgggatgacatgagatactacttgcatggaaagataattttatatttcaatgagaccaaatggaagttcctggcaacaactaatccttatgagcatgtggataaactccaaattgtctctgaatacatggagatccagcaaactgatggtcgtgtggatgtttctgcgaaagaattcaagatatacataagcagcgtagagagtattacaaagaaccgccgcataaaagttccatctcgtgtgcccagaccttttatatatgctcctctattctccctaaatgtggttattgattggcagtgcgaatctaggaatccattgaatcattatttgcatgcactccctgttgagggggaacctcggaagaaagtttatgatccatttcgatctacttatctctctcttaggtggaacttctccctcagaccattgcaatcccagtatggtaatggcccaccacctcccttttatggaaataattcaatgctccgtgggatcatgtctggtagtccttgcaaaatgactgatgatgacttccctaccatgaacctgggagctcatgaccttgcttgggttttcaaatggtggagcttgaattacagcccccctcacaaacttcgttccttctctagatggcgtcgttttggaattcctcgggctactagatctggtaacctctcgctggacaaagttttggttgaattctttttccgtgttgatgctactccctgttgcataaggcatgcacctttaagtgaggatgatgaccctgcttttggtttgacgtttaagatgtcaaatttgaagtacgagttatgttacagtcgaggtaaacaacagtacacatttgattgtaaacgtgaatcactggaccttgtttatcgtggtctggatcttcacaggccggaggtttatttgatgcgagataacaatttgtcttcagttgaaaatgtatccaaagtaaggactatggtccaacagtcacatggaaaatttgttcatgacagatgcaacatgggtaatttccaagaaaagcatgaggatggcttcctcttgtcttcagattatatcacgataagaaggcaaacacgtaaagcagatcctgaaagacttatgggatggcaggatactgggaggagtcatgagataacatatgttaggtctgagtttgaggatgacagtgaaagtgaccacactctatctgagcctagcgacgacgacgatgattttaatgtggtgcttgctgacaattgccaaagagtatttgtttatggccttaggattttatggactattgagaatcgagacgcggtttggtcgtgggttggaggaatttccaaagcatttgagcctccaaaaccctctccttcacgacaatatgcacaaagaaagatgattgaagaaaggaatgctgagggctccaaggtgccgcaagattccagctcttccatacatgtgggttctccatcagtgcaacatctggatgcttcgggttcatcttcctcgttgcatagtaaagccaatcgctcctctgatgtggctgtaaatcatgacatttttgatgattcggataaaggagggacagcccaatatatggttaatgttattacaccccaattcaacctacactctgaagaagcaaatggaaggtttctacttgctgcagccagtggtcgtgtactggctcgttcatttcattcagttgttcatcttgggaaagaaatactagaacaagcacttggaacaagcagtgcacagattcttgagttacaacctgaaatgacctggaacaagtcggaactctcggtgatgcttaaagatgttcaagctcatgtagcccccactgatgtggatcctggtgctggtctacagtggctccctaaggttctgggtagctctgagaaattgaagcgcacaggttaaaccactgaaggagctacgctttaactctccagacattactgcaacgatgacctctcgccagtttcaagttatgtttgacgtgcttagaaatcttctattcgcaagacttcccaagcctaggaaaaacagtcttcagtatccatcagatgatgaagatattgaagaagaggctgacgaggtagtacctgatggagttgaagaagtggagcttgcgaaaattacactcgaacagagggaaagggaaattaagttactgcttgatgatataaggtctctcactggaaatggtgataatgggaccgatcactgtcattctgcagaaaaaggtgattgtttatggatgatcaacagcgggaaagcttcattggtggaaggactgaaaagggatttcgcaaacctacaaaagtctagaatatttgcatcatcagcattgaggaaagcactttcaaatgcttcacaatcacatttggagaaagaaaagaacaaaaccacttcttgtgccatgcggatttctatgaaaattagcaaggttgtatggagcatgctcgcagatggaaacacttttgcagaagctgagatcaatgatatggtgtgtgctcagccttgtcccttcacctctgtggctgtctgtagcttcaatcgggttggagagagcgagaggcgtcaaggaggatgaacggcgagggtgtatgattttgatcgggattacaaagatataggcattgccctgtttacaactaaatactttgttgtgcggaattgcatggttaatgcgaaatgtgacaccttattgtctgcctggaacacacctcctggaaaaattaacatgcttcgtgtggatgccaagcaaggtgctcctaaggatggaagttctccacttgagctcttccaggtggagatctacccactgagaatatatctatctgaagcaatgtatagaatgatgtgggattacttcttccctgaagaagacgattcacaacgaagacaggaagtttggagagtttcaacatcaaccgggcctagaagaacaagaaggctctcttctggtgtcgatgctgttacttctagcagctattctgtcagagatcatgaacttcctgggaaatcaagtacaactgtatctacatcaacaaatgtttcaagttggcaaggtatactcagcgataactcacaggtgtcaaagtttcagagtataaaagcaaatatggtatgtggttcgcatcaagagttgcaccggtcgtcttcatttgaaaggaattgggaagaaagcgctgcagaaagtgttgcaagtaatgatgtggtatcactcctgaattcttcaattgtttcttcaaaagtagatgctagcaattctgtcttagagaaccctgttgtgggaagtgagatgtggagaagtaaaacgaaagattctaagcctgccaagtctggacgtctatctcacgaagaaaagaagcttgggaagtctaatgatgaaaagaagacaaaacctcggaagtcaatggaatttcataacatcaagattggcaaggttgaacttcttgttacatacgagggatcaaggcttgctattaatgacctaaggttgcttatggatactttccacaaggcagaatttactggtacatggaggcgactattctctagagtcaaaaaacatatcatctggggagttttgaagtcggtaaccggaatgcaggggaagaagtttagcaaccatagggaaacacttgagggttctattcctgaaaatgatcttaacttgagtgacagtgatgttggtcaacctggaagacatgatcaattaacagcttcatggttgaagaggccaggcgatggtgcaggtgatggatttgtcacgtcaattagggggcttttcaatacacagcgccgtaaagcgaaggcctttgtgattcggacaatgcgcggtgaagggcataatgacgaatatcaagacgaatggagcgagagcgatggtgaatacccttttgcgaggcagcttacaattacaaaggccaagaagctcatacgaaggaagttccgtccaagggtgcaaaagaacccaggtctgtcgatgcaagattcactcccatctagtccgcgggaaacaactccatatcaaagtgactcctccaggtcatcttacgaggacttccatgagcagtaaaacaatctggtgatgctgctttcagcttctacatttggtcgataagatgcagccatttatattggttatagtagggtgtatgtatatagtaggatgtaccatcaaaatccaatgtatcatgtatagtggttaggcaatactccgtaattatgtgcttgtaagttaataagaggccagctcgtactcctagaaaacaaaacccgtgatctatggcatggggcattctcattcccttgtacttcaggactagtatggattgtaaattcaacggtgaaggtgttgcaacatttattcagtaaagtatccttgttgaagaatttgtaaaaactatggcagaaacaatagggaaggagcaagtgactaggtgcctaggtgtattatgattcttttgctgactagttggaagttagaaatgcattgctccacgtcaaaaagaaatgcgtggcagacaaggttgttgcttaacagatcggtgagctatgaaatgctatctgttcacgtgtctagagtcta

SEQ ID NO: 10609 - DNA, 8565 bp, Zea Mays
cgcctctctgctctagttgctactcctgctgctacagtgctgcccctctcgctctgacttgtgaaaagtcctgaggatacaaggtagtaagcggcatctcgtctcgtctccccagtccccaccccgagatcgctcgtcgccgccgccgtctctttactgaacagggattccctcgcggaccgcggcccgaccgcctccccgaagctagggttcgagggaggttatgccggcgctgtcgcaggcacggatccgggcggcgtgacgcggatccgccggacgctggcagggtcggccatggcgtcctccccagtcaagttcttctcggtgttcctggccgtctccgtcgtcggatggatcgtcttcacgtttgcttcaagattgttagcttggttcttgagccgtgtattctctgcttctgtcggatttcgagttgctggtttcaactgtttgagggatgtaacaataaagttctgtaagttgaatctgtttcgattggtgaaataaaactaagtttccgcaagtctctagtcaaactaagttttggtgttatctcaaaagacccgaagttgcaattgcttataaatgatctcgaaattgtaactagatcatcttctgaaaataaaaagatacgaaagtcagcaaagcctcgctctacaggaaaagggaaatggctggttacatcaagcatggcaagacttttatcagtttccgtgacagatctgataatcaaggtaccgaaaggcgctcttgacatcaaagaactaacggtggatacatttaaaattgctgggcctaatcatactcttggtgtcaagttgcatcttttacctttgaatatactccttggagatttgggattgactactgatccaatgggcagttgtagtctgtttgatgctttccagtctgatcaagcttctgtatctaactcagagaaaagcttggccccatttgtttgtgaagatttgttggttacttgtaaccttggccatgaaaaggagaaaggtattaaaatcattaacctggaattgaaatgtgggtatgctattgccaacattgatgaaaggatgtttcacaagaagcgcacgattccagaatataacactgtctctttgaacaccggagattctatcacagatacttcagcgctcaaacaaacatcgaaaagcaaatctattctaccgctgttaaagaaacacatgctcacatttccagataagcttcagtgtgccgaagcttgatgtgaagttcagacacctgcatgaaggacttagtgttgacaacaacattacagggatccagtttacttgtgcaaaatccctaccacaagatgattttgaagaagcgacaccacacttcgatgttcaaattgatcttagcgaaattcatttaattagagaaggttctagttctctgttggaagttctgaaagtttttacaatagcttctttggatgtccctgttgacccatttcttccaatcagagctgagattgatgccaagcttggtggtacccaatgcaatattatgttaagcagactgatgccatggatgcggcttcattctttgagaaccaaaggaatgaaactttctaaaagaaactccaatcaagaaatttctcaaaaaaaggagatgaagccaattttgtggacttgcacggtcgctgccccagaaatgactgtcttgctttacagtctaaatggattggtcttgtaccatgcttgttcccagtcatcacatttgtttgcaaataatattgcaagcaaggggattcagatacacacagaacttggtgaattgctggtgcacatggaggaggaatatagagagttattaaaggaaaacatatttggtgtggatacttactctggttccctaatgcatattgctcggatgagccttgattggggatatagggaaagtgatgtccaagatatggttgaaactagcaggaatgcacttgttttttcgattgatataagtgatatggaagtgaaatttggcttcaagcatttggaatcaattgtgcttaatttgatgtcgtttaggactctatttaagagtctccagctatctggcggaagtgctaaagaaaagaatttggagcgtaaaggggagaagaaaatgaaaggtgtgaagaaactgaaattaagcctacaaaaattctctattacatactgtggtgatgcaaacataataagtatgccaattgctgatccaaagcgtgtgaactacggctctcaaggtggtcaagtaattgttagtgtttctgctgatggcacaccacgtagggcaagtataacatcagttttaccagactgccacttgcggttctccgcatctttggtaatatctcatctctctatgtgtatagacaaggagagaaagacaacagaagcggaattggaacgggtgaaggcaatctatgaggaattacctgaggatcgctctggtgtcagagtaactttactagatatgcagaatgctaaaattgttcgccgatccagtggtcatgcggaagttgctgtttgttccctctttagtgctactgatatttatttgagatgggaacctgatgctcatttagcactatatgagacattcatccgctttaagcatttcctacatcataatgtgtcccaaaattctgaaaagatgattaatactgaagttgcaagtaccaaatcaaatgaacatggcaacataactgccggtttcattaattctcagaaatccaacagaaaagggtcaatttttgccattgatgtggacatgttaagggtatctgctgaacttgctgatggtgttgaagcaaacatgcatgtacagtcaatctttactgaaaatgccaagataggtgtactgtctgaaggtctttctcttacttttaatggcgctagagttctaaagagcacccgtatacaaatatcctgtatacctttcagcactgggagtttacttgatgcaaagattgaaccatcatccaaaagagactgggttgttcaaggtctagatgtccatatttgcatgccttacaggttgccattgcgtgccatagaagatgctgttgaagatatgtttcgtgcccttaagcttgtctcatctgccaaaagaagtataatctgtcctgatgaaaaggaaaaatctagaaaggttaattctgggggatccaaatttggatctgtgaaatttgtattgcgtaaattgacagcagatatagaggaagagcccatccaaggttggctcgatgaacattaccatttgatgaggaacaaaatctgtgagctaggtgttaggttgaattatcttgaggaagctatatcaggaagtgtagatccgagcaatcacagctctgagagaaaagttctctacaatggtgttgaagttgacattcatgacaccacagctcttcaaaagttgcaggaagaaatccataagcaagcatttcgatcatattatgtgtcttgtcagaacatggtacttgcagaagggtcaggagcgtgctcagaaggttttcaagctggattcagacaaagctcgcgaagagcttctcttctttcactttctgcttccgatctggatgttactttgaccaggatagatggtggagagctaagagactatacttctcctctgttctcttcactcagtgggaaatgtcaaggccgtattgtgcttgctcagcaggcaacatgttttcaaccccaaatacaccaagagttgtatattggaagatggcaaaaggtcacgatgctacgttctgccagtggtactacgccagcaatgaaaatgtactctaatttacctatttatttccagaagggagagatatcttttggagttggttatgagccatctttcgctgatataagctatgcatttcaagtagccctgcggaaagttaaccttagcactagagcaagctgttctggtctagcagtccaactgcctaaaaaggagcgcagcttaccatggtgggatgacatgagatactacttgcatggaaagataattttatatttcaatgagaccaaatggaagttcctggcaacaactaatccttatgagcatgtggataaactccaaattgtctctgaatacatggagatccagcaaactgatggtcgtgtggatgtttctgcgaaagaattcaagatatacataagcagcgtagagagtattacaaagaaccgccgcataaaagttccatctcgtgtgcccagaccttttatatatgctcctctattctccctaaatgtggttattgattggcagtgcgaatctaggaatccattgaatcattatttgcatgcactccctgttgagggggaacctcggaagaaagtttatgatccatttcgatctacttatctctctcttaggtggaacttctccctcagaccattgcaatcccagtatggtaatggcccaccacctcccttttatggaaataattcaatgctccgtgggatcatgtctggtagtccttgcaaaatgactgatgatgacttccctaccatgaacctgggagctcatgaccttgcttgggttttcaaatggtggagcttgaattacagcccccctcacaaacttcgttccttctctagatggcgtcgttttggaattcctcgggctactagatctggtaacctctcgctggacaaagttttggttgaattctttttccgtgttgatgctactccctgttgcataaggcatgcacctttaagtgaggatgatgaccctgcttttggtttgacgtttaagatgtcaaatttgaagtacgagttatgttacagtcgaggtaaacaacagtacacatttgattgtaaacgtgaatcactggaccttgtttatcgtggtctggatcttcacaggccggaggtttatttgatgcgagataacaatttgtcttcagttgaaaatgtatccaaagtaaggactatggtccaacagtcacatggaaaatttgttcatgacagatgcaacatgggtaatttccaagaaaagcatgaggatggcttcctcttgtcttcagattatatcacgataagaaggcaaacacgtaaagcagatcctgaaagacttatgggatggcaggatactgggaggagtcatgagataacatatgttaggtctgagtttgaggatgacagtgaaagtgaccacactctatctgagcctagcgacgacgacgatgattttaatgtggtgcttgctgacaattgccaaagagtatttgtttatggccttaggattttatggactattgagaatcgagacgcggtttggtcgtgggttggaggaatttccaaagcatttgagcctccaaaaccctctccttcacgacaatatgcacaaagaaagatgattgaagaaaggaatgctgagggctccaaggtgccgcaagattccagctcttccatacatgtgggttctccatcagtgcaacatctggatgcttcgggttcatcttcctcgttgcatagtaaagccaatcgctcctctgatgtggctgtaaatcatgacatttttgatgattcggataaaggagggacagcccaatatatggttaatgttattacaccccaattcaacctacactctgaagaagcaaatggaaggtttctacttgctgcagccagtggtcgtgtactggctcgttcatttcattcagttgttcatcttgggaaagaaatactagaacaagcacttggaacaagcagtgcacagattcttgagttacaacctgaaatgacctggaacaagtcggaactctcggtgatgcttaaagatgttcaagctcatgtagcccccactgatgtggatcctggtgctggtctacagtggctccctaaggttctgggtagctctgagaaattgaagcgcacaggtgccttgttagagagagtgtttatgccttgtcaaatgtatttccgttacactagacacaagggtggaactgcagacttgagggttaaaccactgaaggagctacgctttaactctccagacattactgcaacgatgacctctcgccagtttcaagttatgtttgacgtgcttagaaatcttctattcgcaagacttcccaagcctaggaaaaacagtcttcagtatccatcagatgatgaagatattgaagaagaggctgacgaggtagtacctgatggagttgaagaagtggagcttgcgaaaattacactcgaacagagggaaagggaaattaagttactgcttgatgatataaggtctctcactggaaatggtgataatgggaccgatcactgtcattctgcagaaaaaggtgattgtttatggatgatcaacagcgggaaagcttcattggtggaaggactgaaaagggatttcgcaaacctacaaaagtctagaatatttgcatcatcagcattgaggaaagcactttcaaatgcttcacaatcacatttggagaaagaaaagaacaaaaccacttcttgtgccatgcggatttctatgaaaattagcaaggttgtatggagcatgctcgcagatggaaacacttttgcagaagctgagatcaatgatatggtgtatgattttgatcgggattacaaagatataggcattgccctgtttacaactaaatactttgttgtgcggaattgcatggttaatgcgaaatgtgacaccttattgtctgcctggaacacacctcctggaaaaattaacatgcttcgtgtggatgccaagcaaggtgctcctaaggatggaagttctccacttgagctcttccaggtggagatctacccactgagaatatatctatctgaagcaatgtatagaatgatgtgggattacttcttccctgaagaagacgattcacaacgaagacaggaagtttggagagtttcaacatcaaccgggcctagaagaacaagaaggctctcttctggtgtcgatgctgttacttctagcagctattctgtcagagatcatgaacttcctgggaaatcaagtacaactgtatctacatcaacaaatgtttcaagttggcaaggtatactcagcgataactcacaggtgtcaaagtttcagagtataaaagcaaatatggtatgtggttcgcatcaagagttgcaccggtcgtcttcatttgaaaggaattgggaagaaagcgctgcagaaagtgttgcaagtaatgatgtggtatcactcctgaattcttcaattgtttcttcaaaagtagatgctagcaattctgtcttagagaaccctgttgtgggaagtgagatgtggagaagtaaaacgaaagattctaagcctgccaagtctggacgtctatctcacgaagaaaagaagcttgggaagtctaatgatgaaaagaagacaaaacctcggaagtcaatggaatttcataacatcaagattggcaaggttgaacttcttgttacatacgagggatcaaggcttgctattaatgacctaaggttgcttatggatactttccacaaggcagaatttactggtacatggaggcgactattctctagagtcaaaaaacatatcatctggggagttttgaagtcggtaaccggaatgcaggggaagaagtttagcaaccatagggaaacacttgagggttctattcctgaaaatgatcttaacttgagtgacagtgatgttggtcaacctggaagacatgatcaattaacagcttcatggttgaagaggccaggcgatggtgcaggtgatggatttgtcacgtcaattagggggcttttcaatacacagcgccgtaaagcgaaggcctttgtgattcggacaatgcgcggtgaagggcataatgacgaatatcaagacgaatggagcgagagcgatggtgaatacccttttgcgaggcagcttacaattacaaaggccaagaagctcatacgaaggaagttccgtccaagggtgcaaaagaacccaggtctgtcgatgcaagattcactcccatctagtccgcgggaaacaactccatatcaaagtgactcctccaggtcatcttacgaggacttccatgagcagtaaaacaatctggtgatgctgctttcagcttctacatttggtcgataagatgcagccatttatattggttatagtagggtgtatgtatatagtaggatgtaccatcaaaatccaatgtatcatgtatagtggttaggcaatactccgtaattatgtgcttgtaagttaataagaggccagctcgtactcctagaaaacaaaacccgtgatctatggcatggggcattctcattcccttgtacttcaggactagtatggattgtaaattcaacggtgaaggtgttgcaacatttattcagtaaagtatccttgttgaagaatttgtaaaaactatggcagaaacaatagggaaggagcaagtgactaggtgcctaggtgtattatgattcttttgctgactagttggaagttagaaatgcattgctccacgtcaaaaagaaatgcgtggcagacaaggttgttgcttaacagatcggtgagctatgaaatgctatctgttcacgtgtctagagtcta

SEQ ID NO: 10610 - DNA, 8692 bp, Zea Mays
ctgatcgcctctctgctctagttgctactcctgctgctacagtgctgcccctctcgctctgacttgtgaaaagtcctgaggatacaaggtagtaagcggcatctcgtctcgtctccccagtccccaccccgagatcgctcgtcgccgccgccgtctctttactgaacagggattccctcgcggaccgcggcccgaccgcctccccgaagctagggttcgagggaggttatgccggcgctgtcgcaggcacggatccgggcggcgtgacgcggatccgccggacgctggcagggtcggccatggcgtcctccccagtcaagttcttctcggtgttcctggccgtctccgtcgtcggatggatcgtcttcacgtttgcttcaagattgttagcttggttcttgagccgtgtattctctgcttctgtcggatttcgagttgctggtttcaactgtttgagggatgtaacaataaagttctgtaagggttcagttgaatctgtttcgattggtgaaataaaactaagtttccgcaagtctctagtcaaactaagttttggtgttatctcaaaagacccgaagttgcaattgcttataaatgatctcgaaattgtaactagatcatcttctgaaaataaaaagatacgaaagtcagcaaagcctcgctctacaggaaaagggaaatggctggttacatcaagcatggcaagacttttatcagtttccgtgacagatctgataatcaaggtaccgaaaggcgctcttgacatcaaagaactaacggtggatacatttaaaattgctgggcctaatcatactcttggtgtcaagttgcatcttttacctttgaatatactccttggagatttgggattgactactgatccaatgggcagttgtagtctgtttgatgctttccagtctgatcaagcttctgtatctaactcagagaaaagcttggccccatttgtttgtgaagatttgttggttacttgtaaccttggccatgaaaaggagaaaggtattaaaatcattaacctggaattgaaatgtgggtatgctattgccaacattgatgaaaggatgtttcacaagaagcgcacgattccagaatataacactgtctctttgaacaccggagattctatcacagatacttcagcgctcaaacaaacatcgaaaagcaaatctattctaccgctgttaaagaaacacatgctcacatttccagataaggttagcttcagtgtgccgaagcttgatgtgaagttcagacacctgcatgaaggacttagtgttgacaacaacattacagggatccagtttacttgtgcaaaatccctaccacaagatgattttgaagaagcgacaccacacttcgatgttcaaattgatcttagcgaaattcatttaattagagaaggttctagttctctgttggaagttctgaaagtttttacaatagcttctttggatgtccctgttgacccatttcttccaatcagagctgagattgatgccaagcttggtggtacccaatgcaatattatgttaagcagactgatgccatggatgcggcttcattctttgagaaccaaaggaatgaaactttctaaaagaaactccaatcaagaaatttctcaaaaaaaggagatgaagccaattttgtggacttgcacggtcgctgccccagaaatgactgtcttgctttacagtctaaatggattggtcttgtaccatgcttgttcccagtcatcacatttgtttgcaaataatattgcaagcaaggggattcagatacacacagaacttggtgaattgctggtgcacatggaggaggaatatagagagttattaaaggaaaacatatttggtgtggatacttactctggttccctaatgcatattgctcggatgagccttgattggggatatagggaaagtgatgtccaagatatggttgaaactagcaggaatgcacttgttttttcgattgatataagtgatatggaagtgaaatttggcttcaagcatttggaatcaattgtgcttaatttgatgtcgtttaggactctatttaagagtctccagctatctggcggaagtgctaaagaaaagaatttggagcgtaaaggggagaagaaaatgaaaggtgtgaagaaactgaaattaagcctacaaaaattctctattacatactgtggtgatgcaaacataataagtatgccaattgctgatccaaagcgtgtgaactacggctctcaaggtggtcaagtaattgttagtgtttctgctgatggcacaccacgtagggcaagtataacatcagttttaccagactgccacttgcggttctccgcatctttggtaatatctcatctctctatgtgtatagacaaggagagaaagacaacagaagcggaattggaacgggtgaaggcaatctatgaggaattacctgaggatcgctctggtgtcagagtaactttactagatatgcagaatgctaaaattgttcgccgatccagtggtcatgcggaagttgctgtttgttccctctttagtgctactgatatttatttgagatgggaacctgatgctcatttagcactatatgagacattcatccgctttaagcatttcctacatcataatgtgtcccaaaattctgaaaagatgattaatactgaagttgcaagtaccaaatcaaatgaacatggcaacataactgccggtttcattaattctcagaaatccaacagaaaagggtcaatttttgccattgatgtggacatgttaagggtatctgctgaacttgctgatggtgttgaagcaaacatgcatgtacagtcaatctttactgaaaatgccaagataggtgtactgtctgaaggtctttctcttacttttaatggcgctagagttctaaagagcacccgtatacaaatatcctgtatacctttcagcactgggagtttacttgatgcaaagattgaaccatcatccaaaagagactgggttgttcaaggtctagatgtccatatttgcatgccttacaggttgccattgcgtgccatagaagatgctgttgaagatatgtttcgtgcccttaagcttgtctcatctgccaaaagaagtataatctgtcctgatgaaaaggaaaaatctagaaaggttaattctgggggatccaaatttggatctgtgaaatttgtattgcgtaaattgacagcagatatagaggaagagcccatccaaggttggctcgatgaacattaccatttgatgaggaacaaaatctgtgagctaggtgttaggttgaattatcttgaggaagctatatcaggaagtgtagatccgagcaatcacagctctgagagaaaagttctctacaatggtgttgaagttgacattcatgacaccacagctcttcaaaagttgcaggaagaaatccataagcaagcatttcgatcatattatgtgtcttgtcagaacatggtacttgcagaagggtcaggagcgtgctcagaaggttttcaagctggattcagacaaagctcgcgaagagcttctcttctttcactttctgcttccgatctggatgttactttgaccaggatagatggtggagagatagaaatggttgaatttataaaggggcttgaccctgtctgtcaggagcaaaacataccattttctcggttgtatggtagtgatgtttctgtcgttgctgggtccttggttgtacagctaagagactatacttctcctctgttctcttcactcagtgggaaatgtcaaggccgtattgtgcttgctcagcaggcaacatgttttcaaccccaaatacaccaagagttgtatattggaagatggcaaaaggtcacgatgctacgttctgccagtggtactacgccagcaatgaaaatgtactctaatttacctatttatttccagaagggagagatatcttttggagttggttatgagccatctttcgctgatataagctatgcatttcaagtagccctgcggaaagttaaccttagcactagagcaagctgttctggtctagcagtccaactgcctaaaaaggagcgcagcttaccatggtgggatgacatgagatactacttgcatggaaagataattttatatttcaatgagaccaaatggaagttcctggcaacaactaatccttatgagcatgtggataaactccaaattgtctctgaatacatggagatccagcaaactgatggtcgtgtggatgtttctgcgaaagaattcaagatatacataagcagcgtagagagtattacaaagaaccgccgcataaaagttccatctcgtgtgcccagaccttttatatatgctcctctattctccctaaatgtggttattgattggcagtgcgaatctaggaatccattgaatcattatttgcatgcactccctgttgagggggaacctcggaagaaagtttatgatccatttcgatctacttatctctctcttaggtggaacttctccctcagaccattgcaatcccagtatggtaatggcccaccacctcccttttatggaaataattcaatgctccgtgggatcatgtctggtagtccttgcaaaatgactgatgatgacttccctaccatgaacctgggagctcatgaccttgcttgggttttcaaatggtggagcttgaattacagcccccctcacaaacttcgttccttctctagatggcgtcgttttggaattcctcgggctactagatctggtaacctctcgctggacaaagttttggttgaattctttttccgtgttgatgctactccctgttgcataaggcatgcacctttaagtgaggatgatgaccctgcttttggtttgacgtttaagatgtcaaatttgaagtacgagttatgttacagtcgaggtaaacaacagtacacatttgattgtaaacgtgaatcactggaccttgtttatcgtggtctggatcttcacaggccggaggtttatttgatgcgagataacaatttgtcttcagttgaaaatgtatccaaagtaaggactatggtccaacagtcacatggaaaatttgttcatgacagatgcaacatgggtaatttccaagaaaagcatgaggatggcttcctcttgtcttcagattatatcacgataagaaggcaaacacgtaaagcagatcctgaaagacttatgggatggcaggatactgggaggagtcatgagataacatatgttaggtctgagtttgaggatgacagtgaaagtgaccacactctatctgagcctagcgacgacgacgatgattttaatgtggtgcttgctgacaattgccaaagagtatttgtttatggccttaggattttatggactattgagaatcgagacgcggtttggtcgtgggttggaggaatttccaaagcatttgagcctccaaaaccctctccttcacgacaatatgcacaaagaaagatgattgaagaaaggaatgctgagggctccaaggtgccgcaagattccagctcttccatacatgtgggttctccatcagtgcaacatctggatgcttcgggttcatcttcctcgttgcatagtaaagccaatcgctcctctgatgtggctgtaaatcatgacatttttgatgattcggataaaggagggacagcccaatatatggttaatgttattacaccccaattcaacctacactctgaagaagcaaatggaaggtttctacttgctgcagccagtggtcgtgtactggctcgttcatttcattcagttgttcatcttgggaaagaaatactagaacaagcacttggaacaagcagtgcacagattcttgagttacaacctgaaatgacctggaacaagtcggaactctcggtgatgcttaaagatgttcaagctcatgtagcccccactgatgtggatcctggtgctggtctacagtggctccctaaggttctgggtagctctgagaaattgaagcgcacaggttaaaccactgaaggagctacgctttaactctccagacattactgcaacgatgacctctcgccagtttcaagttatgtttgacgtgcttagaaatcttctattcgcaagacttcccaagagtagaattagtgatgaactagaaatgtttggttccaaatgagcacaacttaatagtgttagtttcctgtcacaggcctaggaaaaacagtcttcagtatccatcagatgatgaagatattgaagaagaggctgacgaggtagtacctgatggagttgaagaagtggagcttgcgaaaattacactcgaacagagggaaagggaaattaagttactgcttgatgatataaggtctctcactggaaatggtgataatgggaccgatcactgtcattctgcagaaaaaggtgattgtttatggatgatcaacagcgggaaagcttcattggtggaaggactgaaaagggatttcgcaaacctacaaaagtctagaatatttgcatcatcagcattgaggaaagcactttcaaatgcttcacaatcacatttggagaaagaaaagaacaaaaccacttcttgtgccatgcggatttctatgaaaattagcaaggttgtatggagcatgctcgcagatggaaacacttttgcagaagctgagatcaatgatatggtgtatgattttgatcgggattacaaagatataggcattgccctgtttacaactaaatactttgttgtgcggaattgcatggttaatgcgaaatgtgacaccttattgtctgcctggaacacacctcctggaaaaattaacatgcttcgtgtggatgccaagcaaggtgctcctaaggatggaagttctccacttgagctcttccaggtggagatctacccactgagaatatatctatctgaagcaatgtatagaatgatgtgggattacttcttccctgaagaagacgattcacaacgaagacaggaagtttggagagtttcaacatcaaccgggcctagaagaacaagaaggctctcttctggtgtcgatgctgttacttctagcagctattctgtcagagatcatgaacttcctgggaaatcaagtacaactgtatctacatcaacaaatgtttcaagttggcaaggtatactcagcgataactcacaggtgtcaaagtttcagagtataaaagcaaatatggtatgtggttcgcatcaagagttgcaccggtcgtcttcatttgaaaggaattgggaagaaagcgctgcagaaagtgttgcaagtaatgatgtggtatcactcctgaattcttcaattgtttcttcaaaagtagatgctagcaattctgtcttagagaaccctgttgtgggaagtgagatgtggagaagtaaaacgaaagattctaagcctgccaagtctggacgtctatctcacgaagaaaagaagcttgggaagtctaatgatgaaaagaagacaaaacctcggaagtcaatggaatttcataacatcaagattggcaaggttgaacttcttgttacatacgagggatcaaggcttgctattaatgacctaaggttgcttatggatactttccacaaggcagaatttactggtacatggaggcgactattctctagagtcaaaaaacatatcatctggggagttttgaagtcggtaaccggaatgcaggggaagaagtttagcaaccatagggaaacacttgagggttctattcctgaaaatgatcttaacttgagtgacagtgatgttggtcaacctggaagacatgatcaattaacagcttcatggttgaagaggccaggcgatggtgcaggtgatggatttgtcacgtcaattagggggcttttcaatacacagcgccgtaaagcgaaggcctttgtgattcggacaatgcgcggtgaagggcataatgacgaatatcaagacgaatggagcgagagcgatggtgaatacccttttgcgaggcagcttacaattacaaaggccaagaagctcatacgaaggaagttccgtccaagggtgcaaaagaacccaggtctgtcgatgcaagattcactcccatctagtccgcgggaaacaactccatatcaaagtgactcctccaggtcatcttacgaggacttccatgagcagtaaaacaatctggtgatgctgctttcagcttctacatttggtcgataagatgcagccatttatattggttatagtagggtgtatgtatatagtaggatgtaccatcaaaatccaatgtatcatgtatagtggttaggcaatactccgtaattatgtgcttgtaagttaataagaggccagctcgtactcctagaaaacaaaacccgtgatctatggcatggggcattctcattcccttgtacttcaggactagtatggattgtaaattcaacggtgaaggtgttgcaacatttattcagtaaagtatccttgttgaagaatttgtaaaaactatggcagaaacaatagggaaggagcaagtgactaggtgcctaggtgtattatgattcttttgctgactagttggaagttagaaatgcattgctccacgtcaaaaagaaatgcgtggcagacaaggttgttgcttaacagatcggtgagctatgaaatgctatctgttcacgtgtctagagtcta

SEQ ID NO: 10611 - DNA, 8707 bp, Zea Mays
aaagcccaagaaggcctccgcccgcctgatcgcctctctgctctagttgctactcctgctgctacagtgctgcccctctcgctctgacttgtgaaaagtcctgaggatacaaggtagtaagcggcatctcgtctcgtctccccagtccccaccccgagatcgctcgtcgccgccgccgtctctttactgaacagggattccctcgcggaccgcggcccgaccgcctccccgaagctagggttcgagggaggttatgccggcgctgtcgcaggcacggatccgggcggcgtgacgcggatccgccggacgctggcagggtcggccatggcgtcctccccagtcaagttcttctcggtgttcctggccgtctccgtcgtcggatggatcgtcttcacgtttgcttcaagattgttagcttggttcttgagccgtgtattctctgcttctgtcggatttcgagttgctggtttcaactgtttgagggatgtaacaataaagttctgtaagggttcagttgaatctgtttcgattggtgaaataaaactaagtttccgcaagtctctagtcaaactaagttttggtgttatctcaaaagacccgaagttgcaattgcttataaatgatctcgaaattgtaactagatcatcttctgaaaataaaaagatacgaaagtcagcaaagcctcgctctacaggaaaagggaaatggctggttacatcaagcatggcaagacttttatcagtttccgtgacagatctgataatcaaggtaccgaaaggcgctcttgacatcaaagaactaacggtggatacatttaaaattgctgggcctaatcatactcttggtgtcaagttgcatcttttacctttgaatatactccttggagatttgggattgactactgatccaatgggcagttgtagtctgtttgatgctttccagtctgatcaagcttctgtatctaactcagagaaaagcttggccccatttgtttgtgaagatttgttggttacttgtaaccttggccatgaaaaggagaaaggtattaaaatcattaacctggaattgaaatgtgggtatgctattgccaacattgatgaaaggatgtttcacaagaagcgcacgattccagaatataacactgtctctttgaacaccggagattctatcacagatacttcagcgctcaaacaaacatcgaaaagcaaatctattctaccgctgttaaagaaacacatgctcacatttccagataaggttagcttcagtgtgccgaagcttgatgtgaagttcagacacctgcatgaaggacttagtgttgacaacaacattacagggatccagtttacttgtgcaaaatccctaccacaagatgattttgaagaagcgacaccacacttcgatgttcaaattgatcttagcgaaattcatttaattagagaaggttctagttctctgttggaagttctgaaagtttttacaatagcttctttggatgtccctgttgacagctgagattgatgccaagcttggtggtacccaatgcaatattatgttaagcagactgatgccatggatgcggcttcattctttgagaaccaaaggaatgaaactttctaaaagaaactccaatcaagaaatttctcaaaaaaaggagatgaagccaattttgtggacttgcacggtcgctgccccagaaatgactgtcttgctttacagtctaaatggattggtcttgtaccatgcttgttcccagtcatcacatttgtttgcaaataatattgcaagcaaggggattcagatacacacagaacttggtgaattgctggtgcacatggaggaggaatatagagagttattaaaggaaaacatatttggtgtggatacttactctggttccctaatgcatattgctcggatgagccttgattggggatatagggaaagtgatgtccaagatatggttgaaactagcaggaatgcacttgttttttcgattgatataagtgatatggaagtgaaatttggcttcaagcatttggaatcaattgtgcttaatttgatgtcgtttaggactctatttaagagtctccagctatctggcggaagtgctaaagaaaagaatttggagcgtaaaggggagaagaaaatgaaaggtgtgaagaaactgaaattaagcctacaaaaattctctattacatactgtggtgatgcaaacataataagtatgccaattgctgatccaaagcgtgtgaactacggctctcaaggtggtcaagtaattgttagtgtttctgctgatggcacaccacgtagggcaagtataacatcagttttaccagactgccacttgcggttctccgcatctttggtaatatctcatctctctatgtgtatagacaaggagagaaagacaacagaagcggaattggaacgggtgaaggcaatctatgaggaattacctgaggatcgctctggtgtcagagtaactttactagatatgcagaatgctaaaattgttcgccgatccagtggtcatgcggaagttgctgtttgttccctctttagtgctactgatatttatttgagatgggaacctgatgctcatttagcactatatgagacattcatccgctttaagcatttcctacatcataatgtgtcccaaaattctgaaaagatgattaatactgaagttgcaagtaccaaatcaaatgaacatggcaacataactgccggtttcattaattctcagaaatccaacagaaaagggtcaatttttgccattgatgtggacatgttaagggtatctgctgaacttgctgatggtgttgaagcaaacatgcatgtacagtcaatctttactgaaaatgccaagataggtgtactgtctgaaggtctttctcttacttttaatggcgctagagttctaaagagcacccgtatacaaatatcctgtatacctttcagcactgggagtttacttgatgcaaagattgaaccatcatccaaaagagactgggttgttcaaggtctagatgtccatatttgcatgccttacaggttgccattgcgtgccatagaagatgctgttgaagatatgtttcgtgcccttaagcttgtctcatctgccaaaagaagtataatctgtcctgatgaaaaggaaaaatctagaaaggttaattctgggggatccaaatttggatctgtgaaatttgtattgcgtaaattgacagcagatatagaggaagagcccatccaaggttggctcgatgaacattaccatttgatgaggaacaaaatctgtgagctaggtgttaggttgaattatcttgaggaagctatatcaggaagtgtagatccgagcaatcacagctctgagagaaaagttctctacaatggtgttgaagttgacattcatgacaccacagctcttcaaaagttgcaggaagaaatccataagcaagcatttcgatcatattatgtgtcttgtcagaacatggtacttgcagaagggtcaggagcgtgctcagaaggttttcaagctggattcagacaaagctcgcgaagagcttctcttctttcactttctgcttccgatctggatgttactttgaccaggatagatggtggagagatagaaatggttgaatttataaaggggcttgaccctgtctgtcaggagcaaaacataccattttctcggttgtatggtagtgatgtttctgtcgttgctgggtccttggttgtacagctaagagactatacttctcctctgttctcttcactcagtgggaaatgtcaaggccgtattgtgcttgctcagcaggcaacatgttttcaaccccaaatacaccaagagttgtatattggaagatggcaaaaggtcacgatgctacgttctgccagtggtactacgccagcaatgaaaatgtactctaatttacctatttatttccagaagggagagatatcttttggagttggttatgagccatctttcgctgatataagctatgcatttcaagtagccctgcggaaagttaaccttagcactagagcaagctgttctggtctagcagtccaactgcctaaaaaggagcgcagcttaccatggtgggatgacatgagatactacttgcatggaaagataattttatatttcaatgagaccaaatggaagttcctggcaacaactaatccttatgagcatgtggataaactccaaattgtctctgaatacatggagatccagcaaactgatggtcgtgtggatgtttctgcgaaagaattcaagatatacataagcagcgtagagagtattacaaagaaccgccgcataaaagttccatctcgtgtgcccagaccttttatatatgctcctctattctccctaaatgtggttattgattggcagtgcgaatctaggaatccattgaatcattatttgcatgcactccctgttgagggggaacctcggaagaaagtttatgatccatttcgatctacttatctctctcttaggtggaacttctccctcagaccattgcaatcccagtatggtaatggcccaccacctcccttttatggaaataattcaatgctccgtgggatcatgtctggtagtccttgcaaaatgactgatgatgacttccctaccatgaacctgggagctcatgaccttgcttgggttttcaaatggtggagcttgaattacagcccccctcacaaacttcgttccttctctagatggcgtcgttttggaattcctcgggctactagatctggtaacctctcgctggacaaagttttggttgaattctttttccgtgttgatgctactccctgttgcataaggcatgcacctttaagtgaggatgatgaccctgcttttggtttgacgtttaagatgtcaaatttgaagtacgagttatgttacagtcgaggtaaacaacagtacacatttgattgtaaacgtgaatcactggaccttgtttatcgtggtctggatcttcacaggccggaggtttatttgatgcgagataacaatttgtcttcagttgaaaatgtatccaaagtaaggactatggtccaacagtcacatggaaaatttgttcatgacagatgcaacatgggtaatttccaagaaaagcatgaggatggcttcctcttgtcttcagattatatcacgataagaaggcaaacacgtaaagcagatcctgaaagacttatgggatggcaggatactgggaggagtcatgagataacatatgttaggtctgagtttgaggatgacagtgaaagtgaccacactctatctgagcctagcgacgacgacgatgattttaatgtggtgcttgctgacaattgccaaagagtatttgtttatggccttaggattttatggactattgagaatcgagacgcggtttggtcgtgggttggaggaatttccaaagcatttgagcctccaaaaccctctccttcacgacaatatgcacaaagaaagatgattgaagaaaggaatgctgagggctccaaggtgccgcaagattccagctcttccatacatgtgggttctccatcagtgcaacatctggatgcttcgggttcatcttcctcgttgcatagtaaagccaatcgctcctctgatgtggctgtaaatcatgacatttttgatgattcggataaaggagggacagcccaatatatggttaatgttattacaccccaattcaacctacactctgaagaagcaaatggaaggtttctacttgctgcagccagtggtcgtgtactggctcgttcatttcattcagttgttcatcttgggaaagaaatactagaacaagcacttggaacaagcagtgcacagattcttgagttacaacctgaaatgacctggaacaagtcggaactctcggtgatgcttaaagatgttcaagctcatgtagcccccactgatgtggatcctggtgctggtctacagtggctccctaaggttctgggtagctctgagaaattgaagcgcacaggtgccttgttagagagagtgtttatgccttgtcaaatgtatttccgttacactagacacaagggtggaactgcagacttgagggttaaaccactgaaggagctacgctttaactctccagacattactgcaacgatgacctctcgccagtttcaagttatgtttgacgtgcttagaaatcttctattcgcaagacttcccaagcctaggaaaaacagtcttcagtatccatcagatgatgaagatattgaagaagaggctgacgaggtagtacctgatggagttgaagaagtggagcttgcgaaaattacactcgaacagagggaaagggaaattaagttactgcttgatgatataaggtctctcactggaaatggtgataatgggaccgatcactgtcattctgcagaaaaaggtgattgtttatggatgatcaacagcgggaaagcttcattggtggaaggactgaaaagggatttcgcaaacctacaaaagtctagaatatttgcatcatcagcattgaggaaagcactttcaaatgcttcacaatcacatttggagaaagaaaagaacaaaaccacttcttgtgccatgcggatttctatgaaaattagcaaggttgtatggagcatgctcgcagatggaaacacttttgcagaagctgagatcaatgatatggtgtatgattttgatcgggattacaaagatataggcattgccctgtttacaactaaatactttgttgtgcggaattgcatggttaatgcgaaatgtgacaccttattgtctgcctggaacacacctcctggaaaaattaacatgcttcgtgtggatgccaagcaaggtgctcctaaggatggaagttctccacttgagctcttccaggtggagatctacccactgagaatatatctatctgaagcaatgtatagaatgatgtgggattacttcttccctgaagaagacgattcacaacgaagacaggaagtttggagagtttcaacatcaaccgggcctagaagaacaagaaggctctcttctggtgtcgatgctgttacttctagcagctattctgtcagagatcatgaacttcctgggaaatcaagtacaactgtatctacatcaacaaatgtttcaagttggcaaggtatactcagcgataactcacaggtgtcaaagtttcagagtataaaagcaaatatggtatgtggttcgcatcaagagttgcaccggtcgtcttcatttgaaaggaattgggaagaaagcgctgcagaaagtgttgcaagtaatgatgtggtatcactcctgaattcttcaattgtttcttcaaaagtagatgctagcaattctgtcttagagaaccctgttgtgggaagtgagatgtggagaagtaaaacgaaagattctaagcctgccaagtctggacgtctatctcacgaagaaaagaagcttgggaagtctaatgatgaaaagaagacaaaacctcggaagtcaatggaatttcataacatcaagattggcaaggttgaacttcttgttacatacgagggatcaaggcttgctattaatgacctaaggttgcttatggatactttccacaaggcagaatttactggtacatggaggcgactattctctagagtcaaaaaacatatcatctggggagttttgaagtcggtaaccggaatgcaggggaagaagtttagcaaccatagggaaacacttgagggttctattcctgaaaatgatcttaacttgagtgacagtgatgttggtcaacctggaagacatgatcaattaacagcttcatggttgaagaggccaggcgatggtgcaggtgatggatttgtcacgtcaattagggggcttttcaatacacagcgccgtaaagcgaaggcctttgtgattcggacaatgcgcggtgaagggcataatgacgaatatcaagacgaatggagcgagagcgatggtgaatacccttttgcgaggcagcttacaattacaaaggccaagaagctcatacgaaggaagttccgtccaagggtgcaaaagaacccaggtctgtcgatgcaagattcactcccatctagtccgcgggaaacaactccatatcaaagtgactcctccaggtcatcttacgaggacttccatgagcagtaaaacaatctggtgatgctgctttcagcttctacatttggtcgataagatgcagccatttatattggttatagtagggtgtatgtatatagtaggatgtaccatcaaaatccaatgtatcatgtatagtggttaggcaatactccgtaattatgtgcttgtaagttaataagaggccagctcgtactcctagaaaacaaaacccgtgatctatggcatggggcattctcattcccttgtacttcaggactagtatggattgtaaattcaacggtgaaggtgttgcaacatttattcagtaaagtatccttgttgaagaatttgtaaaaactatggcagaaacaatagggaaggagcaagtgactaggtgcctaggtgtattatgattcttttgctgactagttggaagttagaaatgcattgctccacgtcaaaaagaaatgcgtggcagacaaggttgttgcttaacagatcggtgagctatgaaatgctatctgttcacgtgtctagagtcta

SEQ ID NO: 10612 - DNA, 8485 bp, Zea Mays
gaaaagcccaagaaggcctccgcccgcctgatcgcctctctgctctagttgctactcctgctgctacagtgctgcccctctcgctctgacttgtgaaaagtcctgaggatacaaggtagtaagcggcatctcgtctcgtctccccagtccccaccccgagatcgctcgtcgccgccgccgtctctttactgaacagggattccctcgcggaccgcggcccgaccgcctccccgaagctagggttcgagggaggttatgccggcgctgtcgcaggcacggatccgggcggcgtgacgcggatccgccggacgctggcagggtcggccatggcgtcctccccagtcaagttcttctcggtgttcctggccgtctccgtcgtcggatggatcgtcttcacgtttgcttcaagattgttagcttggttcttgagccgtgtattctctgcttctgtcggatttcgagttgctggtttcaactgtttgagggatgtaacaataaagttctgtaagggttcagttgaatctgtttcgattggtgaaataaaactaagtttccgcaagtctctagtcaaactaagttttggtgttatctcaaaagacccgaagttgcaattgcttataaatgatctcgaaattgtaactagatcatcttctgaaaataaaaagatacgaaagtcagcaaagcctcgctctacaggaaaagggaaatggctggttacatcaagcatggcaagacttttatcagtttccgtgacagatctgataatcaaggtaccgaaaggcgctcttgacatcaaagaactaacggtggatacatttaaaattgctgggcctaatcatactcttggtgtcaagttgcatcttttacctttgaatatactccttggagatttgggattgactactgatccaatgggcagttgtagtctgtttgatgctttccagtctgatcaagcttctgtatctaactcagagaaaagcttggccccatttgtttgtgaagatttgttggttacttgtaaccttggccatgaaaaggagaaaggtattaaaatcattaacctggaattgaaatgtgggtatgctattgccaacattgatgaaaggatgtttcacaagaagcgcacgattccagaatataacactgtctctttgaacaccggagattctatcacagatacttcagcgctcaaacaaacatcgaaaagcaaatctattctaccgctgttaaagaaacacatgctcacatttccagataaggttagcttcagtgtgccgaagcttgatgtgaagttcagacacctgcatgaaggacttagtgttgacaacaacattacagggatccagtttacttgtgcaaaatccctaccacaagatgattttgaagaagcgacaccacacttcgatgttcaaattgatcttagcgaaattcatttaattagagaaggttctagttctctgttggaagttctgaaagtttttacaatagcttctttggatgtccctgttgacccatttcttccaatcagagctgagattgatgccaagcttggtggtacccaatgcaatattatgttaagcagactgatgccatggatgcggcttcattctttgagaaccaaaggaatgaaactttctaaaagaaactccaatcaagaaatttctcaaaaaaaggagatgaagccaattttgtggacttgcacggtcgctgccccagaaatgactgtcttgctttacagtctaaatggattggtcttgtaccatgcttgttcccagtcatcacatttgtttgcaaataatattgcaagcaaggggattcagatacacacagaacttggtgaattgctggtgcacatggaggaggaatatagagagttattaaaggaaaacatatttggtgtggatacttactctggttccctaatgcatattgctcggatgagccttgattggggatatagggaaagtgatgtccaagatatggttgaaactagcaggaatgcacttgttttttcgattgatataagtgatatggaagtgaaatttggcttcaagcatttggaatcaattgtgcttaatttgatgtcgtttaggactctatttaagagtctccagctatctggcggaagtgctaaagaaaagaatttggagcgtaaaggggagaagaaaatgaaaggtgtgaagaaactgaaattaagcctacaaaaattctctattacatactgtggtgatgcaaacataataagtatgccaattgctgatccaaagcgtgtgaactacggctctcaaggtggtcaagtaattgttagtgtttctgctgatggcacaccacgtagggcaagtataacatcagttttaccagactgccacttgcggttctccgcatctttggtaatatctcatctctctatgtgtatagacaaggagagaaagacaacagaagcggaattggaacgggtgaaggcaatctatgaggaattacctgaggatcgctctggtgtcagagtaactttactagatatgcagaatgctaaaattgttcgccgatccagtggtcatgcggaagttgctgtttgttccctctttagtgctactgatatttatttgagatgggaacctgatgctcatttagcactatatgagacattcatccgctttaagcatttcctacatcataatgtgtcccaaaattctgaaaagatgattaatactgaagttgcaagtaccaaatcaaatgaacatggcaacataactgccggtttcattaattctcagaaatccaacagaaaagggtcaatttttgccattgatgtggacatgttaagggtatctgctgaacttgctgatggtgttgaagcaaacatgcatgtacagtcaatctttactgaaaatgccaagataggtgtactgtctgaaggtctttctcttacttttaatggcgctagagttctaaagagcacccgtatacaaatatcctgtatacctttcagcactgggagtttacttgatgcaaagattgaaccatcatccaaaagagactgggttgttcaaggtctagatgtccatatttgcatgccttacaggttgccattgcgtgccatagaagatgctgttgaagatatgtttcgtgcccttaagcttgtctcatctgccaaaagaagtataatctgtcctgatgaaaaggaaaaatctagaaaggttaattctgggggatccaaatttggatctgtgaaatttgtattgcgtaaattgacagcagatatagaggaagagcccatccaaggttggctcgatgaacattaccatttgatgaggaacaaaatctgtgagctaggtgttaggttgaattatcttgaggaagctatatcaggaagtgtagatccgagcaatcacagctctgagagaaaagttctctacaatggtgttgaagttgacattcatgacaccacagctcttcaaaagttgcaggaagaaatccataagcaagcatttcgatcatattatgtgtcttgtcagaacatggtacttgcagaagggtcaggagcgtgctcagaaggttttcaagctggattcagacaaagctcgcgaagagcttctcttctttcactttctgcttccgatctggatgttactttgaccaggatagatggtggagagctaagagactatacttctcctctgttctcttcactcagtgggaaatgtcaaggccgtattgtgcttgctcagcaggcaacatgttttcaaccccaaatacaccaagagttgtatattggaagatggcaaaaggtcacgatgctacgttctgccagtggtactacgccagcaatgaaaatgtactctaatttacctatttatttccagaagggagagatatcttttggagttggttatgagccatctttcgctgatataagctatgcatttcaagtagccctgcggaaagttaaccttagcactagagcaagctgttctggtctagcagtccaactgcctaaaaaggagcgcagcttaccatggtgggatgacatgagatactacttgcatggaaagataattttatatttcaatgagaccaaatggaagttcctggcaacaactaatccttatgagcatgtggataaactccaaattgtctctgaatacatggagatccagcaaactgatggtcgtgtggatgtttctgcgaaagaattcaagatatacataagcagcgtagagagtattacaaagaaccgccgcataaaagttccatctcgtgtgcccagaccttttatatatgctcctctattctccctaaatgtggttattgattggcagtgcgaatctaggaatccattgaatcattatttgcatgcactccctgttgagggggaacctcggaagaaagtttatgatccatttcgatctacttatctctctcttaggtggaacttctccctcagaccattgcaatcccagtatggtaatggcccaccacctcccttttatggaaataattcaatgctccgtgggatcatgtctggtagtccttgcaaaatgactgatgatgacttccctaccatgaacctgggagctcatgaccttgcttgggttttcaaatggtggagcttgaattacagcccccctcacaaacttcgttccttctctagatggcgtcgttttggaattcctcgggctactagatctggtaacctctcgctggacaaagttttggttgaattctttttccgtgttgatgctactccctgttgcataaggcatgcacctttaagtgaggatgatgaccctgcttttggtttgacgtttaagatgtcaaatttgaagtacgagttatgttacagtcgagatgcaacatgggtaatttccaagaaaagcatgaggatggcttcctcttgtcttcagattatatcacgataagaaggcaaacacgtaaagcagatcctgaaagacttatgggatggcaggatactgggaggagtcatgagataacatatgttaggtctgagtttgaggatgacagtgaaagtgaccacactctatctgagcctagcgacgacgacgatgattttaatgtggtgcttgctgacaattgccaaagagtatttgtttatggccttaggattttatggactattgagaatcgagacgcggtttggtcgtgggttggaggaatttccaaagcatttgagcctccaaaaccctctccttcacgacaatatgcacaaagaaagatgattgaagaaaggaatgctgagggctccaaggtgccgcaagattccagctcttccatacatgtgggttctccatcagtgcaacatctggatgcttcgggttcatcttcctcgttgcatagtaaagccaatcgctcctctgatgtggctgtaaatcatgacatttttgatgattcggataaaggagggacagcccaatatatggttaatgttattacaccccaattcaacctacactctgaagaagcaaatggaaggtttctacttgctgcagccagtggtcgtgtactggctcgttcatttcattcagttgttcatcttgggaaagaaatactagaacaagcacttggaacaagcagtgcacagattcttgagttacaacctgaaatgacctggaacaagtcggaactctcggtgatgcttaaagatgttcaagctcatgtagcccccactgatgtggatcctggtgctggtctacagtggctccctaaggttctgggtagctctgagaaattgaagcgcacaggtgccttgttagagagagtgtttatgccttgtcaaatgtatttccgttacactagacacaagggtggaactgcagacttgagggttaaaccactgaaggagctacgctttaactctccagacattactgcaacgatgacctctcgccagtttcaagttatgtttgacgtgcttagaaatcttctattcgcaagacttcccaagcctaggaaaaacagtcttcagtatccatcagatgatgaagatattgaagaagaggctgacgaggtagtacctgatggagttgaagaagtggagcttgcgaaaattacactcgaacagagggaaagggaaattaagttactgcttgatgatataaggtctctcactggaaatggtgataatgggaccgatcactgtcattctgcagaaaaaggtgattgtttatggatgatcaacagcgggaaagcttcattggtggaaggactgaaaagggatttcgcaaacctacaaaagtctagaatatttgcatcatcagcattgaggaaagcactttcaaatgcttcacaatcacatttggagaaagaaaagaacaaaaccacttcttgtgccatgcggatttctatgaaaattagcaaggttgtatggagcatgctcgcagatggaaacacttttgcagaagctgagatcaatgatatggtgtgtgctcagccttgtcccttcacctctgtggctgtctgtagcttcaatcgggttggagagagcgagaggcgtcaaggaggatgaacggcgagggtgtatgattttgatcgggattacaaagatataggcattgccctgtttacaactaaatactttgttgtgcggaattgcatggttaatgcgaaatgtgacaccttattgtctgcctggaacacacctcctggaaaaattaacatgcttcgtgtggatgccaagcaaggtgctcctaaggatggaagttctccacttgagctcttccaggtggagatctacccactgagaatatatctatctgaagcaatgtatagaatgatgtgggattacttcttccctgaagaagacgattcacaacgaagacaggaagtttggagagtttcaacatcaaccgggcctagaagaacaagaaggctctcttctggtgtcgatgctgttacttctagcagctattctgtcagagatcatgaacttcctgggaaatcaagtacaactgtatctacatcaacaaatgtttcaagttggcaaggtatactcagcgataactcacaggtgtcaaagtttcagagtataaaagcaaatatggtatgtggttcgcatcaagagttgcaccggtcgtcttcatttgaaaggaattgggaagaaagcgctgcagaaagtgttgcaagtaatgatgtggtatcactcctgaattcttcaattgtttcttcaaaagtagatgctagcaattctgtcttagagaaccctgttgtgggaagtgagatgtggagaagtaaaacgaaagattctaagcctgccaagtctggacgtctatctcacgaagaaaagaagcttgggaagtctaatgatgaaaagaagacaaaacctcggaagtcaatggaatttcataacatcaagattggcaaggttgaacttcttgttacatacgagggatcaaggcttgctattaatgacctaaggttgcttatggatactttccacaaggcagaatttactggtacatggaggcgactattctctagagtcaaaaaagggaagaagtttagcaaccatagggaaacacttgagggttctattcctgaaaatgatcttaacttgagtgacagtgatgttggtcaacctggaagacatgatcaattaacagcttcatggttgaagaggccaggcgatggtgcaggtgatggatttgtcacgtcaattagggggcttttcaatacacagcgccgtaaagcgaaggcctttgtgattcggacaatgcgcggtgaagggcataatgacgaatatcaagacgaatggagcgagagcgatggtgaatacccttttgcgaggcagcttacaattacaaaggccaagaagctcatacgaaggaagttccgtccaagggtgcaaaagaacccaggtctgtcgatgcaagattcactcccatctagtccgcgggaaacaactccatatcaaagtgactcctccaggtcatcttacgaggacttccatgagcagtaaaacaatctggtgatgctgctttcagcttctacatttggtcgataagatgcagccatttatattggttatagtagggtgtatgtatatagtaggatgtaccatcaaaatccaatgtatcatgtatagtggttaggcaatactccgtaattatgtgcttgtaagttaataagaggccagctcgtactcctagaaaacaaaacccgtgatctatggcatggggcattctcattcccttgtacttcaggactagtatggattgtaaattcaacggtgaaggtgttgcaacatttattcagtaaagtatccttgttgaagaatttgtaaaaactatggcagaaacaatagggaaggagcaagtgactaggtgcctaggtgtattatgattcttttgctgactagttggaagttagaaatgcattgctccacgtcaaaaagaaatgcgtggcagacaaggttgttgcttaacagatcggtgagctatgaaatgctatctgttcacgtgtctagagtcta

SEQ ID NO: 10613 - DNA, 8609 bp, Zea Mays
gaaaagcccaagaaggcctccgcccgcctgatcgcctctctgctctagttgctactcctgctgctacagtgctgcccctctcgctctgacttgtgaaaagtcctgaggatacaaggtagtaagcggcatctcgtctcgtctccccagtccccaccccgagatcgctcgtcgccgccgccgtctctttactgaacagggattccctcgcggaccgcggcccgaccgcctccccgaagctagggttcgagggaggttatgccggcgctgtcgcaggcacggatccgggcggcgtgacgcggatccgccggacgctggcagggtcggccatggcgtcctccccagtcaagttcttctcggtgttcctggccgtctccgtcgtcggatggatcgtcttcacgtttgcttcaagattgttagcttggttcttgagccgtgtattctctgcttctgtcggatttcgagttgctggtttcaactgtttgagggatgtaacaataaagttctgtaagggttcagttgaatctgtttcgattggtgaaataaaactaagtttccgcaagtctctagtcaaactaagttttggtgttatctcaaaagacccgaagttgcaattgcttataaatgatctcgaaattgtaactagatcatcttctgaaaataaaaagatacgaaagtcagcaaagcctcgctctacaggaaaagggaaatggctggttacatcaagcatggcaagacttttatcagtttccgtgacagatctgataatcaaggtaccgaaaggcgctcttgacatcaaagaactaacggtggatacatttaaaattgctgggcctaatcatactcttggtgtcaagttgcatcttttacctttgaatatactccttggagatttgggattgactactgatccaatgggcagttgtagtctgtttgatgctttccagtctgatcaagcttctgtatctaactcagagaaaagcttggccccatttgtttgtgaagatttgttggttacttgtaaccttggccatgaaaaggagaaaggtattaaaatcattaacctggaattgaaatgtgggtatgctattgccaacattgatgaaaggatgtttcacaagaagcgcacgattccagaatataacactgtctctttgaacaccggagattctatcacagatacttcagcgctcaaacaaacatcgaaaagcaaatctattctaccgctgttaaagaaacacatgctcacatttccagataaggttagcttcagtgtgccgaagcttgatgtgaagttcagacacctgcatgaaggacttagtgttgacaacaacattacagggatccagtttacttgtgcaaaatccctaccacaagatgattttgaagaagcgacaccacacttcgatgttcaaattgatcttagcgaaattcatttaattagagaaggttctagttctctgttggaagttctgaaagtttttacaatagcttctttggatgtccctgttgacccatttcttccaatcagagctgagattgatgccaagcttggtggtacccaatgcaatattatgttaagcagactgatgccatggatgcggcttcattctttgagaaccaaaggaatgaaactttctaaaagaaactccaatcaagaaatttctcaaaaaaaggagatgaagccaattttgtggacttgcacggtcgctgccccagaaatgactgtcttgctttacagtctaaatggattggtcttgtaccatgcttgttcccagtcatcacatttgtttgcaaataatattgcaagcaaggggattcagatacacacagaacttggtgaattgctggtgcacatggaggaggaatatagagagttattaaaggaaaacatatttggtgtggatacttactctggttccctaatgcatattgctcggatgagccttgattggggatatagggaaagtgatgtccaagatatggttgaaactagcaggaatgcacttgttttttcgattgatataagtgatatggaagtgaaatttggcttcaagcatttggaatcaattgtgcttaatttgatgtcgtttaggactctatttaagagtctccagctatctggcggaagtgctaaagaaaagaatttggagcgtaaaggggagaagaaaatgaaaggtgtgaagaaactgaaattaagcctacaaaaattctctattacatactgtggtgatgcaaacataataagtatgccaattgctgatccaaagcgtgtgaactacggctctcaaggtggtcaagtaattgttagtgtttctgctgatggcacaccacgtagggcaagtataacatcagttttaccagactgccacttgcggttctccgcatctttggtaatatctcatctctctatgtgtatagacaaggagagaaagacaacagaagcggaattggaacgggtgaaggcaatctatgaggaattacctgaggatcgctctggtgtcagagtaactttactagatatgcagaatgctaaaattgttcgccgatccagtggtcatgcggaagttgctgtttgttccctctttagtgctactgatatttatttgagatgggaacctgatgctcatttagcactatatgagacattcatccgctttaagcatttcctacatcataatgtgtcccaaaattctgaaaagatgattaatactgaagttgcaagtaccaaatcaaatgaacatggcaacataactgccggtttcattaattctcagaaatccaacagaaaagggtcaatttttgccattgatgtggacatgttaagggtatctgctgaacttgctgatggtgttgaagcaaacatgcatgtacagtcaatctttactgaaaatgccaagataggtgtactgtctgaaggtctttctcttacttttaatggcgctagagttctaaagagcacccgtatacaaatatcctgtatacctttcagcactgggagtttacttgatgcaaagattgaaccatcatccaaaagagactgggttgttcaaggtctagatgtccatatttgcatgccttacaggttgccattgcgtgccatagaagatgctgttgaagatatgtttcgtgcccttaagcttgtctcatctgccaaaagaagtataatctgtcctgatgaaaaggaaaaatctagaaaggttaattctgggggatccaaatttggatctgtgaaatttgtattgcgtaaattgacagcagatatagaggaagagcccatccaaggttggctcgatgaacattaccatttgatgaggaacaaaatctgtgagctaggtgttaggttgaattatcttgaggaagctatatcaggaagtgtagatccgagcaatcacagctctgagagaaaagttctctacaatggtgttgaagttgacattcatgacaccacagctcttcaaaagttgcaggaagaaatccataagcaagcatttcgatcatattatgtgtcttgtcagaacatggtacttgcagaagggtcaggagcgtgctcagaaggttttcaagctggattcagacaaagctcgcgaagagcttctcttctttcactttctgcttccgatctggatgttactttgaccaggatagatggtggagagctaagagactatacttctcctctgttctcttcactcagtgggaaatgtcaaggccgtattgtgcttgctcagcaggcaacatgttttcaaccccaaatacaccaagagttgtatattggaagatggcaaaaggtcacgatgctacgttctgccagtggtactacgccagcaatgaaaatgtactctaatttacctatttatttccagaagggagagatatcttttggagttggttatgagccatctttcgctgatataagctatgcatttcaagtagccctgcggaaagttaaccttagcactagagcaagctgttctggtctagcagtccaactgcctaaaaaggagcgcagcttaccatggtgggatgacatgagatactacttgcatggaaagataattttatatttcaatgagaccaaatggaagttcctggcaacaactaatccttatgagcatgtggataaactccaaattgtctctgaatacatggagatccagcaaactgatggtcgtgtggatgtttctgcgaaagaattcaagatatacataagcagcgtagagagtattacaaagaaccgccgcataaaagttccatctcgtgtgcccagaccttttatatatgctcctctattctccctaaatgtggttattgattggcagtgcgaatctaggaatccattgaatcattatttgcatgcactccctgttgagggggaacctcggaagaaagtttatgatccatttcgatctacttatctctctcttaggtggaacttctccctcagaccattgcaatcccagtatggtaatggcccaccacctcccttttatggaaataattcaatgctccgtgggatcatgtctggtagtccttgcaaaatgactgatgatgacttccctaccatgaacctgggagctcatgaccttgcttgggttttcaaatggtggagcttgaattacagcccccctcacaaacttcgttccttctctagatggcgtcgttttggaattcctcgggctactagatctggtaacctctcgctggacaaagttttggttgaattctttttccgtgttgatgctactccctgttgcataaggcatgcacctttaagtgaggatgatgaccctgcttttggtttgacgtttaagatgtcaaatttgaagtacgagttatgttacagtcgaggtaaacaacagtacacatttgattgtaaacgtgaatcactggaccttgtttatcgtggtctggatcttcacaggccggaggtttatttgatgcgagataacaatttgtcttcagttgaaaatgtatccaaagtaaggactatggtccaacagtcacatggaaaatttgttcatgacagatgcaacatgggtaatttccaagaaaagcatgaggatggcttcctcttgtcttcagattatatcacgataagaaggcaaacacgtaaagcagatcctgaaagacttatgggatggcaggatactgggaggagtcatgagataacatatgttaggtctgagtttgaggatgacagtgaaagtgaccacactctatctgagcctagcgacgacgacgatgattttaatgtggtgcttgctgacaattgccaaagagtatttgtttatggccttaggattttatggactattgagaatcgagacgcggtttggtcgtgggttggaggaatttccaaagcatttgagcctccaaaaccctctccttcacgacaatatgcacaaagaaagatgattgaagaaaggaatgctgagggctccaaggtgccgcaagattccagctcttccatacatgtgggttctccatcagtgcaacatctggatgcttcgggttcatcttcctcgttgcatagtaaagccaatcgctcctctgatgtggctgtaaatcatgacatttttgatgattcggataaaggagggacagcccaatatatggttaatgttattacaccccaattcaacctacactctgaagaagcaaatggaaggtttctacttgctgcagccagtggtcgtgtactggctcgttcatttcattcagttgttcatcttgggaaagaaatactagaacaagcacttggaacaagcagtgcacagattcttgagttacaacctgaaatgacctggaacaagtcggaactctcggtgatgcttaaagatgttcaagctcatgtagcccccactgatgtggatcctggtgctggtctacagtggctccctaaggttctgggtagctctgagaaattgaagcgcacaggtgccttgttagagagagtgtttatgccttgtcaaatgtatttccgttacactagacacaagggtggaactgcagacttgagggttaaaccactgaaggagctacgctttaactctccagacattactgcaacgatgacctctcgccagtttcaagttatgtttgacgtgcttagaaatcttctattcgcaagacttcccaagcctaggaaaaacagtcttcagtatccatcagatgatgaagatattgaagaagaggctgacgaggtagtacctgatggagttgaagaagtggagcttgcgaaaattacactcgaacagagggaaagggaaattaagttactgcttgatgatataaggtctctcactggaaatggtgataatgggaccgatcactgtcattctgcagaaaaaggtgattgtttatggatgatcaacagcgggaaagcttcattggtggaaggactgaaaagggatttcgcaaacctacaaaagtctagaatatttgcatcatcagcattgaggaaagcactttcaaatgcttcacaatcacatttggagaaagaaaagaacaaaaccacttcttgtgccatgcggatttctatgaaaattagcaaggttgtatggagcatgctcgcagatggaaacacttttgcagaagctgagatcaatgatatggtgtatgattttgatcgggattacaaagatataggcattgccctgtttacaactaaatactttgttgtgcggaattgcatggttaatgcgaaatgtgacaccttattgtctgcctggaacacacctcctggaaaaattaacatgcttcgtgtggatgccaagcaaggtgctcctaaggatggaagttctccacttgagctcttccaggtggagatctacccactgagaatatatctatctgaagcaatgtatagaatgatgtgggattacttcttccctgaagaagacgattcacaacgaagacaggaagtttggagagtttcaacatcaaccgggcctagaagaacaagaaggctctcttctggtgtcgatgctgttacttctagcagctattctgtcagagatcatgaacttcctgggaaatcaagtacaactgtatctacatcaacaaatgtttcaagttggcaaggtatactcagcgataactcacaggtgtcaaagtttcagagtataaaagcaaatatggtatgtggttcgcatcaagagttgcaccggtcgtcttcatttgaaaggaattgggaagaaagcgctgcagaaagtgttgcaagtaatgatgtggtatcactcctgaattcttcaattgtttcttcaaaagtagatgctagcaattctgtcttagagaaccctgttgtgggaagtgagatgtggagaagtaaaacgaaagattctaagcctgccaagtctggacgtctatctcacgaagaaaagaagcttgggaagtctaatgatgaaaagaagacaaaacctcggaagtcaatggaatttcataacatcaagattggcaaggttgaacttcttgttacatacgagggatcaaggcttgctattaatgacctaaggttgcttatggatactttccacaaggcagaatttactggtacatggaggcgactattctctagagtcaaaaaacatatcatctggggagttttgaagtcggtaaccggaatgcaggggaagaagtttagcaaccatagggaaacacttgagggttctattcctgaaaatgatcttaacttgagtgacagtgatgttggtcaacctggaagacatgatcaattaacagcttcatggttgaagaggccaggcgatggtgcaggtgatggatttgtcacgtcaattagggggcttttcaatacacagcgccgtaaagcgaaggcctttgtgattcggacaatgcgcggtgaagggcataatgacgaatatcaagacgaatggagcgagagcgatggtgaatacccttttgcgaggcagcttacaattacaaaggccaagaagctcatacgaaggaagttccgtccaagggtgcaaaagaacccaggtctgtcgatgcaagattcactcccatctagtccgcgggaaacaactccatatcaaagtgactcctccaggtcatcttacgaggacttccatgagcagtaaaacaatctggtgatgctgctttcagcttctacatttggtcgataagatgcagccatttatattggttatagtagggtgtatgtatatagtaggatgtaccatcaaaatccaatgtatcatgtatagtggttaggcaatactccgtaattatgtgcttgtaagttaataagaggccagctcgtactcctagaaaacaaaacccgtgatctatggcatggggcattctcattcccttgtacttcaggactagtatggattgtaaattcaacggtgaaggtgttgcaacatttattcagtaaagtatccttgttgaagaatttgtaaaaactatggcagaaacaatagggaaggagcaagtgactaggtgcctaggtgtattatgattcttttgctgactagttggaagttagaaatgcattgctccacgtcaaaaagaaatgcgtggcagacaaggttgttgcttaacagatcggtgagctatgaaatgctatctgttcacgtgtctagagtcta

SEQ ID NO: 10614 - DNA, 1037 bp, Zea Mays
cgctcgtggctaggtgtcaagtgaggcccgcacgacggacaaagacaaggtgtgcgtgcttctggcgctacgggccgcgtgctggaacggacgggccaccagcacccatcgtggacgcctgaccacgccccatgtgtgttagcaccttacaggagatttgagggcgtcgcgtgcgatgcccgttgcgccgccgccaacatctcgctgcaggggaagtatctcgccggcacgctccacctgccctcccatgggtccgcccctggccggcctctacctcagctacaacaccctctggcggcatccagtaggagctggctgcggatcccgcagatggcgccaagaccgtgcgcaagccggtcttcaccaccgtcgaccagctacaaccccagatgcacagccacactcttaccatccgcgtcatctttgcctgcaccatcctcgacaaatcctccatgcacattggtcgcacccgcatcccccagtgcctcgtcggatacaacaccgacatcgtcctcgtcacgctcgcaacaatctggcaaatttgtcatagatacactcacggtgtgctggtgtgtgtggaggaagagcctgacggaggctgaggagaggaatcagtagagcaaatgagcaagacgagacagatgtgtagctgctggtgtttctccactatcgcgacctcactgctcaagcatggcatatatagagtgacgagaacaccatggaatggagttgtgctgttgtggtgcggagtaggagcgtccaagcgaggagagaatcacatgcgatttctctcattgttgttgttctcgcgtcgtttctgattctacgttgaaacaaagtgtttgtcccattagggtgtgtttcctcgctttttctcgcacaagaatccagtaaaaagttatccaaataggctcgttgactgctatagtccgtcgattcgattctcccatctatatcctttgtggttgcccatccggctatcccattatttacctttaaatgatgttgttttagttttgttgcatttcctgtcgatt

SEQ ID NO: 10615 - DNA, 1023 bp, Zea Mays
cgctcgtggctaggtgtcaagtgaggcccgcacgacggacaaagacaaggtgtgcgtgcttctggcgctacgggccgcgtgctggaacggacgggccaccagcacccatcgtggacgcctgaccacgccccatgtgtgttagcaccttacaggagatttgagggcgtcgcgtgcgatgcccgttgcgccgccgccaacatctcgctgcaggggaagtatctcgccggcacgctccacctgccctcccatgggtccgcccctggccggcctctacctcagctacaacaccctctggcggcatccagtaggagctggctgcggatcccgcagatggcgccaagaccgtgcgcaagccggtcttcaccaccgtcgaccagctacaaccccagatgcacagccacactcttaccatccgcgtcatctttgcctgcaccatcctcgacaaatcctccatgcacattggtcgcacccgcatcccccagtgcctcgtcggatacaacaccgacatcgtcctcgtcacgctcgcaacaatctggatacactcacggtgtgctggtgtgtgtggaggaagagcctgacggaggctgaggagaggaatcagtagagcaaatgagcaagacgagacagatgtgtagctgctggtgtttctccactatcgcgacctcactgctcaagcatggcatatatagagtgacgagaacaccatggaatggagttgtgctgttgtggtgcggagtaggagcgtccaagcgaggagagaatcacatgcgatttctctcattgttgttgttctcgcgtcgtttctgattctacgttgaaacaaagtgtttgtcccattagggtgtgtttcctcgctttttctcgcacaagaatccagtaaaaagttatccaaataggctcgttgactgctatagtccgtcgattcgattctcccatctatatcctttgtggttgcccatccggctatcccattatttacctttaaatgatgttgttttagttttgttgcatttcctgtcgatt

SEQ ID NO: 10616 - DNA, 3506 bp, Zea Mays
cacgagcaccgaccggctacgcagcacggaggacgggaggtgcgccgtcgctcgccggcgatgatcctccacccctgacacgcccgcgattaggttccgtcctctgccgccgcgcaaacgatgtctgccgtcgaccgcggtcgttcccgcgcccgcgacacgagtcagcagcgaactcaacgggaatccggcgacccccagaaatggctgcactgcaaccctcattttcaccagcaatgactttgaagagtagctgcagcgccctgaagttcccaaaaactgcactgttatctggttttggtggcattccacgccttcaagatgcgcaagacaggaacactagcgtcgcttatttgatccccaaggctgcttcagtgactgaccagtcaatagcagagccaccaaaaaccaagcaaaataggcacacagtcgacccaacagctccagaatttctgccactcccatcttttgaagaatgctttccaaggagtaccaaagaatcaagtgaaatcatccacgaggaatcaggtcatgtcctcaaggttccattccggagagtccatttgactggagatcagaagcactttgatacatatgacaccagtggtcctcaaaatataagcccaaggattggactcccaaagataaggaaggaatggattgataggagggaaaagctgggtagtcctcggtacacacaaatgtattatgctaaacagggaattgtaacagaggagatgttatactgtgccagccgtgagaaccttagtcctgaatttgttcggacagaagttgcccgtggacgagccataattccttccaacaagaggcacctggaattggaacccatgattgttggaagaaacttccttgtaaaggtgaatgcaaatattgggaattcagctgttgtgagctccattgaggaggaagttcacaagctccagtgggccacgatgtggggagctgatactgtcatggacctttcaacagggcgacatatccatgagacgcgggaatggattattcgcaactctccggttcctattgggactgttcctatttaccaagcacttgagaaagtaaatggtattgctgaaaatctgagctgggaaatttttagggataccttgattgaacaagctgagcagggcgttgattacttcacaatccatgctggtgtcctgcttcgttacattcctcttacagcaaagagaatgacgggcatagtttcacgtggtggctcaatccatgcaaaatggtgcttaacttatcacaaggagaactttgcatatgaacattgggatgacattcttgacatatgcaatcagtatgatgtggcattatcaattggtgatggtttgaggcctggttccatttatgatgcaaatgatagtgcacagtttgcagaactgctgactcaaggtgaactaacacgtcgagcatgggcgaaagatgtgcaggtgatgaatgaaggcccgggtcacatcccaatgcataaaattcctgaaaacatggagaaacagttggagtggtgtaatgaagcgcctttctatacattgggtcctttgacaactgatattgcacctggttatgatcacatcacttcagccattggtgctgccaacattggagctcttggcactgcacttctttgctatgtaacaccaaaggagcaccttgggttgcccaatcgtgatgatgtcaagactggtgtaatatcctacaaaatttctgctcatgctgctgatttggcgaagggtcatccctatgcacaagcttgggatgatgcacttagcaaggcaaggtttgagtttagatggcttgaccaatttgctttatctctggatccagtaactgctatggctttccatgatgaaacattgccctctgagggtgccaaagtggcacatttctgctcaatgtgtgggcccaagttttgttcaatgaaaatcacggaggatatcaggaagtatgctgatgaaaatggttatggaacagtagaggaagctgtgatacaaggaatgaatgctatgagtgctgaatttttggctgcaaggaaaacaattagtggggaacaacatggtgaagcaggaggggagatctatgtaccagaaagctatgcagctcagaaataaggtttcctcggagacatccattccaaatgaggctaaggcatcagcagctgttctggctagtggctaaggcatcagcagctgttctaccatcttatctaatgagatgtctgagagcctcttagcctggactgttgtgagatgggctgagaaagtccctttgaacctgaacaggataatgcctgcgaagggagtgtgcaattctattttcctgttttccaggaacctatcaaccttttggtggaaattgaggtattgtccatgattgcatggagctcagcaacaaggtacctgttctctacttgtttgcatttctcaaggggaagattcttaacaggtatcagcttcgtcatgacatctaacaattttatttataatgttcaagttatttagttaaatctacacgaccatgaaatttgtcaaagcatttcctagtcctatattatctagttttacttctacgtctatctgttctttgattgtgcgctccatctattctttgatgaagcttgcgagttctactttctagacctattgagataggaccttttggcacggtacaatatcaatactgttttggtgaagggagtatatttacagtagtacaaaaggagatggctaaacctgctacaattttttttagatggacgatgtttgtcaattgagggtgggaagtaccgaccagattgcatttgacttcatccggccatccggtctattaataaataaccaaggaagtggttcttggcaactaccttttcccgttcttgtggtttttttttcaaataggcgtgcttaaatatttcggtcttttaaattaatattataaaattctcgtctgaatatttttcaagtctagtattatgcatgataatttacatatgcatgttgtctgaaagcagaagcagattctcaaggcacctgctaattcaaaaccaaaaataggttgtaacttcgaagttgctgcattggtgaagaataatatattttagttttactctcagctgattgcttgtttgtcatgtttcactccatgcttcactctcggctgtattctgcattataccttgtttatatccaactgccatggccgatgtgagatgttaaatgtgtcggtgaagtaaataattctgctgtggcttttccgctttctgtggttccaatgggctattcccatttgcaaatattgtgtccataaggcggatttccaaatcctgcggagttgaggtgggcacctaatttcttgacgtttctgatcaatttctcatgttatcacaatgtcccttataagtgcttcccgagcagaattgagatgttaattattataaacttccattttggtttatctgaaaccaggaattctatatgaatgtc

SEQ ID NO: 10617 - DNA, 3565 bp, Zea Mays
gacaccaacgtgcacacgcatcccgccgcctcccgcccgcacgagcaccgaccggctacgcagcacggaggacgggaggaaatggctgcactgcaaccctcattttcaccagcaatgactttgaagagtagctgcagcgccctgaagttcccaaaaactgcactgttatctggttttggtggcattccacgccttcaagatgcgcaagacaggaacactagcgtcgcttatttgatccccaaggctgcttcagtgactgaccagtcaatagcagagccaccaaaaaccaagcaaaataggcacacagtcgacccaacagctccagaatttctgccactcccatcttttgaagaatgctttccaaggagtaccaaagaatcaagtgaaatcatccacgaggaatcaggtcatgtcctcaaggttccattccggagagtccatttgactggagatcagaagcactttgatacatatgacaccagtggtcctcaaaatataagcccaaggattggactcccaaagataaggaaggaatggattgataggagggaaaagctgggtagtcctcggtacacacaaatgtattatgctaaacagggaattgtaacagaggagatgttatactgtgccagccgtgagaaccttagtcctgaatttgttcggacagaagttgcccgtggacgagccataattccttccaacaagaggcacctggaattggaacccatgattgttggaagaaacttccttgtaaaggtgaatgcaaatattgggaattcagctgttgtgagctccattgaggaggaagttcacaagctccagtgggccacgatgtggggagctgatactgtcatggacctttcaacagggcgacatatccatgagacgcgggaatggattattcgcaactctccggttcctattgggactgttcctatttaccaagcacttgagaaagtaaatggtattgctgaaaatctgagctgggaaatttttagggataccttgattgaacaagctgagcagggcgttgattacttcacaatccatgctggtgtcctgcttcgttacattcctcttacagcaaagagaatgacgggcatagtttcacgtggtggctcaatccatgcaaaatggtgcttaacttatcacaaggagaactttgcatatgaacattgggatgacattcttgacatatgcaatcagtatgatgtggcattatcaattggtgatggtttgaggcctggttccatttatgatgcaaatgatagtgcacagtttgcagaactgctgactcaaggtgaactaacacgtcgagcatgggcgaaagatgtgcaggtgatgaatgaaggcccgggtcacatcccaatgcataaaattcctgaaaacatggagaaacagttggagtggtgtaatgaagcgcctttctatacattgggtcctttgacaactgatattgcacctggttatgatcacatcacttcagccattggtgctgccaacattggagctcttggcactgcacttctttgctatgtaacaccaaaggagcaccttgggttgcccaatcgtgatgatgtcaagactggtgtaatatcctacaaaatttctgctcatgctgctgatttggcgaagggtcatccctatgcacaagcttgggatgatgcacttagcaaggcaaggtttgagtttagatggcttgaccaatttgctttatctctggatccagtaactgctatggctttccatgatgaaacattgccctctgagggtgccaaagtggcacatttctgctcaatgtgtgggcccaagttttgttcaatgaaaatcacggaggatatcaggaagtatgctgatgaaaatggttatggaacagtagaggaagctgtgatacaaggaatgaatgctatgagtgctgaatttttggctgcaaggaaaacaattagtggggaacaacatggtgaagcaggaggggagatctatgtaccagaaagctatgcagctcagaaataaggtttcctcggagacatccattccaaatgaggctaaggcatcagcagctgttctggctagtggctaaggcatcagcagctgttctaccatcttatctaatgagatggtaagcagtatgtgaataaagctggtgttgcttaccttcagtttgtgaatgccattatgtactgtaataaaaaactctgtattgtactccctagcattatcattatgcttttgtcttctttgtatcacaatgggattgttagtgatgaaaattgcaccaggggtgcctgtgttctcaacagtctgagagcctcttagcctggactgttgtgagatgggctgagaaagtccctttgaacctgaacaggataatgcctgcgaagggagtgtgcaattctattttcctgttttccaggaacctatcaaccttttggtggaaattgaggtattgtccatgattgcatggagctcagcaacaaggtacctgttctctacttgtttgcatttctcaaggggaagattcttaacaggtatcagcttcgtcatgacatctaacaattttatttataatgttcaagttatttagttaaatctacacgaccatgaaatttgtcaaagcatttcctagtcctatattatctagttttacttctacgtctatctgttctttgattgtgcgctccatctattctttgatgaagcttgcgagttctactttctagacctattgagataggaccttttggcacggtacaatatcaatactgttttggtgaagggagtatatttacagtagtacaaaaggagatggctaaacctgctacaattttttttagatggacgatgtttgtcaattgagggtgggaagtaccgaccagattgcatttgacttcatccggccatccggtctattaataaataaccaaggaagtggttcttggcaactaccttttcccgttcttgtggtttttttttcaaataggcgtgcttaaatatttcggtcttttaaattaatattataaaattctcgtctgaatatttttcaagtctagtattatgcatgataatttacatatgcatgttgtctgaaagcagaagcagattctcaaggcacctgctaattcaaaaccaaaaataggttgtaacttcgaagttgctgcattggtgaagaataatatattttagttttactctcagctgattgcttgtttgtcatgtttcactccatgcttcactctcggctgtattctgcattataccttgtttatatccaactgccatggccgatgtgagatgttaaatgtgtcggtgaagtaaataattctgctgtggcttttccgctttctgtggttccaatgggctattcccatttgcaaatattgtgtccataaggcggatttccaaatcctgcggagttgaggtgggcacctaatttcttgacgtttctgatcaatttctcatgttatcacaatgtcccttataagtgcttcccgagcagaattgagatgttaattattataaacttccattttggtttatctgaaaccaggaattctatatgaatgtc

SEQ ID NO: 10618 - DNA, 3570 bp, Zea Mays
caatttctatttttgattattccgtactcgatttcattttagatgataaaatatggatacatgagagattttccgtccgttttgatcctgcaaagatctgaggccgtcgtggtgtggcctggccactggccacccgtgccctatcctcttccgcacggcgtcctatatatataaggaaaggaaaaatctgccactccacacgcgttcctctctcgccgtcgccaaccatcgccgcctcgcgtccggacccgccgttcctccgaggaaatggctgcactgcaaccctcattttcaccagcaatgactttgaagagtagctgcagcgccctgaagttcccaaaaactgcactgttatctggttttggtggcattccacgccttcaagatgcgcaagacaggaacactagcgtcgcttatttgatccccaaggctgcttcagtgactgaccagtcaatagcagagccaccaaaaaccaagcaaaataggcacacagtcgacccaacagctccagaatttctgccactcccatcttttgaagaatgctttccaaggagtaccaaagaatcaagtgaaatcatccacgaggaatcaggtcatgtcctcaaggttccattccggagagtccatttgactggagatcagaagcactttgatacatatgacaccagtggtcctcaaaatataagcccaaggattggactcccaaagataaggaaggaatggattgataggagggaaaagctgggtagtcctcggtacacacaaatgtattatgctaaacagggaattgtaacagaggagatgttatactgtgccagccgtgagaaccttagtcctgaatttgttcggacagaagttgcccgtggacgagccataattccttccaacaagaggcacctggaattggaacccatgattgttggaagaaacttccttgtaaaggtgaatgcaaatattgggaattcagctgttgtgagctccattgaggaggaagttcacaagctccagtgggccacgatgtggggagctgatactgtcatggacctttcaacagggcgacatatccatgagacgcgggaatggattattcgcaactctccggttcctattgggactgttcctatttaccaagcacttgagaaagtaaatggtattgctgaaaatctgagctgggaaatttttagggataccttgattgaacaagctgagcagggcgttgattacttcacaatccatgctggtgtcctgcttcgttacattcctcttacagcaaagagaatgacgggcatagtttcacgtggtggctcaatccatgcaaaatggtgcttaacttatcacaaggagaactttgcatatgaacattgggatgacattcttgacatatgcaatcagtatgatgtggcattatcaattggtgatggtttgaggcctggttccatttatgatgcaaatgatagtgcacagtttgcagaactgctgactcaaggtgaactaacacgtcgagcatgggcgaaagatgtgcaggtgatgaatgaaggcccgggtcacatcccaatgcataaaattcctgaaaacatggagaaacagttggagtggtgtaatgaagcgcctttctatacattgggtcctttgacaactgatattgcacctggttatgatcacatcacttcagccattggtgctgccaacattggagctcttggcactgcacttctttgctatgtaacaccaaaggagcaccttgggttgcccaatcgtgatgatgtcaagactggtgtaatatcctacaaaatttctgctcatgctgctgatttggcgaagggtcatccctatgcacaagcttgggatgatgcacttagcaaggcaaggtttgagtttagatggcttgaccaatttgctttatctctggatccagtaactgctatggctttccatgatgaaacattgccctctgagggtgccaaagtggcacatttctgctcaatgtgtgggcccaagttttgttcaatgaaaatcacggaggatatcaggaagtatgctgatgaaaatggttatggaacagtagaggaagctgtgatacaaggaatgaatgctatgagtgctgaatttttggctgcaaggaaaacaattagtggggaacaacatggtgaagcaggaggggagatctatgtaccagaaagctatgcagctcagaaataaggtttcctcggagacatccattccaaatgaggctaaggcatcagcagctgttctggctagtggctaaggcatcagcagctgttctaccatcttatctaatgagatgtctgagagcctcttagcctggactgttgtgagatgggctgagaaagtccctttgaacctgaacaggataatgcctgcgaagggagtgtgcaattctattttcctgttttccaggaacctatcaaccttttggtggaaattgaggtattgtccatgattgcatggagctcagcaacaaggtacctgttctctacttgtttgcatttctcaaggggaagattcttaacaggtatcagcttcgtcatgacatctaacaattttatttataatgttcaagttatttagttaaatctacacgaccatgaaatttgtcaaagcatttcctagtcctatattatctagttttacttctacgtctatctgttctttgattgtgcgctccatctattctttgatgaagcttgcgagttctactttctagacctattgagataggaccttttggcacggtacaatatcaatactgttttggtgaagggagtatatttacagtagtacaaaaggagatggctaaacctgctacaattttttttagatggacgatgtttgtcaattgagggtgggaagtaccgaccagattgcatttgacttcatccggccatccggtctattaataaataaccaaggaagtggttcttggcaactaccttttcccgttcttgtggtttttttttcaaataggcgtgcttaaatatttcggtcttttaaattaatattataaaattctcgtctgaatatttttcaagtctagtattatgcatgataatttacatatgcatgttgtctgaaagcagaagcagattctcaaggcacctgctaattcaaaaccaaaaataggttgtaacttcgaagttgctgcattggtgaagaataatatattttagttttactctcagctgattgcttgtttgtcatgtttcactccatgcttcactctcggctgtattctgcattataccttgtttatatccaactgccatggccgatgtgagatgttaaatgtgtcggtgaagtaaataattctgctgtggcttttccgctttctgtggttccaatgggctattcccatttgcaaatattgtgtccataaggcggatttccaaatcctgcggagttgaggtgggcacctaatttcttgacgtttctgatcaatttctcatgttatcacaatgtcccttataagtgcttcccgagcagaattgagatgttaattattataaacttccattttggtttatctgaaaccaggaattctatatgaatgtc

SEQ ID NO: 10619 - DNA, 3445 bp, Zea Mays
caatttctatttttgattattccgtactcgatttcattttagatgataaaatatggatacatgagagattttccgtccgttttgatcctgcaaagatctgaggccgtcgtggtgtggcctggccactggccacccgtgccctatcctcttccgcacggcgtcctatatatataaggaaaggaaaaatctgccactccacacgcgttcctctctcgccgtcgccaaccatcgccgcctcgcgtccggacccgccgttcctccgaggaaatggctgcactgcaaccctcattttcaccagcaatgactttgaagagtagctgcagcgccctgaagttcccaaaaactgcactgttatctggttttggtggcattccacgccttcaagatgcgcaagacaggaacactagcgtcgcttatttgatccccaaggctgcttcagtgactgaccagtcaatagcagagccaccaaaaaccaagcaaaataggcacacagtcgacccaacagctccagaatttctgccactcccatcttttgaagaatgctttccaaggagtaccaaagaatcaagtgaaatcatccacgaggaatcaggtcatgtcctcaaggttccattccggagagtccatttgactggagatcagaagcactttgatacatatgacaccagtggtcctcaaaatataagcccaaggattggactcccaaagataaggaaggaatggattgataggagggaaaagctgggtagtcctcggtacacacaaatgtattatgctaaacagggaattgtaacagaggagatgttatactgtgccagccgtgagaaccttagtcctgaatttgttcggacagaagttgcccgtggacgagccataattccttccaacaagaggcacctggaattggaacccatgattgttggaagaaacttccttgtaaaggtgaatgcaaatattgggaattcagctgttgtgagctccattgaggaggaagttcacaagctccagtgggccacgatgtggggagctgatactgtcatggacctttcaacagggcgacatatccatgagacgcgggaatggattattcgcaactctccggttcctattgggactgttcctatttaccaagcacttgagaaagtaaatggtattgctgaaaatctgagctgggaaatttttagggataccttgattgaacaagctgagcagggcgttgattacttcacaatccatgctggtgtcctgcttcgttacattcctcttacagcaaagagaatgacgggcatagtttcacgtggtggctcaatccatgcaaaatggtgcttaacttatcacaaggagaactttgcatatgaacattgggatgacattcttgacatatgcaatcagtatgatgtggcattatcaattggtgatggtttgaggcctggttccatttatgatgcaaatgatagtgcacagtttgcagaactgctgactcaaggtgaactaacacgtcgagcatgggcgaaagatgtgcaggtgatgaatgaaggcccgggtcacatcccaatgcataaaattcctgaaaacatggagaaacagttggagtggtgtaatgaagcgcctttctatacattgggtcctttgacaactgatattgcacctggttatgatcacatcacttcagccattggtgctgccaacattggagctcttggcactgcacttctttgctatgtaacaccaaaggagcaccttgggttgcccaatcgtgatgatgtcaagactggtgtaatatcctacaaaatttctgctcatgctgctgatttggcgaagggtcatccctatgcacaagcttgggatgatgcacttagcaaggcaaggtttgagtttagatggcttgaccaatttgctttatctctggatccagtaactgctatggctttccatgatgaaacattgccctctgagggtgccaaagtggcacatttctgctcaatgtgtgggcccaagttttgttcaatgaaaatcacggaggatatcaggaagtatgctgatgaaaatggttatggaacagtagaggaagctgtgatacaaggaatgaatgctatgagtgctgaatttttggctgcaaggaaaacaattagtggggaacaacatggtgaagcaggaggggagatctatgtaccagaaagctatgcagctcagaaataaggtttcctcggagacatccattccaaatgaggctaaggcatcagcagctgttctggctagtggctaaggcatcagcagctgttctaccatcttatctaatgagatggtaagcagtatgtgaataaagctggtgttgcttaccttcagtttgtgaatgccattatgtactgtaataaaaaactctgtattgtactccctagcattatcattatgcttttgtcttctttgtatcacaatgggattgttagtgatgaaaattgcaccaggggtgcctgtgttctcaacagtctgagagcctcttagcctggactgttgtgagatgggctgagaaagtccctttgaacctgaacaggataatgcctgcgaagggagtgtgcaattctattttcctgttttccaggaacctatcaaccttttggtggaaattgaggtattgtccatgattgcatggagctcagcaacaaggtacctgttctctacttgtttgcatttctcaaggggaagattcttaacagatggacgatgtttgtcaattgagggtgggaagtaccgaccagattgcatttgacttcatccggccatccggtctattaataaataaccaaggaagtggttcttggcaactaccttttcccgttcttgtggtttttttttcaaataggcgtgcttaaatatttcggtcttttaaattaatattataaaattctcgtctgaatatttttcaagtctagtattatgcatgataatttacatatgcatgttgtctgaaagcagaagcagattctcaaggcacctgctaattcaaaaccaaaaataggttgtaacttcgaagttgctgcattggtgaagaataatatattttagttttactctcagctgattgcttgtttgtcatgtttcactccatgcttcactctcggctgtattctgcattataccttgtttatatccaactgccatggccgatgtgagatgttaaatgtgtcggtgaagtaaataattctgctgtggcttttccgctttctgtggttccaatgggctattcccatttgcaaatattgtgtccataaggcggatttccaaatcctgcggagttgaggtgggcacctaatttcttgacgtttctgatcaatttctcatgttatcacaatgtcccttataagtgcttcccgagcagaattgagatgttaattattataaacttccattttggtttatctgaaaccaggaattctatatgaatgtc

SEQ ID NO: 10620 - DNA, 3082 bp, Zea Mays
tttttttggttttttgtgtctaaactctaaacccgttaagtttgtaaccgcctccctccttcaactgtctcagcagattgtgcagcaccgtgttctccctcccttcccaatcccctatcccgttactttccccggctccaccccaaaccctaatacgtcatggcgctcactacacggggcggcgccggcggcggggatcccgcgaaggcgccgtccgcctccgaccccagcctcggcttcctcaccaagcgcgataccgaggtcaagctaccccgcgcaacgcgggtcaagaacaagacccccgcgccgatccagattacggccgagcagatcctccgggaggccagggagaggcaggagcctgagatccgcccgcccaaacagaagatcacagacccccacgagctctccgattaccgcctccgtaagcggaaggagttcgaggacgtcatccgccgcgtgcgctggagcgtctcggcatgggtcaagtacgcgcggtgggaggagcagcagcgagacttcgcgcgcgcgcgctccgtctacgagcgcgcgctcgacgtcgcccaccgcgaccacacgctctggctcaaatatgctgaattcgagatgcggaaccggtttgtcaaccatgcccggaatgtctgggaccgcgcggtgtcgctcctcccccgggtggatcagctctggtacaagtacatccacatggaggagctgcttggtgcagttgccaatgcgcgccaggtgttcgagcgctggatgtcttggcgacccgacacagccggctggaattcttacatcaagtttgagctgcgagtttgaggagaggtgccgcgaggtcgagcgagcacgtgcaatatacaagtatgctctagacagggtgcccaagggtcgtgctgaggaactgtataggaagtttcttgcatttgagaaacagtttggtgaccgtgagggaatagaagatgccattgtgggcaagaggagatttcagtacgaggatgaggttaggaagaatccactaaactacgactcatggtttgattatatcaggctggaggagagtgttgggaataaggacaggatcagggaggtgtacgagagggccattgccaacgtgccccctgcagaggagaagcgatactggcagaggtacatatacctctggattaactatgcactctatgaggagctagacgcacaagacagagaacggacaagagaggtttacaaggaatgcctgaggttgattcctcacaagaaattcacgtttgcaaagatgtggctcatggcggcccagtttgagatacggcagagaaatctaaaggctgcaagacaaattcttggaaatgcaattggaatggccccaaagggcaagatattcaagaaatatattgaaattgagctttatctgggcaactttgaccgttgtaggactctttatgagaaatatattgaatggtccccagcaaactgttatgcctggaggaagtatgccgaattggagaagaaccttagtgagactgatcgtgctcgatcaatatatgaacttgctattgcacaaccagcccttgatacaccagaggttctgtggaagcctaaatttaactcatctcttggtatcggtagtattctaattgagcatgaaagcattgaatctgacaatgtattgttcagacatgaaaagctctccttactgttatgggcggcagatgactgcgagggtttgagggtgacagctagggagtacttgcagtttgaaattgatgaaaatgaatttgagaggacaaggcaactatatgagagactgcttgataggacaaaacatttgaaggtatggatcagttatgctgagtttgaggcctctgctggcttgggcggtgaagacggtgaagacaaggagaaaaagaatgaagttagttatcaggagcagcagatggagcgggttcaaaaatgtagagctgtctttgaaagggcatttgattacttcagaaccagtgccccagagttgaaggaggaaagagctatgcttcttgaagaatggcttaataaggaggtgaactttggtgatcttggagatgtcagcttagtgcaaaagaaggcaccaagaaaagtcaagcggaagagaccaatccctacagaagatggctccactatagcatatgaggagtatatagattacattttccctgatgaagttgctctagcaccaaacctgaagatcctagaagctgcttacaaatggaagaagcaaaaaactggagatggcgatgagtgatcctggcatcttagtatggcattgtcgtggttcgtgagcattttgccacagccaaaatcagatgccctgcaacactctggccagagctatcggaatgagaatagtcattttttcatgtcacaaaggatgttgttgctgttgaaaagaatcctgcgaattacatttaacttgtaactgtatgggctgtagtttggtggccatgagttgcttccatgcgtcggaacaatgagggctacacaagtcgagatggtgtatgggagtttgtcttgcaattgcaaaggtatctctccagtctatgctttttatgaagtcagtaaactgggcgtcttcgacttcaatcgctggccatgccggtcacgctggtgtccagggttcagttggagggcttgcagttgcagaagatcctaccagcaaaacgtcatcttcagtgcctagcagctctgtttattagccagtgaggcttttggttcctaatagtctgttgccaagtttggttcttggcagagctaatttattagaaagaaaaacaagaaaagtacaagacaaccaaaaaaagcaaaaggaaagggaagggggacagctatagtaaagcgaagaaatcatgttcttttatgtgtgtcttgtgattttggcaagcctagacttgccatgaattgtcttattaggccattctcagttgtagttttatcacatcatttttaatgttaccacgtcaataatgtttaatgaaataaaaaaaataaaatatgctctcttaatgaagagttttagtggcatgattttataggctaacatgtgacttcaatgttg

SEQ ID NO: 10621 - DNA, 3085 bp, Zea Mays
cttttctcccttctaactcaacatttagctttttatagtccgttattatacttgctctaatagttagctcttcgctgctaatgtaggatttacttatctctctcataattttttttttggttttttgtgtctaaactctaaacccgttaagtttgtaaccgcctccctccttcaactgtctcagcagattgtgcagcaccgtgttctccctcccttcccaatcccctatcccgttactttccccggctccaccccaaaccctaatacgtcatggcgctcactacacggggcggcgccggcggcggggatcccgcgaaggcgccgtccgcctccgaccccagcctcggcttcctcaccaagcgcgataccgaggtcaagctaccccgcgcaacgcgggtcaagaacaagacccccgcgccgatccagattacggccgagcagatcctccgggaggccagggagaggcaggagcctgagatccgcccgcccaaacagaagatcacagacccccacgagctctccgattaccgcctccgtaagcggaaggagttcgaggacgtcatccgccgcgtgcgctggagcgtctcggcatgggtcaagtacgcgcggtgggaggagcagcagcgagacttcgcgcgcgcgcgctccgtctacgagcgcgcgctcgacgtcgcccaccgcgaccacacgctctggctcaaatatgctgaattcgagatgcggaaccggtttgtcaaccatgcccggaatgtctgggaccgcgcggtgtcgctcctcccccgggtggatcagctctggtacaagtacatccacatggaggagctgcttggtgcagttgccaatgcgcgccaggtgttcgagcgctggatgtcttggcgacccgacacagccggctggaattcttacatcaagtttgagctgcggtacggggaggtcgagcgtgccagggctatctatgagcgagtttgaggagaggtgccgcgaggtcgagcgagcacgtgcaatatacaagtatgctctagacagggtgcccaagggtcgtgctgaggaactgtataggaagtttcttgcatttgagaaacagtttggtgaccgtgagggaatagaagatgccattgtgggcaagaggagatttcagtacgaggatgaggttaggaagaatccactaaactacgactcatggtttgattatatcaggctggaggagagtgttgggaataaggacaggatcagggaggtgtacgagagggccattgccaacgtgccccctgcagaggagaagcgatactggcagaggtacatatacctctggattaactatgcactctatgaggagctagacgcacaagacagagaacggacaagagaggtttacaaggaatgcctgaggttgattcctcacaagaaattcacgtttgcaaagatgtggctcatggcggcccagtttgagatacggcagagaaatctaaaggctgcaagacaaattcttggaaatgcaattggaatggccccaaagggcaagatattcaagaaatatattgaaattgagctttatctgggcaactttgaccgttgtaggactctttatgagaaatatattgaatggtccccagcaaactgttatgcctggaggaagtatgccgaattggagaagaaccttagtgagactgatcgtgctcgatcaatatatgaacttgctattgcacaaccagcccttgatacaccagaggttctgtggaaggagtacttgcagtttgaaattgatgaaaatgaatttgagaggacaaggcaactatatgagagactgcttgataggacaaaacatttgaaggtatggatcagttatgctgagtttgaggcctctgctggcttgggcggtgaagacggtgaagacaaggagaaaaagaatgaagttagttatcaggagcagcagatggagcgggttcaaaaatgtagagctgtctttgaaagggcatttgattacttcagaaccagtgccccagagttgaaggaggaaagagctatgcttcttgaagaatggcttaataaggaggtgaactttggtgatcttggagatgtcagcttagtgcaaaagaaggcaccaagaaaagtcaagcggaagagaccaatccctacagaagatggctccactatagcatatgaggagtatatagattacattttccctgatgaagttgctctagcaccaaacctgaagatcctagaagctgcttacaaatggaagaagcaaaaaactggagatggcgatgagtgatcctggcatcttagtatggcattgtcgtggttcgtgagcattttgccacagccaaaatcagatgccctgcaacactctggccagagctatcggaatgagaatagtcattttttcatgtcacaaaggatgttgttgctgttgaaaagaatcctgcgaattacatttaacttgtaactgtatgggctgtagtttggtggccatgagttgcttccatgcgtcggaacaatgagggctacacaagtcgagatggtgtatgggagtttgtcttgcaattgcaaaggtatctctccagtctatgctttttatgaagtcagtaaactgggcgtcttcgacttcaatcgctggccatgccggtcacgctggtgtccagggttcagttggagggcttgcagttgcagaagatcctaccagcaaaacgtcatcttcagtgcctagcagctctgtttattagccagtgaggcttttggttcctaatagtctgttgccaagtttggttcttggcagagctaatttattagaaagaaaaacaagaaaagtacaagacaaccaaaaaaagcaaaaggaaagggaagggggacagctatagtaaagcgaagaaatcatgttcttttatgtgtgtcttgtgattttggcaagcctagacttgccatgaattgtcttattaggccattctcagttgtagttttatcacatcatttttaatgttaccacgtcaataatgtttaatgaaataaaaaaaataaaatatgctctcttaatgaagagttttagtggcatgattttataggctaacatgtgacttcaatgttg

SEQ ID NO: 10622 - DNA, 1696 bp, Zea Mays
cttctatagcgcaacaccgcctcctctctcagccagtcagccttatccccaaatcgcttcttctctgctgattccataccgcctcctctccctggccgatccatggtgctcgtctctagctcatgtcttgccgccggccgagcccctccccagcgcccttggagccggcgtcctctgccctcatctcattccccgacgccgccctctccccctcagtgctctgctggtcggcgtcttctccctgcccgacgtttctagcgccatggccgccgcgccttgggtcgcctgctccactgcgccgatccgcccatctccctgctgccgctctcccatggcgcgtccctgcatcttgcttcagctcgctctgccatctcccttggcgccctagccccaacgctgagctccctacccggccgcgcccctggtggttgagctcgccgagcttccttttctatcgctcgtcctcgcccattcggcgccctcatctcaagccagtccagcctctctaatcgccactctcccctatccccttgctgttagcacatggcgagctaaccccatgtgccagtagagttcgtcattccctaagcagcacctccctccatggatgcctcgttgtcgacttgtgcagttcatatttatcggtgaggtcccttttgtcttgtgttacttatctctttaaattgatacatgtgtgcttatgtgtgagatgtgaaggggaaaatcccaggattttggtggagaagaaagcacagttcaaatttgacgcccgccaggtgttcgacgaaaatgttcgaattgggtttcgtcgttgattttgacgcctgccaggtgttcatctcaaactacaatcaccgttgaaaatccgaggcgacgggaaagttaggtggcatcaccagtgatggcgttcgatccttgaaatgtacattatgtgataagagtaagcgtcactagagaatgggaattccaaggcgcaacaaatgatggtcctctccatcatgtcaacatgatcatatccgatgaaccggtgatctatatccactcaaatacatttatggtagcaacatgttgtacctaatatgtttttttatcacctgttaatattgatgccagctgtacaaacggttctgattacttatatcctctgatgtacttctacttagcaccatgttctaacttacacattgcttagtcacctctccagattgtacctttactcttttaaactaatatgtttattactaattttttacgaagtacaatcatgcaacatggactgtcaatgaatctaaataccatatcatttttctacaatgtcttctatttctactcatatgattctgttgtaccaatagggtacacctatccatgctaagattcaagtagataaagaatatgaactcatcttaagtctgtactatgttgtatactataatgttttatctggttgacaaccagcatcgtcactttaaatacaatcatactacagttctactaatacactgatttattgttctccacgcgcgcatgggcgcgcataatacactagtgtatacaagacagcctcaattcatctcctaacaaaaaagggggttaatattaggtgcatcttagcagatatgaaatatagtactatataagagagccacatgttacaagacaattgggttatagctacaagcttcgttatatgttc

SEQ ID NO: 10623 - DNA, 748 bp, Zea Mays
ttgctgcatgctttactttttgtggacctggaaggcatgtctttgtataaaggtgaagtaccttgaaagtgctgctaactggaaggcttcaaagaccttattttcttcacagcatccaagacaatgttcatttcatttcaaccccaccattactcctttcctatcataaagaaccatatgttcccatgaatagatgtgacacaactcacaaaatatcagtaaagccatactatagaacgagaactgttaggatagagattacatgcttgagaaatgcaatgtcaacataaagagcttgacacgagatcgattgtcgaggcaccatctgttgggactgctatacccaaaaggtggatcaatgccaacatattgttgaacaaaggtcattctgcactttggaagatagtaatctaatcgtaaatttcatggtatccttaaaaatatgatttcttataaatatggagaagatatacattatcgttggcttgttgatgtggctatatcctgttacttaaacgacttttagaaatgttaggcattgttcatgtcctcgggtccagttattgttgatttaagtcttaggataactacagttggtgaagcaatcaaaccaagaccaacgtggccattgaaagagacctcccaaccaaagtgaggtttggtcttgtacattccaacgccaatgacaagtatgaatatgggattttccatactgagctggacaaaatggtcacttgttctttattgt

SEQ ID NO: 10624 - DNA, 3907 bp, Zea Mays
tagggatttggcccaacaccacccgccgctctcctctccttccctccctccccggccaagaaggctgcctgttgtaaaacatttcgtctgctttttcacctttattacgcctagacttcggaggaggcccgagcgagcaggctttcctgctgtccaggaccaagcggccgttcactccgtcgcagtggatggagctggagcaccaggctctcatatacaagtatctcaatgccaaggcccccataccttccagcctgctcgtttccatcagcaagagcttcaggtcatccaacagagactctctaacgcagtgagctggaggcctctttaccaaggctacgcaaacgcagactccgacccagaacctgggaggtgccggcggacagacggaaagaagtggcggtgctccaaggaggcgatgcctgatcacaagtactgcgagcgccacatcaataggaaccgccaccgttcaagaaagcctgtggaaaaccaacctagaaaggccaccaaggaggtgactaccgctgctgctggctcgttgccgtgtgccgggccacaaggtagcttgaagaaggcaaaagttaatgactccaagccaggcactggcagctattggacagatagcttaaacaggacaatgctgagcagagagaaggcaaacaaaccgacggacgacgagtctttgctgcttagttcgacgaagaacagtcagcccaccttgtccctgctcactcaactgaagcagcagaacaaaccagataagttaggtcccacaccggaaaatgagccgaactcggacacgatgttgaaagcctggggtggcagccaccacaagagcatttcctccacacagcgccatgacgctgaatccctccaatcagtcctccaaaatttcagcctagcccagaatgacaggttggagtcagaaaagaacagatattctgattccgtgctagtctcatcggctttctattctgcagacggtccacaaactacctgccttacacctaacatgacacaagtgcagcaggactgcatatcaagctcctgggagatgcctcaaggtggacctctaggcgagatcttaacgaactccaagattagtgaggacttaagcaagtgtggatctaggtcatatggttggctattgaatcttgaccatgcaccatgattcctcaatccatggagagcttgacatagatatctcaccacggatgcaaacaatgagtcaggaaaaaagaaggtccaaatgaccgtactgtttaccccatgcatgctcgttatctacatttgtacttctatttttgtagtattcagctgttgaattatcagttcttctgaatctggctgtatcttaaacaaattctagtttccgtcaaatgatatcttgcttgctagatgcttaatgtttccttttcagcagaaacttcagtggtccattttaatcaaaagaaaactgtttcaagatcaagctctagtaagcaaagttccaaggaacttcttagttatccacatttttctcactttttccagacatgctgacaagccgcaccatcattatattaaataaatgtttagaagccctggttacatcccagatacacccttataattatatatttctcagactatggcctggataggatatatataggattcatatataggataattcaaaccatgataattcgaaccatggcctggataggaacagcagccacgtagccacaagtcatgtatgacaatctgatgaccacaaagaatccatgttcatgtattaaactcgataaaagaggacccatgacccctaatacagatatgatcatccagaaaagctatgatgacattttagaatgcacaagactgaagcagtgccagcaatctatccaacttgagaactcgccaaaaatcacaacagacaagtaaccagtagcatcattttggatattattgtcaccataactcaataaatgaataaagaaagcaaaaatgtgctaaacggaactcaaataagccatggacaacagaaaaaaaggcatactttacgtacaaagaataggtaatgcttatatctcatccagaaaatagtggttattatttctaacaccgcaacacagtcaatttcatgattcggacacgagcaacctgttccaatctgcaaagtctccaaatataacagtagacaaacagccaataccaacacttcaggccaagagaattcaaatataccatgggcatcaaaagaggttcatagttttcaagcaaaggtgaaggtgctggctcagacacacacagagctcatcaaaatatagtccttgaataattcaagtctcagcatcgagaaacaaacattttatcatcatagccacaaaggtcaaagggccataaccttgtaacaataaataaggaaaacttcaagttaaaaaaaaaggaaaacatactcatttgtactggctcagacacgcacaaaggtcatcaaagtttggtccttgaaaaaaaatcaagtatcaggatcgagaaacgtatgtttctgtcatcccagccaggccatacgaagacactacaaagaaatccaatcgacaacgtatgtttttgtcatcccagccaggtcatacatatgtttctgtcccaggccatccggatattatcctgtcaaagtgtcagctatagataaaaggatatttgtaccctgaattaattaccatcccatgaccagaataaataaacaatagtgcaaaacccttagtagacaaaaagtgtcaggaacacaaggatcagactagaaaccatcactgccaaaaagtaatcagcaggaataaaaatcgaaggtgataatgtcagcaggaaaaatagtaaacatggactctgcattgcatcggctcagacacgcacaaataaggtcatcacgttttgatccttatatggcattaagtaatcataatcaaccaaataacctttttgtcatcacagccatgcagcaatagcagcagagggagatctcatcaccaggcctcaactagcctgttcgctgcggctttaagacagctgttcagactgctgcagctgtaattcagagacaaaatactgtagcagaagccgtttcggaataagctgcagcgaactggctacattgattgaagagaaaaaatggctacagcctacagcataaagctgcagcaatcaaattgatgtgtgagggtgcgtaaccagaagcccattgtttactcgggctgcggctattagagccctagattgatctgggagcgactggaagaacgccatggccactgaatctggaaaccacagctccttgaatttgaccagcctcccattaataaataggcagagaaaaaattcaaccaagaaaagaaatcaagatcgattacacgacaaactcagtaagagtaaactctcagtctcagcaggtaaatatctattcaaatcgataaggatgagataactaactgaaagcaaagagggtggtgttgggaaagatatggccaacttgcgtctgttttgggtcaaattaagagcaactccaagagcatccataaaacttggacaaaagaacaactccaaaaaacaactgtcccacagcagctattttgaaacagcaatgtcattagccattttaatcaagtttcacctgacttcatcagattccaaggttcagaaccgtttccatcgtgctgcccatcccccagccatggagcagtcgtcaagacagccgaggtcagctacatctagctgcccagccaggagaggacacagggaggcagccatggtagctgccaactacagctgacggccgaccaggaaaattggctgccagccaggatctcaagtctcattggttaaaccagaattttcagcgtttcgacataacaacttgtagcagaatgaccag

SEQ ID NO: 10625 - DNA, 4183 bp, Zea Mays
tgagccctcatgaatgctagctaggagtatctactatatatggaggggcctggcctagcggtaccggccatagggatttggcccaacaccacccgccgctctcctctccttccctccctccccggccaagaaggctgcctgttgtaaaacatttcgtctgctttttcacctttattacgcctagacttcggaggaggcccgagcgagcaggctttcctgctgtccaggaccaagcggccgttcactccgtcgcagtggatggagctggagcaccaggctctcatatacaagtatctcaatgccaaggcccccataccttccagcctgctcgtttccatcagcaagagcttcaggtcatccaacagagtgagctggaggcctctttaccaaggctacgcaaacgcagactccgacccagaacctgggaggtgccggcggacagacggaaagaagtggcggtgctccaaggaggcgatgcctgatcacaagtactgcgagcgccacatcaataggaaccgccaccgttcaagaaagcctgtggaaaaccaacctagaaaggccaccaaggaggtgactaccgctgctgctggctcgttgccgtgtgccgggccacaaggtagcttgaagaaggcaaaagttaatgactccaagccaggcactggcagctattggacagatagcttaaacaggtaaataccaccagagtcatctccttgttttagcatcatatctgaataataaaatcccaacttaatacttgtgaatcctattataagagcatcgacgatgcttcattttcaagtactaatctggaacagtattagtatgttatggttctaaataatgttagttgccacttagcattcataataataattctcatttcgaaaacattgtacatattttcaggacaatgctgagcagagagaaggcaaacaaaccgacggacgacgagtctttgctgcttagttcgacgaagaacagtcagcccaccttgtccctgctcactcaactgaagcagcagaacaaaccagataagttaggtcccacaccggaaaatgagccgaactcggacacgatgttgaaagcctggggtggcagccaccacaagagcatttcctccacacagcgccatgacgctgaatccctccaatcagtcctccaaaatttcagcctagcccagaatgacaggttggagtcagaaaagaacagatattctgattccgtgctagtctcatcggctttctattctgcagacggtccacaaactacctgccttacacctaacatgacacaagtgcagcaggactgcatatcaagctcctgggagatgcctcaaggtggacctctaggcgagatcttaacgaactccaagattagtgaggacttaagcaagtgtggatctaggtcatatggttggctattgaatcttgaccatgcaccatgattcctcaatccatggagagcttgacatagatatctcaccacggatgcaaacaatgagtcaggaaaaaagaaggtccaaatgaccgtactgtttaccccatgcatgctcgttatctacatttgtacttctatttttgtagtattcagctgttgaattatcagttcttctgaatctggctgtatcttaaacaaattctagtttccgtcaaatgatatcttgcttgctagatgcttaatgtttccttttcagcagaaacttcagtggtccattttaatcaaaagaaaactgtttcaagatcaagctctagtaagcaaagttccaaggaacttcttagttatccacatttttctcactttttccagacatgctgacaagccgcaccatcattatattaaataaatgtttagaagccctggttacatcccagatacacccttataattatatatttctcagactatggcctggataggatatatataggattcatatataggataattcaaaccatgataattcgaaccatggcctggataggaacagcagccacgtagccacaagtcatgtatgacaatctgatgaccacaaagaatccatgttcatgtattaaactcgataaaagaggacccatgacccctaatacagatatgatcatccagaaaagctatgatgacattttagaatgcacaagactgaagcagtgccagcaatctatccaacttgagaactcgccaaaaatcacaacagacaagtaaccagtagcatcattttggatattattgtcaccataactcaataaatgaataaagaaagcaaaaatgtgctaaacggaactcaaataagccatggacaacagaaaaaaaggcatactttacgtacaaagaataggtaatgcttatatctcatccagaaaatagtggttattatttctaacaccgcaacacagtcaatttcatgattcggacacgagcaacctgttccaatctgcaaagtctccaaatataacagtagacaaacagccaataccaacacttcaggccaagagaattcaaatataccatgggcatcaaaagaggttcatagttttcaagcaaaggtgaaggtgctggctcagacacacacagagctcatcaaaatatagtccttgaataattcaagtctcagcatcgagaaacaaacattttatcatcatagccacaaaggtcaaagggccataaccttgtaacaataaataaggaaaacttcaagttaaaaaaaaaggaaaacatactcatttgtactggctcagacacgcacaaaggtcatcaaagtttggtccttgaaaaaaaatcaagtatcaggatcgagaaacgtatgtttctgtcatcccagccaggccatacgaagacactacaaagaaatccaatcgacaacgtatgtttttgtcatcccagccaggtcatacatatgtttctgtcccaggccatccggatattatcctgtcaaagtgtcagctatagataaaaggatatttgtaccctgaattaattaccatcccatgaccagaataaataaacaatagtgcaaaacccttagtagacaaaaagtgtcaggaacacaaggatcagactagaaaccatcactgccaaaaagtaatcagcaggaataaaaatcgaaggtgataatgtcagcaggaaaaatagtaaacatggactctgcattgcatcggctcagacacgcacaaataaggtcatcacgttttgatccttatatggcattaagtaatcataatcaaccaaataacctttttgtcatcacagccatgcagcaatagcagcagagggagatctcatcaccaggcctcaactagcctgttcgctgcggctttaagacagctgttcagactgctgcagctgtaattcagagacaaaatactgtagcagaagccgtttcggaataagctgcagcgaactggctacattgattgaagagaaaaaatggctacagcctacagcataaagctgcagcaatcaaattgatgtgtgagggtgcgtaaccagaagcccattgtttactcgggctgcggctattagagccctagattgatctgggagcgactggaagaacgccatggccactgaatctggaaaccacagctccttgaatttgaccagcctcccattaataaataggcagagaaaaaattcaaccaagaaaagaaatcaagatcgattacacgacaaactcagtaagagtaaactctcagtctcagcaggtaaatatctattcaaatcgataaggatgagataactaactgaaagcaaagagggtggtgttgggaaagatatggccaacttgcgtctgttttgggtcaaattaagagcaactccaagagcatccataaaacttggacaaaagaacaactccaaaaaacaactgtcccacagcagctattttgaaacagcaatgtcattagccattttaatcaagtttcacctgacttcatcagattccaaggttcagaaccgtttccatcgtgctgcccatcccccagccatggagcagtcgtcaagacagccgaggtcagctacatctagctgcccagccaggagaggacacagggaggcagccatggtagctgccaactacagctgacggccgaccaggaaaattggctgccagccaggatctcaagtctcattggttaaaccagaattttcagcgtttcgacataacaacttgtagcagaatgaccag

SEQ ID NO: 10626 - DNA, 4412 bp, Zea Mays
ttggccttcctcagtcctccgcaacgcatattcccttccctcgcgcccatccattcgttcctcccttcttggatggataccttctctgcgaaacatgatagacagcggtaggccactctgatacactacactcaagaaaatggactaacaagactattcacaaaaaagaaagaaaagcaaaagtcaaaaggacaacagcagcattcatggaacttgatgagccctcatgaatgctagctaggagtatctactatatatggaggggcctggcctagcggtaccggccatagggatttggcccaacaccacccgccgctctcctctccttccctccctccccggccaagaaggctgcctgttgtaaaacatttcgtctgctttttcacctttattacgcctagacttcggaggaggcccgagcgagcaggctttcctgctgtccaggaccaagcggccgttcactccgtcgcagtggatggagctggagcaccaggctctcatatacaagtatctcaatgccaaggcccccataccttccagcctgctcgtttccatcagcaagagcttcaggtcatccaacagaggtatgcatgcatgttctcaaccacaagactaaaaaggaggttctctacttcaaagctgttatgctagcacctgcaataaataaaccaaacgagaagagagagaaagtacatatattattttgcacaaatgaataaagaataaccaaaccattatatatgccataaagattgaccactgtattgcctttttgagtataaatgtaatcagagcttgacagactctctaacgcagtgagctggaggcctctttaccaaggctacgcaaacgcagactccgacccagaacctgggaggtgccggcggacagacggaaagaagtggcggtgctccaaggaggcgatgcctgatcacaagtactgcgagcgccacatcaataggaaccgccaccgttcaagaaagcctgtggaaaaccaacctagaaaggccaccaaggaggtgactaccgctgctgctggctcgttgccgtgtgccgggccacaaggtagcttgaagaaggcaaaagttaatgactccaagccaggcactggcagctattggacagatagcttaaacaggacaatgctgagcagagagaaggcaaacaaaccgacggacgacgagtctttgctgcttagttcgacgaagaacagtcagcccaccttgtccctgctcactcaactgaagcagcagaacaaaccagataagttaggtcccacaccggaaaatgagccgaactcggacacgatgttgaaagcctggggtggcagccaccacaagagcatttcctccacacagcgccatgacgctgaatccctccaatcagtcctccaaaatttcagcctagcccagaatgacaggttggagtcagaaaagaacagatattctgattccgtgctagtctcatcggctttctattctgcagacggtccacaaactacctgccttacacctaacatgacacaagtgcagcaggactgcatatcaagctcctgggagatgcctcaaggtggacctctaggcgagatcttaacgaactccaagattagtgaggacttaagcaagtgtggatctaggtcatatggttggctattgaatcttgaccatgcaccatgattcctcaatccatggagagcttgacatagatatctcaccacggatgcaaacaatgagtcaggaaaaaagaaggtccaaatgaccgtactgtttaccccatgcatgctcgttatctacatttgtacttctatttttgtagtattcagctgttgaattatcagttcttctgaatctggctgtatcttaaacaaattctagtttccgtcaaatgatatcttgcttgctagatgcttaatgtttccttttcagcagaaacttcagtggtccattttaatcaaaagaaaactgtttcaagatcaagctctagtaagcaaagttccaaggaacttcttagttatccacatttttctcactttttccagacatgctgacaagccgcaccatcattatattaaataaatgtttagaagccctggttacatcccagatacacccttataattatatatttctcagactatggcctggataggatatatataggattcatatataggataattcaaaccatgataattcgaaccatggcctggataggaacagcagccacgtagccacaagtcatgtatgacaatctgatgaccacaaagaatccatgttcatgtattaaactcgataaaagaggacccatgacccctaatacagatatgatcatccagaaaagctatgatgacattttagaatgcacaagactgaagcagtgccagcaatctatccaacttgagaactcgccaaaaatcacaacagacaagtaaccagtagcatcattttggatattattgtcaccataactcaataaatgaataaagaaagcaaaaatgtgctaaacggaactcaaataagccatggacaacagaaaaaaaggcatactttacgtacaaagaataggtaatgcttatatctcatccagaaaatagtggttattatttctaacaccgcaacacagtcaatttcatgattcggacacgagcaacctgttccaatctgcaaagtctccaaatataacagtagacaaacagccaataccaacacttcaggccaagagaattcaaatataccatgggcatcaaaagaggttcatagttttcaagcaaaggtgaaggtgctggctcagacacacacagagctcatcaaaatatagtccttgaataattcaagtctcagcatcgagaaacaaacattttatcatcatagccacaaaggtcaaagggccataaccttgtaacaataaataaggaaaacttcaagttaaaaaaaaaggaaaacatactcatttgtactggctcagacacgcacaaaggtcatcaaagtttggtccttgaaaaaaaatcaagtatcaggatcgagaaacgtatgtttctgtcatcccagccaggccatacgaagacactacaaagaaatccaatcgacaacgtatgtttttgtcatcccagccaggtcatacatatgtttctgtcccaggccatccggatattatcctgtcaaagtgtcagctatagataaaaggatatttgtaccctgaattaattaccatcccatgaccagaataaataaacaatagtgcaaaacccttagtagacaaaaagtgtcaggaacacaaggatcagactagaaaccatcactgccaaaaagtaatcagcaggaataaaaatcgaaggtgataatgtcagcaggaaaaatagtaaacatggactctgcattgcatcggctcagacacgcacaaataaggtcatcacgttttgatccttatatggcattaagtaatcataatcaaccaaataacctttttgtcatcacagccatgcagcaatagcagcagagggagatctcatcaccaggcctcaactagcctgttcgctgcggctttaagacagctgttcagactgctgcagctgtaattcagagacaaaatactgtagcagaagccgtttcggaataagctgcagcgaactggctacattgattgaagagaaaaaatggctacagcctacagcataaagctgcagcaatcaaattgatgtgtgagggtgcgtaaccagaagcccattgtttactcgggctgcggctattagagccctagattgatctgggagcgactggaagaacgccatggccactgaatctggaaaccacagctccttgaatttgaccagcctcccattaataaataggcagagaaaaaattcaaccaagaaaagaaatcaagatcgattacacgacaaactcagtaagagtaaactctcagtctcagcaggtaaatatctattcaaatcgataaggatgagataactaactgaaagcaaagagggtggtgttgggaaagatatggccaacttgcgtctgttttgggtcaaattaagagcaactccaagagcatccataaaacttggacaaaagaacaactccaaaaaacaactgtcccacagcagctattttgaaacagcaatgtcattagccattttaatcaagtttcacctgacttcatcagattccaaggttcagaaccgtttccatcgtgctgcccatcccccagccatggagcagtcgtcaagacagccgaggtcagctacatctagctgcccagccaggagaggacacagggaggcagccatggtagctgccaactacagctgacggccgaccaggaaaattggctgccagccaggatctcaagtctcattggttaaaccagaattttcagcgtttcgacataacaacttgtagcagaatgaccag

SEQ ID NO: 10627 - DNA, 4226 bp, Zea Mays
ctgtagatttgagattctgctttatttaaccgctcgctgctacaccgtccgtggtacccgttgtcaactcactgtcactgctgctcataataacaataataaaaatattgtactcctttgcgctcgtcaaaaaaaaaacaaatctctctctgaaaactcatatccaaagacaaaagaacggacgaaaggaccggtgctatttaagggccacccctctagtcccccaaagagcccaccacacaaacggacaaacccctgcctcccaccagaaaagcaagcagaccacacccacccgcctctaaaccaaccagcctgtccccattccccgtccccggcgatgcacgccagcatccactccctcccgtcagcctcttcttctccccctgatgagcgctgagttctgtgctgccgctgctggtgctgtggccatggagctcggagtcggggatgtgatggggctgcagcaaggcatcgccgccgccaccgggccatcgtccggagacagcgacctgggtcttctcaagcgagcaggcctcgcccaggcagccacctcctacccctcccctttcctcgaccaacagaagatgctcaggttctccaaggcggcggcggctcacacgtcgccctcagtgagctggaggcctctttaccaaggctacgcaaacgcagactccgacccagaacctgggaggtgccggcggacagacggaaagaagtggcggtgctccaaggaggcgatgcctgatcacaagtactgcgagcgccacatcaataggaaccgccaccgttcaagaaagcctgtggaaaaccaacctagaaaggccaccaaggaggtgactaccgctgctgctggctcgttgccgtgtgccgggccacaaggtagcttgaagaaggcaaaagttaatgactccaagccaggcactggcagctattggacagatagcttaaacaggacaatgctgagcagagagaaggcaaacaaaccgacggacgacgagtctttgctgcttagttcgacgaagaacagtcagcccaccttgtccctgctcactcaactgaagcagcagaacaaaccagataagttaggtcccacaccggaaaatgagccgaactcggacacgatgttgaaagcctggggtggcagccaccacaagagcatttcctccacacagcgccatgacgctgaatccctccaatcagtcctccaaaatttcagcctagcccagaatgacaggttggagtcagaaaagaacagatattctgattccgtgctagtctcatcggctttctattctgcagacggtccacaaactacctgccttacacctaacatgacacaagtgcagcaggactgcatatcaagctcctgggagatgcctcaaggtggacctctaggcgagatcttaacgaactccaagattagtgaggacttaagcaagtgtggatctaggtcatatggttggctattgaatcttgaccatgcaccatgattcctcaatccatggagagcttgacatagatatctcaccacggatgcaaacaatgagtcaggaaaaaagaaggtccaaatgaccgtactgtttaccccatgcatgctcgttatctacatttgtacttctatttttgtagtattcagctgttgaattatcagttcttctgaatctggctgtatcttaaacaaattctagtttccgtcaaatgatatcttgcttgctagatgcttaatgtttccttttcagcagaaacttcagtggtccattttaatcaaaagaaaactgtttcaagatcaagctctagtaagcaaagttccaaggaacttcttagttatccacatttttctcactttttccagacatgctgacaagccgcaccatcattatattaaataaatgtttagaagccctggttacatcccagatacacccttataattatatatttctcagactatggcctggataggatatatataggattcatatataggataattcaaaccatgataattcgaaccatggcctggataggaacagcagccacgtagccacaagtcatgtatgacaatctgatgaccacaaagaatccatgttcatgtattaaactcgataaaagaggacccatgacccctaatacagatatgatcatccagaaaagctatgatgacattttagaatgcacaagactgaagcagtgccagcaatctatccaacttgagaactcgccaaaaatcacaacagacaagtaaccagtagcatcattttggatattattgtcaccataactcaataaatgaataaagaaagcaaaaatgtgctaaacggaactcaaataagccatggacaacagaaaaaaaggcatactttacgtacaaagaataggtaatgcttatatctcatccagaaaatagtggttattatttctaacaccgcaacacagtcaatttcatgattcggacacgagcaacctgttccaatctgcaaagtctccaaatataacagtagacaaacagccaataccaacacttcaggccaagagaattcaaatataccatgggcatcaaaagaggttcatagttttcaagcaaaggtgaaggtgctggctcagacacacacagagctcatcaaaatatagtccttgaataattcaagtctcagcatcgagaaacaaacattttatcatcatagccacaaaggtcaaagggccataaccttgtaacaataaataaggaaaacttcaagttaaaaaaaaaggaaaacatactcatttgtactggctcagacacgcacaaaggtcatcaaagtttggtccttgaaaaaaaatcaagtatcaggatcgagaaacgtatgtttctgtcatcccagccaggccatacgaagacactacaaagaaatccaatcgacaacgtatgtttttgtcatcccagccaggtcatacatatgtttctgtcccaggccatccggatattatcctgtcaaagtgtcagctatagataaaaggatatttgtaccctgaattaattaccatcccatgaccagaataaataaacaatagtgcaaaacccttagtagacaaaaagtgtcaggaacacaaggatcagactagaaaccatcactgccaaaaagtaatcagcaggaataaaaatcgaaggtgataatgtcagcaggaaaaatagtaaacatggactctgcattgcatcggctcagacacgcacaaataaggtcatcacgttttgatccttatatggcattaagtaatcataatcaaccaaataacctttttgtcatcacagccatgcagcaatagcagcagagggagatctcatcaccaggcctcaactagcctgttcgctgcggctttaagacagctgttcagactgctgcagctgtaattcagagacaaaatactgtagcagaagccgtttcggaataagctgcagcgaactggctacattgattgaagagaaaaaatggctacagcctacagcataaagctgcagcaatcaaattgatgtgtgagggtgcgtaaccagaagcccattgtttactcgggctgcggctattagagccctagattgatctgggagcgactggaagaacgccatggccactgaatctggaaaccacagctccttgaatttgaccagcctcccattaataaataggcagagaaaaaattcaaccaagaaaagaaatcaagatcgattacacgacaaactcagtaagagtaaactctcagtctcagcaggtaaatatctattcaaatcgataaggatgagataactaactgaaagcaaagagggtggtgttgggaaagatatggccaacttgcgtctgttttgggtcaaattaagagcaactccaagagcatccataaaacttggacaaaagaacaactccaaaaaacaactgtcccacagcagctattttgaaacagcaatgtcattagccattttaatcaagtttcacctgacttcatcagattccaaggttcagaaccgtttccatcgtgctgcccatcccccagccatggagcagtcgtcaagacagccgaggtcagctacatctagctgcccagccaggagaggacacagggaggcagccatggtagctgccaactacagctgacggccgaccaggaaaattggctgccagccaggatctcaagtctcattggttaaaccagaattttcagcgtttcgacataacaacttgtagcagaatgaccag

SEQ ID NO: 10628 - DNA, 4415 bp, Zea Mays
ctgtagatttgagattctgctttatttaaccgctcgctgctacaccgtccgtggtacccgttgtcaactcactgtcactgctgctcataataacaataataaaaatattgtactcctttgcgctcgtcaaaaaaaaaacaaatctctctctgaaaactcatatccaaagacaaaagaacggacgaaaggaccggtgctatttaagggccacccctctagtcccccaaagagcccaccacacaaacggacaaacccctgcctcccaccagaaaagcaagcagaccacacccacccgcctctaaaccaaccagcctgtccccattccccgtccccggcgatgcacgccagcatccactccctcccgtcagcctcttcttctccccctgatgagcgctgagttctgtgctgccgctgctggtgctgtggccatggagctcggagtcggggatgtgatggggctgcagcaaggcatcgccgccgccaccgggccatcgtccggagacagcgacctgggtcttctcaagcgagcaggcctcgcccaggcagccacctcctacccctcccctttcctcgaccaacagaagatgctcaggttctccaaggcggcggcggctcacacgtcgccctcaggcctagacttcggaggaggcccgagcgagcaggctttcctgctgtccaggaccaagcggccgttcactccgtcgcagtggatggagctggagcaccaggctctcatatacaagtatctcaatgccaaggcccccataccttccagcctgctcgtttccatcagcaagagcttcaggtcatccaacagagtgagctggaggcctctttaccaaggctacgcaaacgcagactccgacccagaacctgggaggtgccggcggacagacggaaagaagtggcggtgctccaaggaggcgatgcctgatcacaagtactgcgagcgccacatcaataggaaccgccaccgttcaagaaagcctgtggaaaaccaacctagaaaggccaccaaggaggtgactaccgctgctgctggctcgttgccgtgtgccgggccacaaggtagcttgaagaaggcaaaagttaatgactccaagccaggcactggcagctattggacagatagcttaaacaggacaatgctgagcagagagaaggcaaacaaaccgacggacgacgagtctttgctgcttagttcgacgaagaacagtcagcccaccttgtccctgctcactcaactgaagcagcagaacaaaccagataagttaggtcccacaccggaaaatgagccgaactcggacacgatgttgaaagcctggggtggcagccaccacaagagcatttcctccacacagcgccatgacgctgaatccctccaatcagtcctccaaaatttcagcctagcccagaatgacaggttggagtcagaaaagaacagatattctgattccgtgctagtctcatcggctttctattctgcagacggtccacaaactacctgccttacacctaacatgacacaagtgcagcaggactgcatatcaagctcctgggagatgcctcaaggtggacctctaggcgagatcttaacgaactccaagattagtgaggacttaagcaagtgtggatctaggtcatatggttggctattgaatcttgaccatgcaccatgattcctcaatccatggagagcttgacatagatatctcaccacggatgcaaacaatgagtcaggaaaaaagaaggtccaaatgaccgtactgtttaccccatgcatgctcgttatctacatttgtacttctatttttgtagtattcagctgttgaattatcagttcttctgaatctggctgtatcttaaacaaattctagtttccgtcaaatgatatcttgcttgctagatgcttaatgtttccttttcagcagaaacttcagtggtccattttaatcaaaagaaaactgtttcaagatcaagctctagtaagcaaagttccaaggaacttcttagttatccacatttttctcactttttccagacatgctgacaagccgcaccatcattatattaaataaatgtttagaagccctggttacatcccagatacacccttataattatatatttctcagactatggcctggataggatatatataggattcatatataggataattcaaaccatgataattcgaaccatggcctggataggaacagcagccacgtagccacaagtcatgtatgacaatctgatgaccacaaagaatccatgttcatgtattaaactcgataaaagaggacccatgacccctaatacagatatgatcatccagaaaagctatgatgacattttagaatgcacaagactgaagcagtgccagcaatctatccaacttgagaactcgccaaaaatcacaacagacaagtaaccagtagcatcattttggatattattgtcaccataactcaataaatgaataaagaaagcaaaaatgtgctaaacggaactcaaataagccatggacaacagaaaaaaaggcatactttacgtacaaagaataggtaatgcttatatctcatccagaaaatagtggttattatttctaacaccgcaacacagtcaatttcatgattcggacacgagcaacctgttccaatctgcaaagtctccaaatataacagtagacaaacagccaataccaacacttcaggccaagagaattcaaatataccatgggcatcaaaagaggttcatagttttcaagcaaaggtgaaggtgctggctcagacacacacagagctcatcaaaatatagtccttgaataattcaagtctcagcatcgagaaacaaacattttatcatcatagccacaaaggtcaaagggccataaccttgtaacaataaataaggaaaacttcaagttaaaaaaaaaggaaaacatactcatttgtactggctcagacacgcacaaaggtcatcaaagtttggtccttgaaaaaaaatcaagtatcaggatcgagaaacgtatgtttctgtcatcccagccaggccatacgaagacactacaaagaaatccaatcgacaacgtatgtttttgtcatcccagccaggtcatacatatgtttctgtcccaggccatccggatattatcctgtcaaagtgtcagctatagataaaaggatatttgtaccctgaattaattaccatcccatgaccagaataaataaacaatagtgcaaaacccttagtagacaaaaagtgtcaggaacacaaggatcagactagaaaccatcactgccaaaaagtaatcagcaggaataaaaatcgaaggtgataatgtcagcaggaaaaatagtaaacatggactctgcattgcatcggctcagacacgcacaaataaggtcatcacgttttgatccttatatggcattaagtaatcataatcaaccaaataacctttttgtcatcacagccatgcagcaatagcagcagagggagatctcatcaccaggcctcaactagcctgttcgctgcggctttaagacagctgttcagactgctgcagctgtaattcagagacaaaatactgtagcagaagccgtttcggaataagctgcagcgaactggctacattgattgaagagaaaaaatggctacagcctacagcataaagctgcagcaatcaaattgatgtgtgagggtgcgtaaccagaagcccattgtttactcgggctgcggctattagagccctagattgatctgggagcgactggaagaacgccatggccactgaatctggaaaccacagctccttgaatttgaccagcctcccattaataaataggcagagaaaaaattcaaccaagaaaagaaatcaagatcgattacacgacaaactcagtaagagtaaactctcagtctcagcaggtaaatatctattcaaatcgataaggatgagataactaactgaaagcaaagagggtggtgttgggaaagatatggccaacttgcgtctgttttgggtcaaattaagagcaactccaagagcatccataaaacttggacaaaagaacaactccaaaaaacaactgtcccacagcagctattttgaaacagcaatgtcattagccattttaatcaagtttcacctgacttcatcagattccaaggttcagaaccgtttccatcgtgctgcccatcccccagccatggagcagtcgtcaagacagccgaggtcagctacatctagctgcccagccaggagaggacacagggaggcagccatggtagctgccaactacagctgacggccgaccaggaaaattggctgccagccaggatctcaagtctcattggttaaaccagaattttcagcgtttcgacataacaacttgtagcagaatgaccag

SEQ ID NO: 10629 - DNA, 1329 bp, Zea Mays
attaagatggacacatataacatactttattattttgttaaggaagaattacttcaaacttacctgctgttcacatgctactcctagatatcatgctgaaggcatcatgtagctgtgattttgtaaaggctgaaacacgtgaatgtgtaaatgaatttaatatgaagcaacactatcaataatggcatgtgtgacattggtgaagaatttattatcagttagtgctgatgatgaggttcctataaaaagtgtaactatccgcaaaattcctcgtgttctagaagaaatgcccctctatgacatcctaaacgaatttcagaaaggtcacagccacatggctgtagtcataaggaaaaacaatccaagttaccaaccagctgaacaagctgctaatgatggtggaacttttgaggtgtccattgctattgatgataagaacaacgaaaaggtcgtgaaaaaccttccgccaccactgcaaagatggaagagctaccctaacactcagaacacatcaaatagaggaaataggcctaaaaaatggtccaaagatcaagcagacgttctgcaggtccataaagagcccttgcccacactgagcgaagatgaagaggctgttggtatcataaccatggaggatgtcatagaggagctcctgcaggaggagatatacgacgagacagacgtacatgaggaacaatgacgctggccttgcgccctccctccagctgttagaaagtgcgcttttatgcaaaacttatgtatagataggcagatacactgagagatattttagccgtagcccgtagccgttcattgtagtactataggtggctggctgtctcgagtattggtaaagactgttcggagtgcgtcgttcgttctcgtccagaacagctgggttctgggcatccggggaagaaacggaggcgttgacgcgtgtgtgtaggttcagaagaaaccccaataagataattgcgttgttatatgatgccgctcgcattattaggacgaatctgttgacatatagtcttataaattaaaaacaatgttttgaaaacatagtagagttgaaatttaaaataggagatgggatggaagctgctgaagatagacttagtgccaacttttaccgagatcgtggcacgcagtctggtgtttgttgtatgtagtttggaggtgattgagacatatatggtgtgtttggtttgtagagtcactctatgcttaatgaggtgatgcattataagtttatttaattaatttttgtgtaatcaacccattctttatgtatatactaattattagtttatgagaaatgaggtggtgatg

SEQ ID NO: 10630 - DNA, 1403 bp, Zea Mays
attaaatggtgcctaattggaggaattaaattgcatggactcgtggctggcaaaggtggagaattaacccatgatgaaactaccataatagcaggagctcttgaactgactgaaaagaaagctaaagatgctatgacacccttgtgtcaaacatttgcaattgatataaatgcaaaacttgacaggaatctaatgcaagaggtacttgagaaagggcatagcagagttcctgtgtattatgaaaagaaaacgaatattattggattgatattggtgaagaatttattatcagttagtgctgatgatgaggttcctataaaaagtgtaactatccgcaaaattcctcgtgttctagaagaaatgcccctctatgacatcctaaacgaatttcagaaaggtcacagccacatggctgtagtcataaggaaaaacaatccaagttaccaaccagctgaacaagctgctaatgatggtggaacttttgaggtgtccattgctattgatgataagaacaacgaaaaggtcgtgaaaaaccttccgccaccactgcaaagatggaagagctaccctaacactcagaacacatcaaatagaggaaataggcctaaaaaatggtccaaagatcaagcagacgttctgcaggtccataaagagcccttgcccacactgagcgaagatgaagaggctgttggtatcataaccatggaggatgtcatagaggagctcctgcaggaggagatatacgacgagacagacgtacatgaggaacaatgacgctggccttgcgccctccctccagctgttagaaagtgcgcttttatgcaaaacttatgtatagataggcagatacactgagagatattttagccgtagcccgtagccgttcattgtagtactataggtggctggctgtctcgagtattggtaaagactgttcggagtgcgtcgttcgttctcgtccagaacagctgggttctgggcatccggggaagaaacggaggcgttgacgcgtgtgtgtaggttcagaagaaaccccaataagataattgcgttgttatatgatgccgctcgcattattaggacgaatctgttgacatatagtcttataaattaaaaacaatgttttgaaaacatagtagagttgaaatttaaaataggagatgggatggaagctgctgaagatagacttagtgccaacttttaccgagatcgtggcacgcagtctggtgtttgttgtatgtagtttggaggtgattgagacatatatggtgtgtttggtttgtagagtcactctatgcttaatgaggtgatgcattataagtttatttaattaatttttgtgtaatcaacccattctttatgtatatactaattattagtttatgagaaatgaggtggtgatg

SEQ ID NO: 10631 - DNA, 1514 bp, Zea Mays
gcacctcgtttcttccggccatggcggaggttgacttcaccagctgccgccgacggtcatggaaccttggccggtcgtcggtcggcagtcgcccctgcccactggagtactggctgtctggcttgcactctcgccgaccagggcccgagcaatatcgctggcaaaggtggagaattaacccatgatgaaactaccataatagcaggagctcttgaactgactgaaaagaaagctaaagatgctatgacacccttgtgtcaaacatttgcaattgatataaatgcaaaacttgacaggaatctaatgcaagaggtacttgagaaagggcatagcagagttcctgtgtattatgaaaagaaaacgaatattattggattgatattggtgaagaatttattatcagttagtgctgatgatgaggttcctataaaaagtgtaactatccgcaaaattcctcgtgttctagaagaaatgcccctctatgacatcctaaacgaatttcagaaaggtcacagccacatggctgtagtcataaggaaaaacaatccaagttaccaaccagctgaacaagctgctaatgatggtggaacttttgaggtgtccattgctattgatgataagaacaacgaaaaggtcgtgaaaaaccttccgccaccactgcaaagatggaagagctaccctaacactcagaacacatcaaatagaggaaataggcctaaaaaatggtccaaagatcaagcagacgttctgcaggtccataaagagcccttgcccacactgagcgaagatgaagaggctgttggtatcataaccatggaggatgtcatagaggagctcctgcaggaggagatatacgacgagacagacgtacatgaggaacaatgacgctggccttgcgccctccctccagctgttagaaagtgcgcttttatgcaaaacttatgtatagataggcagatacactgagagatattttagccgtagcccgtagccgttcattgtagtactataggtggctggctgtctcgagtattggtaaagactgttcggagtgcgtcgttcgttctcgtccagaacagctgggttctgggcatccggggaagaaacggaggcgttgacgcgtgtgtgtaggttcagaagaaaccccaataagataattgcgttgttatatgatgccgctcgcattattaggacgaatctgttgacatatagtcttataaattaaaaacaatgttttgaaaacatagtagagttgaaatttaaaataggagatgggatggaagctgctgaagatagacttagtgccaacttttaccgagatcgtggcacgcagtctggtgtttgttgtatgtagtttggaggtgattgagacatatatggtgtgtttggtttgtagagtcactctatgcttaatgaggtgatgcattataagtttatttaattaatttttgtgtaatcaacccattctttatgtatatactaattattagtttatgagaaatgaggtggtgatg

SEQ ID NO: 10632 - DNA, 2138 bp, Zea Mays
gcccacatgtcagcagctcgtgggtggccacccgtcctgtagcatggccaccgctggccacgcctcactgcgtagttgacacacgcacgcccgcgcccacgctcctaaataaagaaggcaactgcggaatcgctcgcgacgcaggaggtggggtgagttcgcgggtcgagcggaggagaagcttctggtggtggtggctctcgtcgtcaagcaggaggggagagaggagccggcggcggaggtgaatggcggtggagtaccactgctgctcggcggcctttttcgagcacatcgtcatcatcatcgtgctcgtgctcttcgcgggcctcatgtcgggcctcaccctgggcctcatgtcccttagcctcgtcgatctcgaggtcctcgccaagtccggcaccgagcaggatcgcaagcacgcagctaagattttacctgttgtgaagaaccagcaccttctgctatgcactcttctaatctgcaatgcggctgcaatggaggctttgcccatattccttgatagcttggtgacagcttggggtgctattttaatatcagtgacactgattctgctttttgatcttaccacagtccatctgctcacattatgggctggctattggtgcctcagttgctccattagtccgtgtgcttgtttgggtctgctttcctattgcctatcctataagcaagctattggactatgtgctgggtcatggtcagacagctctcttccgtagagctgaactaaaaacacttgtcactctgcacgggaatgaggctggcaaaggtggagaattaacccatgatgaaactaccataatagcaggagctcttgaactgactgaaaagaaagctaaagatgctatgacacccttgtgtcaaacatttgcaattgatataaatgcaaaacttgacaggaatctaatgcaagaggtacttgagaaagggcatagcagagttcctgtgtattatgaaaagaaaacgaatattattggattgatattggtgaagaatttattatcagttagtgctgatgatgaggttcctataaaaagtgtaactatccgcaaaattcctcgtgttctagaagaaatgcccctctatgacatcctaaacgaatttcagaaaggtcacagccacatggctgtagtcataaggaaaaacaatccaagttaccaaccagctgaacaagctgctaatgatggtggaacttttgaggtgtccattgctattgatgataagaacaacgaaaaggtcgtgaaaaaccttccgccaccactgcaaagatggaagagctaccctaacactcagaacacatcaaatagaggaaataggcctaaaaaatggtccaaagatcaagcagacgttctgcaggtccataaagagcccttgcccacactgagcgaagatgaagaggctgttggtatcataaccatggaggatgtcatagaggagctcctgcaggaggagatatacgacgagacagacgtacatgaggaacaatgacgctggccttgcgccctccctccagctgttagaaagtgcgcttttatgcaaaacttatgtatagataggcagatacactgagagatattttagccgtagcccgtagccgttcattgtagtactataggtggctggctgtctcgagtattggtaaagactgttcggagtgcgtcgttcgttctcgtccagaacagctgggttctgggcatccggggaagaaacggaggcgttgacgcgtgtgtgtaggttcagaagaaaccccaataagataattgcgttgttatatgatgccgctcgcattattaggacgaatctgttgacatatagtcttataaattaaaaacaatgttttgaaaacatagtagagttgaaatttaaaataggagatgggatggaagctgctgaagatagacttagtgccaacttttaccgagatcgtggcacgcagtctggtgtttgttgtatgtagtttggaggtgattgagacatatatggtgtgtttggtttgtagagtcactctatgcttaatgaggtgatgcattataagtttatttaattaatttttgtgtaatcaacccattctttatgtatatactaattattagtttatgagaaatgaggtggtgatg

SEQ ID NO: 10633 - DNA, 1781 bp, Zea Mays
gcccacatgtcagcagctcgtgggtggccacccgtcctgtagcatggccaccgctggccacgcctcactgcgtagttgacacacgcacgcccgcgcccacgctcctaaataaagaaggcaactgcggaatcgctcgcgacgcaggaggtggggtgagttcgcgggtcgagcggaggagaagcttctggtggtggtggctctcgtcgtcaagcaggaggggagagaggagccggcggcggaggtgaatggcggtggagtaccactgctgctcggcggcctttttcgagcacatcgtcatcatcatcgtgctcgtgctcttcgcgggcctcatgtcgggcctcaccctgggcctcatgtcccttagcctcgtcgatctcgaggtcctcgccaagtccggcaccgagcaggatcgcaagcacgcaggctggcaaaggtggagaattaacccatgatgaaactaccataatagcaggagctcttgaactgactgaaaagaaagctaaagatgctatgacacccttgtgtcaaacatttgcaattgatataaatgcaaaacttgacaggaatctaatgcaagaggtacttgagaaagggcatagcagagttcctgtgtattatgaaaagaaaacgaatattattggattgatattggtgaagaatttattatcagttagtgctgatgatgaggttcctataaaaagtgtaactatccgcaaaattcctcgtgttctagaagaaatgcccctctatgacatcctaaacgaatttcagaaaggtcacagccacatggctgtagtcataaggaaaaacaatccaagttaccaaccagctgaacaagctgctaatgatggtggaacttttgaggtgtccattgctattgatgataagaacaacgaaaaggtcgtgaaaaaccttccgccaccactgcaaagatggaagagctaccctaacactcagaacacatcaaatagaggaaataggcctaaaaaatggtccaaagatcaagcagacgttctgcaggtccataaagagcccttgcccacactgagcgaagatgaagaggctgttggtatcataaccatggaggatgtcatagaggagctcctgcaggaggagatatacgacgagacagacgtacatgaggaacaatgacgctggccttgcgccctccctccagctgttagaaagtgcgcttttatgcaaaacttatgtatagataggcagatacactgagagatattttagccgtagcccgtagccgttcattgtagtactataggtggctggctgtctcgagtattggtaaagactgttcggagtgcgtcgttcgttctcgtccagaacagctgggttctgggcatccggggaagaaacggaggcgttgacgcgtgtgtgtaggttcagaagaaaccccaataagataattgcgttgttatatgatgccgctcgcattattaggacgaatctgttgacatatagtcttataaattaaaaacaatgttttgaaaacatagtagagttgaaatttaaaataggagatgggatggaagctgctgaagatagacttagtgccaacttttaccgagatcgtggcacgcagtctggtgtttgttgtatgtagtttggaggtgattgagacatatatggtgtgtttggtttgtagagtcactctatgcttaatgaggtgatgcattataagtttatttaattaatttttgtgtaatcaacccattctttatgtatatactaattattagtttatgagaaatgaggtggtgatg

SEQ ID NO: 10634 - DNA, 929 bp, Zea Mays
ctttgtctttaaagtatatgatttaaactcttccttttgcatatctacatacaactacaagcaaaaactgagcagctgctattcccagcaaagactttcaaaacaaacaaacagaacagggttatccgagtcagccatttcctggtcagtagagggtagggagcagtaggtccattgttggaacctgaagtcaatgcggtcgtctagctccgtgagcagattgtttattttaccagagcagattgtccattttaccattcatacttagactgttcattttacacctatgttgctaactacgcagagcacaggtatgttaagagcccaacaaaaacatattttccattgtttctagtaaacctatgctatatgtaacacatgtatagactcaaaacactatgaaagaactcactctatctagaaatgaacccagtgtattaaaaaagaaatcaacaacccagactaaccaaggcagaagcatattgtgcagatatttatgtcagttttcattggaccccagtgtgtttaattatatgtcagttaagtattgtctgttggtaaaaacagaacaccttcaagcaaaaataaacacaaaaaacatctggcctagagttgtgtagtgcttcactgtttttatagtgattaagagttgtgtagtgattcacatggcagaacatattgtgctactgctatgagttctagtaaatttatatgctcactacgcacaaaattattttccccaacccaagagccgcattatccaaaaccacccgtgcgatttcttgattcatataaccccaattctcgccaaaagcattgcacaacatgaatttgaagagataacagaaaggggcaacggggtctgggtacgtccgaaaaaggataatcaatatttgagctatatgctgtcatgacaaaactaatagata

SEQ ID NO: 10635 - DNA, 1121 bp, Zea Mays
aaggcaggcagccacagcacctgaccaccacaacccatcgagcttcccatccggaccggaccccatcaggagcagaggcagagtcgagagtctctcagcgaagccaccgtccgacgccatgtgctaccaggtgaggtgcggcacctgcggcaagaccacgtgggccgggtgcggccgccacgtcgcgtcggtgcacgcgcagatctcggagggccagcactgcgcctgccgcgactggcccggcgtcgaccccgccaccgccccggccggcgtcaagaaggccgccagcgccgctgacgacgctgggaaggactccggcaccgccgcctccactcccgcgcagggcggcgctgcgcagtgaggtcaaaaggtaaccagctccgccggcctcggagacatcgtccacatcgacccagatttcttcagataccttcgcttcgacttcgagtcgagggggaagcttcagctagaggggcgaagccagcgggagccatcagccatgtgctaccaggtgaagtgcgggtcgtgcggcaagtccacgtgggcgggctgcggccgccacgtcgcctccgtgcaccgccagattccccagggccagcactgcgcctgccgcgattggccgggcgttgccccggccggcgacaaggcggccgccgcggaggggccttcgtccacgtctgtctgcaccatcctgtgatttgagcccgcgcatgttacctctggtgtaggggatgtgcgattgtgtacggttatatttgtctctcttttttttgctcttttttcctaatctctaaatacaatacttctcttgcgagctcgaaaaaaatacttatcattttgttgtgtgatggtgggaaagaataatggtgcatcgccgctgtttccagcaagtcttttaaaaggcgaaggggtacatatcaccagaggggccagcctgaatatttcaagaatcgatcaattgaaaaggaatgacctgaaaagccattcatcaagtatcaattgacacatcaaaattttctacccttgcaaacgggtgggaaagtcttgaacaatgggagatgacgctttctgcaatactgattgaatagaagagtaaagatgataagcgggacagtgaagcc

SEQ ID NO: 10636 - DNA, 736 bp, Zea Mays
accgaaccggctgacaaaaatttcgagcagcagagtaaacatggcgggaatttttggcgccatccattctcccgccgccgcctgcctatttagcccccggcgcccgccgtctcttcgtccactcagcccactaccttccatattttccctcatctcccgccgcctgcacccaacaagcctctcgacgctagtcatggccgcttccaacggcgccgccgcggtcgacgagaccgtcgccgccaccgactccgtgcaggagcctccccagaagatctccaagatctctcccctgctcaaggtggaggacctcgacgccaccgtccgtggggacggagggttcgggtccaccggcgtctgaagggattcggtgtctaggttaggatggcgatgcaagccttggtgtcttttgttggctctaagaaatcgtgatgttcaccatcactatcctgctatcgataattagtattgagattagtacgtaggttgcgtagttagctcgatgcacgtactattgtcgagaactcgctattctgtgatgttgaaaatgtctaatgatcctgcagtactgtcgcattagacccatgaagaagcccaatttgacggcggatatggcctgatacccaaattactaacaacttgaggcggctatcgataatttcgctcgcctttgcaagtgtggaattgcatgactatggaccattcaacgacaataactgcctgtctattctacatgtct

SEQ ID NO: 10637 - DNA, 1845 bp, Zea Mays
caacaactggaatgggtccatcagaccatcaactgccagagtaatgaagaagaaaatgataccgttgcgaggttgatgtttgagctgtgggacaggattatctgcatgtacattctgttgcagagatacttagcgctgcatggatctgtcactgaaatattattcgataattggtagctagagaagcaagctaacaaggattatatcatcccattattttggtggcacttggcagccttcttttgccctagctttgataaaaggggcctggggaagggataaaccgaggcaagcctcctccctgctgctaaaaattaggatcttccagatttattgccatttaactagagtatttttttgtgagggccatttaactagagcagaacacctcatcatgttgctaaagttatgaaaacttttggagacatggacttccacctgttcgaagatgcataattgcatatatttggattttgcggtgattcttggaaattcagcacttcagctatctgtgtatattctctggattggacccctgaaaagaattggatagtcagtgcctctcaagatggaaggttaattgtgtggaatgcattgacaagccagaaaacacatgccataaagctgcattgcccatgggttatggcgtgtgcttttgcacccaatggccaatctgtcgcctgtggtggtcttgatagtgcgtgctctattttcaatctcaattctcaagcagacagagatgggaacatgccagtatcaagaattcttactggacacaagggctatgtctcatcatgtcaatatgtcccagatcaggaaacacgtcttattactagttcaggtgatcaaacatgtgttctttgggatgttactactggacagaggatatcaatatttggtggtgaattcccatcagggcatacagctgatgttcaaagtgtgtccatcaactcatcaaatacaaatatgtttgtctctggctcatgtgatacaactgtgaggctgtgggatatcagaattgcaagtcgagctgttcgaacctaccatggacatgaggatgatgttaacagtgtgaagtttttccctgatggccataggtttggtactggctcagatgatggcacatgtagattatttgatatgagaacagggcatcaacttcaggtgtacagtagggagcctgatagaaatagtaatgaactacctactgttacatctattgcattttcaatatcaggaaggctactttttgctggttactccaatggtgactgttatgtgtgggacacacttctcgccgaggtggtacttaatttgggaaacctgcaaaactcccatgatggccgtataagttgcctcgggatgtcatctgatgggagtgcattgtgtacaggaagctgggacaaaaatttgaagatttgggccttcagtggacaccggaagatagtttgaaggccaacttttctcccccatgttgtatgttccttgttgccccttaacaacggacagtggtgattggtgaccaactcgacttgttcctgggaatccctttgttgttttgtaagctctgttcgcgctatgtttaatggaaaaatgtgcaatttgtcagtgtcacggcgctacatcttgttgagttggtaactgtttatactgttattacgagaatatcagtaacgtgtgatctgcccttttctttgtacaaccgtttgatcttttcaggttttgtgaagtagcatgtatttccttaatcaatttatcatatcagtttgtccatttgctgaattaagaacattagcttaatggggcgtactatatgcattttatgtttagtaatcaccacacttt

SEQ ID NO: 10638 - DNA, 2525 bp, Zea Mays
gtcatgcgctgtacgggcgagcaactagcccccacctcttcccaagaggcaaaacctgccccaacctccctcacactttgtcagtttgccgtcgctgtcggcgccgccgcctgtcctaatctcctctgagtccagcggccacctcctccaccgggagctccccgtaccataaccgcagtccgcagccattggaatttccgcttcatgcgtggatcctcgtagaccccgacccgcgtgcactcaatccctaggcggcggcctccggcgcgaggctagcgggcggcacccatggcgtccgtggcggagctcaaggagaagcacgccgcagctacggcgtcggtgaactccctgcgcgagcgcctccgccagcgccgggagacgctcctcgacaccgacgtggcgaggtactccaagtcgcaggggagggtgccggtgagcttcaaccctacggatctggtctgctgccgcacgctgcagggccatagcggaaagatgattaatatatgataattacatggagccagactgccagagtaatgaagaagaaaatgataccgttgcgaggttgatgtttgagctgtgggacaggattatctgcatgtacattctgttgcagagatacttagcgctgcatggatctgtcactgaaatattattcgataattggtagctagaggtacaagtaaacaattctgcaattctactatatgaggggggataatgattatttctagggggcaagtcaaatcatcattgtaaaagggaaatcattctttctcttcagaagcaagctaacaaggattatatcatcccattattttggtggcacttggcagccttcttttgccctagctttgataaaaggggcctggggaagggataaaccgaggcaagcctcctccctgctgctaaaaattaggatcttccagatttattgccatttaactagagtatttttttgtgagggccatttaactagagcagaacacctcatcatgttgctaaagttatgaaaacttttggagacatggacttccacctgttcgaagatgcataattgcatatatttggattttgcggtgattcttggaaattcagcacttcagctatctgtgtagggtactacttgcaaaattgctgcatcaaatggtttagtggtattctattaactcctaagtcatcaatcatcacaggtatattctctggattggacccctgaaaagaattggatagtcagtgcctctcaagatggaaggttaattgtgtggaatgcattgacaagccagaaaacacatgccataaagctgcattgcccatgggttatggcgtgtgcttttgcacccaatggccaatctgtcgcctgtggtggtcttgatagtgcgtgctctattttcaatctcaattctcaagcagacagagatgggaacatgccagtatcaagaattcttactggacacaagggctatgtctcatcatgtcaatatgtcccagatcaggaaacacgtcttattactagttcaggtgatcaaacatgtgttctttgggatgttactactggacagaggatatcaatatttggtggtgaattcccatcagggcatacagctgatgttcaaagtgtgtccatcaactcatcaaatacaaatatgtttgtctctggctcatgtgatacaactgtgaggctgtgggatatcagaattgcaagtcgagctgttcgaacctaccatggacatgaggatgatgttaacagtgtgaagtttttccctgatggccataggtttggtactggctcagatgatggcacatgtagattatttgatatgagaacagggcatcaacttcaggtgtacagtagggagcctgatagaaatagtaatgaactacctactgttacatctattgcattttcaatatcaggaaggctactttttgctggttactccaatggtgactgttatgtgtgggacacacttctcgccgaggtggtacttaatttgggaaacctgcaaaactcccatgatggccgtataagttgcctcgggatgtcatctgatgggagtgcattgtgtacaggaagctgggacaaaaatttgaagatttgggccttcagtggacaccggaagatagtttgaaggccaacttttctcccccatgttgtatgttccttgttgccccttaacaacggacagtggtgattggtgaccaactcgacttgttcctgggaatccctttgttgttttgtaagctctgttcgcgctatgtttaatggaaaaatgtgcaatttgtcagtgtcacggcgctacatcttgttgagttggtaactgtttatactgttattacgagaatatcagtaacgtgtgatctgcccttttctttgtacaaccgtttgatcttttcaggttttgtgaagtagcatgtatttccttaatcaatttatcatatcagtttgtccatttgctgaattaagaacattagcttaatggggcgtactatatgcattttatgtttagtaatcaccacacttt

SEQ ID NO: 10639 - DNA, 2215 bp, Zea Mays
agatgtcatgcgctgtacgggcgagcaactagcccccacctcttcccaagaggcaaaacctgccccaacctccctcacactttgtcagtttgccgtcgctgtcggcgccgccgcctgtcctaatctcctctgagtccagcggccacctcctccaccgggagctccccgtaccataaccgcagtccgcagccattggaatttccgcttcatgcgtggatcctcgtagaccccgacccgcgtgcactcaatccctaggcggcggcctccggcgcgaggctagcgggcggcacccatggcgtccgtggcggagctcaaggagaagcacgccgcagctacggcgtcggtgaactccctgcgcgagcgcctccgccagcgccgggagacgctcctcgacaccgacgtggcgaggtactccaagtcgcaggggagggtgccggtgagcttcaaccctacggatctggtctgctgccgcacgctgcagggccatagcggaaagactgccagagtaatgaagaagaaaatgataccgttgcgaggttgatgtttgagctgtgggacaggattatctgcatgtacattctgttgcagagatacttagcgctgcatggatctgtcactgaaatattattcgataattggtagctagagaagcaagctaacaaggattatatcatcccattattttggtggcacttggcagccttcttttgccctagctttgataaaaggggcctggggaagggataaaccgagaacacctcatcatgttgctaaagttatgaaaacttttggagacatggacttccacctgttcgaagatgcataattgcatatatttggattttgcggtgattcttggaaattcagcacttcagctatctgtgtatattctctggattggacccctgaaaagaattggatagtcagtgcctctcaagatggaaggttaattgtgtggaatgcattgacaagccagaaaacacatgccataaagctgcattgcccatgggttatggcgtgtgcttttgcacccaatggccaatctgtcgcctgtggtggtcttgatagtgcgtgctctattttcaatctcaattctcaagcagacagagatgggaacatgccagtatcaagaattcttactggacacaagggctatgtctcatcatgtcaatatgtcccagatcaggaaacacgtcttattactagttcaggtgatcaaacatgtgttctttgggatgttactactggacagaggatatcaatatttggtggtgaattcccatcagggcatacagctgatgttcaaagtgtgtccatcaactcatcaaatacaaatatgtttgtctctggctcatgtgatacaactgtgaggctgtgggatatcagaattgcaagtcgagctgttcgaacctaccatggacatgaggatgatgttaacagtgtgaagtttttccctgatggccataggtttggtactggctcagatgatggcacatgtagattatttgatatgagaacagggcatcaacttcaggtgtacagtagggagcctgatagaaatagtaatgaactacctactgttacatctattgcattttcaatatcaggaaggctactttttgctggttactccaatggtgactgttatgtgtgggacacacttctcgccgaggtggtacttaatttgggaaacctgcaaaactcccatgatggccgtataagttgcctcgggatgtcatctgatgggagtgcattgtgtacaggaagctgggacaaaaatttgaagatttgggccttcagtggacaccggaagatagtttgaaggccaacttttctcccccatgttgtatgttccttgttgccccttaacaacggacagtggtgattggtgaccaactcgacttgttcctgggaatccctttgttgttttgtaagctctgttcgcgctatgtttaatggaaaaatgtgcaatttgtcagtgtcacggcgctacatcttgttgagttggtaactgtttatactgttattacgagaatatcagtaacgtgtgatctgcccttttctttgtacaaccgtttgatcttttcaggttttgtgaagtagcatgtatttccttaatcaatttatcatatcagtttgtccatttgctgaattaagaacattagcttaatggggcgtactatatgcattttatgtttagtaatcaccacacttt

SEQ ID NO: 10640 - DNA, 1189 bp, Zea Mays
tcatcggcctctcacggtccaggctccagcgatccgatccgaccgccgtccacgcgccacggcccacgcacgtgggcatgcacaggcgcacagcacagcgcgtgtcccgcacagctcagctgcctgcttaagactctggtgcgcgtacaccagacaccggatgccttccttgcactggcccgcgtcgggacctacgtgctagcgccataccataggcggaggccacccccgcgtaggcgtagccgcgtaggcatacgattcctgcgtcatctcgcctcccgtggtcgacgagctcgcgtccacgtttaaatggctccactcacacttggcctcgttctgctgcagctcgtcccttttgccccaatcttcttctccaaaccacatcctctggcctctgacaggtgacgagtcccatgggtgccgcggcgaggaagcccgccgccgctctgctgccaatctggctctgtctcgtctgcgtgtcaagtactgcggcgccggcgcagcccaaggcgggcgggtggtgcgtggcgcgggacggcgcttcggacgcggagctgcaggcggacctggactacgcgtgctcgcaggtgggcgtcgactgcggcgccatccagcccggcggcgcgtgcttcgagcccaacacggtgcacgcccacgcagcgtacgccatgaaccagctgtaccaggcggccgggcggcaaccgtggaactgcgacttccgggcgtccgccacgctcacctccgagaacccaagctacggcgcatgcgtgtacaccgggggaggccaataatacaccgcgtggcagcgcacgattagttttgcgtgtaccatgcatgatgccgagcgagggaagttgggcccacaggctacagcaaggaggtctggactaccatggatgccaatgcgatccacggaggcgaagcatcctcttgtttggcgcgtcctttccagatgccttgcctgccaggctgggatgtgtttgtaacttcgtgtaaaaagaactgttagatgtttgccagtgtcacgtgatctttgtgcatatagtacgcgtgtcttaatttacaagtggaatgagattgtatgtgtgattaatttttttaaataatgttttatatataaaaatgttagaatatagtataaatgaattgtctgtatcctcctattaacttaatcattttgcattgaatt

SEQ ID NO: 10641 - DNA, 3490 bp, Zea Mays
cacccacccggcccctgtcgcgtttccgtagttcctgtcctgtccgcgagccgcgtcagcgtcagtgcgtcaccggcctcccgtccgtcgccgccgccgggggcccatccacatccgccgccgcgggcccgtccgtccaccacaacgccgccatccgcggccgaaggcgctcccccgtccgcccgccaccacgccaccgcctcgcccctgtccgctgccgcgccgccgtcagctcggccccgtccgcaaccgtggccccatctacatctgtcgtcaccgccgccctcccatcacacgccgccatccgtccccttcggaagcagtgaagtgcttgcgcatcctctacctctctttgataaaactgggcttgggcccgctccaccacgaaggaacaagggaagggaaaggaagcagcaagcgctccgccgacctccccggtcgccgcaccgcttccctcccacgtcgcagacgccgcgcccgtcgcccgactcggaagaacggtcctggcccggcgctcgctcgcccgccgttagcttgtacccctcctgctcggatccaagaacgattccggtatcgacggcggcggcggtgttcctgttgtcaccggcgcgtttcgtctcttttggggcctgctcccggggttcttgagttgttaatgtcaagtgagaaaccgactgtaccagacattgttttaatcccccaccgtccggttcttttttgcacatgccgttgattcaatagttgtccttcactctgacacccggaggaaaataaaaaggaaaggaaaaataagtgttgaggcagtgaagggcaaaaagatcaaatttacgtttagcgaaggtagctgtgtgagaatttgttaattctgaagttgagtgttaggagagtttgtgagggctgtggaatgtcgaaggtgaagaacaataatggttatcatggagtcactgagccaatctcgctgagtggaccgactgagaaggaccttatgcagacagctgaggttgaaaaggactctatgagaggcaagatgaggctatcttgcgagaagaggttttaggcaagctggaccagactgtgaaagcttggattaagaaggctactaggatcagcgggtatggggagcaatttgtgcatgaagcaaatgcaaagatctttacatttggttcataccgtcttggggtacatggccctggtgccgacattgacaccctatgtgttggtccaagacatgcaactcgaaacgagtacttcttcagatggcttcatgatatcctagctgagatgccagaagtttctgagttacatccagtaccagatgctcatgtgcctgttctgggattcaaaattaatggggtctcaattgaccttttgtatgctaatcttgctcatgcagtgattcctgaggacctagatctttctcaggactctatactgcataatgtcgatgaacagactgttcgtagtctaaatgggtgtcgagttactgatcaaattctaagattggttccaaacattctgagttttcgcacaaccttaagattcataaggtgttggggaaagcgccgtggggtttactcaaatgttatgggatttctgggtggtataaactgggcaattcttgtgggtcgcatctgtcaattgtacccaaatgcatcaccaagcatgttgatatcccgttttttccgagtctacagcaaatggaagtggcctaatcctgttatgctttgccatattgaggaaggttatcttggtctccctgtttgggatccaagaagaaattacagagacaggggccatcaaatgcctattattacacctgcttacccttgcatgaattcgagctacaatgtatctgttagtactaggtatgtgatggtccaagaattcacgcaagcatttgagatttgtcaggccatagatgaaggaaaagcagactgggatgcattgtttgagccatatccattttttgaatcatataaaaattatctagaagttaatatcacagcgagaaatgaagatgacctcaggaattggaaaggatgggtggaatctcgccttcgcactcttgtattaaagattgagcgttattcacatgagatgatccttgcacacccatatcccaaagatttctcagataaatccaggcccttacatatcttttacttcatgggtctttggagaaaacaaactacccaagctcaagaaactgagcaattcgacatcaggggaattgtaaatgagtttaagaatactatttgtgcatatcaacaccggaaagaaggaatggacattgaagtgtcccatgtaaaaagaaaagaaatccctttgtttgtttttcctggtggagtgcgtccttctcgtacttctagaacaacgcacaagaacagccgtgccattccaacacgtgatgtttcagctgatgatcaagtgggaaacctattgggcgttgccagttgtagtgatgctcaacatgtaccatgtaaaggcagctatatgaaacaaccagaaccagattttgctggaggctttcagttgccaggaagtatttctctgttgccccctagcttacccaataaagtagttctgaatgggtctgctaattttcatgcagaatctattgagagtgaacatccagaacactatcaggaaattcaaaaagggaatgtgcaggcagtgctgcaaacaacttgctgaagttatccccagctattccagccacacctgatgaacttgatgagctgatatcctatcaaactaatcagaaagatgtaaatgctgaaaataacttggagatcggttctgaaaataacttggaacaaatatgcagtctgaggccccaagaatctaataataatctgaagcgtaaagccaatcaagagctcgagccacttgagcttgccgtcccatccactggtgctgcgccgcaatcgacaggaactgccccaagaaaaccactcaggttgaggttaacgactttggggaaaccgaagccagctgaaggaacttcctgaatggaattgcccaggagccaacatacctagagcttgtttttccttgtattgaagcaaggatatgtggaagcgctcggcacatagcctgctttggcactgcgagttgaaacgaaatggaaaacggaggccgcctgacgtaaatgagtgcgattgtaataaattgtatgtagttcatagctgggttggtatcagagttcaccatttcgtttttgctgtagcgaatttcgtttttttaaccaaagtttgactcttatattttttgaatttggaaccaaaatccataaaaaacctgaccgaaattcgcatcttggtcaacagcgagcagcgaaaattggaaatttcaccaaaattcggtgatttccgagaaacgaatccgtggttgggcatagatgtacgcagcggtacattttctcgacgacttagctatgcttgtaattgcaatgatgttcaaacggaagtggatatcgtctttgaagcat

SEQ ID NO: 10642 - DNA, 3586 bp, Zea Mays
cacccacccggcccctgtcgcgtttccgtagttcctgtcctgtccgcgagccgcgtcagcgtcagtgcgtcaccggcctcccgtccgtcgccgccgccgggggcccatccacatccgccgccgcgggcccgtccgtccaccacaacgccgccatccgcggccgaaggcgctcccccgtccgcccgccaccacgccaccgcctcgcccctgtccgctgccgcgccgccgtcagctcggccccgtccgcaaccgtggccccatctacatctgtcgtcaccgccgccctcccatcacacgccgccatccgtccccttcggaagcagtgaagtgcttgcgcatcctctacctctctttgataaaactgggcttgggcccgctccaccacgaaggaacaagggaagggaaaggaagcagcaagcgctccgccgacctccccggtcgccgcaccgcttccctcccacgtcgcagacgccgcgcccgtcgcccgactcggaagaacggtcctggcccggcgctcgctcgcccgccgttagcttgtacccctcctgctcggatccaagaacgattccggtatcgacggcggcggcggtgttcctgttgtcaccggcgcgtttcgtctcgtgcgtctcgttctgtaactggaaaagaagccgcatcattttctttttttactcttagttatttctgatttatttgggtcctgctctttctcatctagttttggggcctgctcccggggttcttgagttgttaatgtcaagtgagaaaccgactgtaccagacattgttttaatcccccaccgtccggttcttttttgcacatgccgttgattcaatagttgtccttcactctgacacccggaggaaaataaaaaggaaaggaaaaataagtgttgaggcagtgaagggcaaaaagatcaaatttacgtttagcgaaggtagctgtgtgagaatttgttaattctgaagttgagtgttaggagagtttgtgagggctgtggaatgtcgaaggtgaagaacaataatggttatcatggagtcactgagccaatctcgctgagtggaccgactgagaaggaccttatgcagacagctgaggttgaaaagtacctttcagatgcaggactctatgagaggcaagatgaggctatcttgcgagaagaggttttaggcaagctggaccagactgtgaaagcttggattaagaaggctactaggatcagcgggtatggggagcaatttgtgcatgaagcaaatgcaaagatctttacatttggttcataccgtcttggggtacatggccctggtgccgacattgacaccctatgtgttggtccaagacatgcaactcgaaacgagtacttcttcagatggcttcatgatatcctagctgagatgccagaagtttctgagttacatccagtaccagatgctcatgtgcctgttctgggattcaaaattaatggggtctcaattgaccttttgtatgctaatcttgctcatgcagtgattcctgaggactctatactgcataatgtcgatgaacagactgttcgtagtctaaatgggtgtcgagttactgatcaaattctaagattggttccaaacattctgagttttcgcacaaccttaagattcataaggtgttggggaaagcgccgtggggtttactcaaatgttatgggatttctgggtggtataaactgggcaattcttgtgggtcgcatctgtcaattgtacccaaatgcatcaccaagcatgttgatatcccgttttttccgagtctacagcaaatggaagtggcctaatcctgttatgctttgccatattgaggaaggttatcttggtctccctgtttgggatccaagaagaaattacagagacaggggccatcaaatgcctattattacacctgcttacccttgcatgaattcgagctacaatgtatctgttagtactaggtatgtgatggtccaagaattcacgcaagcatttgagatttgtcaggccatagatgaaggaaaagcagactgggatgcattgtttgagccatatccattttttgaatcatataaaaattatctagaagttaatatcacagcgagaaatgaagatgacctcaggaattggaaaggatgggtggaatctcgccttcgcactcttgtattaaagattgagcgttattcacatgagatgatccttgcacacccatatcccaaagatttctcagataaatccaggcccttacatatcttttacttcatgggtctttggagaaaacaaactacccaagctcaagaaactgagcaattcgacatcaggggaattgtaaatgagtttaagaatactatttgtgcatatcaacaccggaaagaaggaatggacattgaagtgtcccatgtaaaaagaaaagaaatccctttgtttgtttttcctggtggagtgcgtccttctcgtacttctagaacaacgcacaagaacagccgtgccattccaacacgtgatgtttcagctgatgatcaagtgggaaacctattgggcgttgccagttgtagtgatgctcaacatgtaccatgtaaaggcagctatatgaaacaaccagaaccagattttgctggaggctttcagttgccaggaagtatttctctgttgccccctagcttacccaataaagtagttctgaatgggtctgctaattttcatgcagaatctattgagagtgaacatccagaacactatcaggaaattcaaaaagggaatgtgcaggcagtgctgcaaacaacttgctgaagttatccccagctattccagccacacctgatgaacttgatgagctgatatcctatcaaactaatcagaaagatgtaaatgctgaaaataacttggagatcggttctgaaaataacttggaacaaatatgcagtctgaggccccaagaatctaataataatctgaagcgtaaagccaatcaagagctcgagccacttgagcttgccgtcccatccactggtgctgcgccgcaatcgacaggaactgccccaagaaaaccactcaggttgaggttaacgactttggggaaaccgaagccagctgaaggaacttcctgaatggaattgcccaggagccaacatacctagagcttgtttttccttgtattgaagcaaggatatgtggaagcgctcggcacatagcctgctttggcactgcgagttgaaacgaaatggaaaacggaggccgcctgacgtaaatgagtgcgattgtaataaattgtatgtagttcatagctgggttggtatcagagttcaccatttcgtttttgctgtagcgaatttcgtttttttaaccaaagtttgactcttatattttttgaatttggaaccaaaatccataaaaaacctgaccgaaattcgcatcttggtcaacagcgagcagcgaaaattggaaatttcaccaaaattcggtgatttccgagaaacgaatccgtggttgggcatagatgtacgcagcggtacattttctcgacgacttagctatgcttgtaattgcaatgatgttcaaacggaagtggatatcgtctttgaagcat

SEQ ID NO: 10643 - DNA, 3673 bp, Zea Mays
cacccacccggcccctgtcgcgtttccgtagttcctgtcctgtccgcgagccgcgtcagcgtcagtgcgtcaccggcctcccgtccgtcgccgccgccgggggcccatccacatccgccgccgcgggcccgtccgtccaccacaacgccgccatccgcggccgaaggcgctcccccgtccgcccgccaccacgccaccgcctcgcccctgtccgctgccgcgccgccgtcagctcggccccgtccgcaaccgtggccccatctacatctgtcgtcaccgccgccctcccatcacacgccgccatccgtccccttcggaagcagtgaagtgcttgcgcatcctctacctctctttgataaaactgggcttgggcccgctccaccacgaaggaacaagggaagggaaaggaagcagcaagcgctccgccgacctccccggtcgccgcaccgcttccctcccacgtcgcagacgccgcgcccgtcgcccgactcggaagaacggtcctggcccggcgctcgctcgcccgccgttagcttgtacccctcctgctcggatccaagaacgattccggtatcgacggcggcggcggtgttcctgttgtcaccggcgcgtttcgtctcgtgcgtctcgttctgtaactggaaaagaagccgcatcattttctttttttactcttagttatttctgatttatttgggtcctgctctttctcatctagttttggggcctgctcccggggttcttgagttgttaatgtcaagtgagaaaccgactgtaccagacattgttttaatcccccaccgtccggttcttttttgcacatgccgttgattcaatagttgtccttcactctgacacccggaggaaaataaaaaggaaaggaaaaataagtgttgaggcagtgaagggcaaaaagatcaaatttacgtttagcgaaggtagctgtgtgagaatttgttaattctgaagttgagtgttaggagagtttgtgagggctgtggaatgtcgaaggtgaagaacaataatggttatcatggagtcactgagccaatctcgctgagtggaccgactgagaaggaccttatgcagacagctgaggttgaaaagtacctttcagatgcaggactctatgagaggcaagatgaggctatcttgcgagaagaggttttaggcaagctggaccagactgtgaaagcttggattaagaaggctactaggatcagcgggtatggggagcaatttgtgcatgaagcaaatgcaaagatctttacatttggttcataccgtcttggggtacatggccctggtgccgacattgacaccctatgtgttggtccaagacatgcaactcgaaacgagtacttcttcagatggcttcatgatatcctagctgagatgccagaagtttctgagttacatccagtaccagatgctcatgtgcctgttctgggattcaaaattaatggggtctcaattgaccttttgtatgctaatcttgctcatgcagtgattcctgaggacctagatctttctcaggactctatactgcataatgtcgatgaacagactgttcgtagtctaaatgggtgtcgagttactgatcaaattctaagattggttccaaacattctgagttttcgcacaaccttaagattcataaggtgttggggaaagcgccgtggggtttactcaaatgttatgggatttctgggtggtataaactgggcaattcttgtgggtcgcatctgtcaattgtacccaaatgcatcaccaagcatgttgatatcccgttttttccgagtctacagcaaatggaagtggcctaatcctgttatgctttgccatattgaggaaggttatcttggtctccctgtttgggatccaagaagaaattacagagacaggggccatcaaatgcctattattacacctgcttacccttgcatgaattcgagctacaatgtatctgttagtactaggccatagatgaaggaaaagcagactgggatgcattgtttgagccatatccattttttgaatcatataaaaattatctagaagttaatatcacagcgagaaatgaagatgacctcaggaattggaaaggatgggtggaatctcgccttcgcactcttgtattaaagattgagcgttattcacatgagatgatccttgcacacccatatcccaaagatttctcagataaatccaggcccttacatatcttttacttcatgggtctttggagaaaacaaactacccaagctcaagaaactgagcaattcgacatcaggggaattgtaaatgagtttaagaatactatttgtgcatatcaacaccggaaagaaggaatggacattgaagtgtcccatgtaaaaagaaaagaaatccctttgtttgtttttcctggtggagtgcgtccttctcgtacttctagaacaacgcacaagaacagccgtgccattccaacacgtgatgtttcagctgatgatcaagtgggaaacctattgggcgttgccagttgtagtgatgctcaacatgtaccatgtaaaggcagctatatgaaacaaccagaaccagattttgctggaggctttcagttgccaggaagtatttctctgttgccccctagcttacccaataaagtagttctgaatgggtctgctaattttcatgcagaatctattgagagtgaacatccagaacactatcaggaaagtaagtttgtggctgtgcagaataccgtgtgccttgtagtcaagcaacctaacagtttgctcccaaattcaaacaacaattcacaattgtatggatctgattcctctcttaacagttcaaaaagggaatgtgcaggcagtgctgcaaacaacttgctgaagttatccccagctattccagccacacctgatgaacttgatgagctgatatcctatcaaactaatcagaaagatgtaaatgctgaaaataacttggagatcggttctgaaaataacttggaacaaatatgcagtctgaggccccaagaatctaataataatctgaagcgtaaagccaatcaagagctcgagccacttgagcttgccgtcccatccactggtgctgcgccgcaatcgacaggaactgccccaagaaaaccactcaggttgaggttaacgactttggggaaaccgaagccagctgaaggaacttcctgaatggaattgcccaggagccaacatacctagagcttgtttttccttgtattgaagcaaggatatgtggaagcgctcggcacatagcctgctttggcactgcgagttgaaacgaaatggaaaacggaggccgcctgacgtaaatgagtgcgattgtaataaattgtatgtagttcatagctgggttggtatcagagttcaccatttcgtttttgctgtagcgaatttcgtttttttaaccaaagtttgactcttatattttttgaatttggaaccaaaatccataaaaaacctgaccgaaattcgcatcttggtcaacagcgagcagcgaaaattggaaatttcaccaaaattcggtgatttccgagaaacgaatccgtggttgggcatagatgtacgcagcggtacattttctcgacgacttagctatgcttgtaattgcaatgatgttcaaacggaagtggatatcgtctttgaagcat

SEQ ID NO: 10644 - DNA, 4244 bp, Zea Mays
cacccacccggcccctgtcgcgtttccgtagttcctgtcctgtccgcgagccgcgtcagcgtcagtgcgtcaccggcctcccgtccgtcgccgccgccgggggcccatccacatccgccgccgcgggcccgtccgtccaccacaacgccgccatccgcggccgaaggcgctcccccgtccgcccgccaccacgccaccgcctcgcccctgtccgctgccgcgccgccgtcagctcggccccgtccgcaaccgtggccccatctacatctgtcgtcaccgccgccctcccatcacacgccgccatccgtccccttcggaagcagtgaagtgcttgcgcatcctctacctctctttgataaaactgggcttgggcccgctccaccacgaaggaacaagggaagggaaaggaagcagcaagcgctccgccgacctccccggtcgccgcaccgcttccctcccacgtcgcagacgccgcgcccgtcgcccgactcggaagaacggtcctggcccggcgctcgctcgcccgccgttagcttgtacccctcctgctcggatccaagaacgattccggtatcgacggcggcggcggtgttcctgttgtcaccggcgcgtttcgtctcgtgcgtctcgttctgtaactggaaaagaagccgcatcattttctttttttactcttagttatttctgatttatttgggtcctgctctttctcatctagttttggggcctgctcccggggttcttgagttgttaatgtcaagtgagaaaccgactgtaccagacattgttttaatcccccaccgtccggttcttttttgcacatgccgttgattcaatagttgtccttcactctgacacccggaggaaaataaaaaggaaaggaaaaataagtgttgaggcagtgaagggcaaaaagatcaaatttacgtttagcgaaggtagctgtgtgagaatttgttaattctgaagttgagtgttaggagagtttgtgagggctgtggaatgtcgaaggtgaagaacaataatggttatcatggagtcactgagccaatctcgctgagtggaccgactgagaaggaccttatgcagacagctgaggttgaaaagtacctttcagatgcaggactctatgagaggcaagatgaggctatcttgcgagaagaggttttaggcaagctggaccagactgtgaaagcttggattaagaaggctactaggatcagcgggtatggggagcaatttgtgcatgaagcaaatgcaaagatctttacatttggttcataccgtcttggggtacatggccctggtgccgacattgacaccctatgtgttggtccaagacatgcaactcgaaacgagtacttcttcagatggcttcatgatatcctagctgagatgccagaagtttctgagttacatccagtaccagatgctcatgtgcctgttctgggattcaaaattaatggggtctcaattgaccttttgtatgctaatcttgctcatgcagtgattcctgaggacctagatctttctcaggactctatactgcataatgtcgatgaacagactgttcgtagtctaaatgggtgtcgagttactgatcaaattctaagattggttccaaacattctgagttttcgcacaaccttaagattcataaggtgttggggaaagcgccgtggggtttactcaaatgttatgggatttctgggtggtataaactgggcaattcttgtgggtcgcatctgtcaattgtacccaaatgcatcaccaagcatgttgatatcccgttttttccgagtctacagcaaatggaagtggcctaatcctgttatgctttgccatattgaggaaggttatcttggtctccctgtttgggatccaagaagaaattacagagacaggggccatcaaatgcctattattacacctgcttacccttgcatgaattcgagctacaatgtatctgttagtactaggtatgtgatggtccaagaattcacgcaagcatttgagatttgtcaggtaccacatattctttcagatcttttttatttcaatcctcaaatcacaaatagaaaaaaatagctggagtttaggttagctatacgtttttgtatactaatatgtaagaactgagtgtaactcagtgcaaatattaggttaaaatgtcaaatgatagttgccagtgtaggataccttttgtcatcttgatttgatctggtgcatattgctcatgttgcaaaattattttactttattatattctattgtagcgtttgctaactttattatgtcatacagtaacacattacttatgcagcaccttcgaaataattgtcgacttcaatatttccccagcatcttatcttcaccgtccataccttcattactacacagttagatcctttaatatttggtgcatggctgatttttgtcactcattacctagatcaactcacttgactctagcatctaattatgttaggaatgatttgtcccctttaaataattggcgatggaagcattttcttgtatttattatacatagtcagtgttgtgtagagttaaaggggaagttatgatataactgtatcaactaacaatgtcctgttattggtctgctctgtactctgcatcaaatttactcgaaaaccaattgtaggccatagatgaaggaaaagcagactgggatgcattgtttgagccatatccattttttgaatcatataaaaattatctagaagttaatatcacagcgagaaatgaagatgacctcaggaattggaaaggatgggtggaatctcgccttcgcactcttgtattaaagattgagcgttattcacatgagatgatccttgcacacccatatcccaaagatttctcagataaatccaggcccttacatatcttttacttcatgggtctttggagaaaacaaactacccaagctcaagaaactgagcaattcgacatcaggggaattgtaaatgagtttaagaatactatttgtgcatatcaacaccggaaagaaggaatggacattgaagtgtcccatgtaaaaagaaaagaaatccctttgtttgtttttcctggtggagtgcgtccttctcgtacttctagaacaacgcacaagaacagccgtgccattccaacacgtgatgtttcagctgatgatcaagtgggaaacctattgggcgttgccagttgtagtgatgctcaacatgtaccatgtaaaggcagctatatgaaacaaccagaaccagattttgctggaggctttcagttgccaggaagtatttctctgttgccccctagcttacccaataaagtagttctgaatgggtctgctaattttcatgcagaatctattgagagtgaacatccagaacactatcaggaaattcaaaaagggaatgtgcaggcagtgctgcaaacaacttgctgaagttatccccagctattccagccacacctgatgaacttgatgagctgatatcctatcaaactaatcagaaagatgtaaatgctgaaaataacttggagatcggttctgaaaataacttggaacaaatatgcagtctgaggccccaagaatctaataataatctgaagcgtaaagccaatcaagagctcgagccacttgagcttgccgtcccatccactggtgctgcgccgcaatcgacaggaactgccccaagaaaaccactcaggttgaggttaacgactttggggaaaccgaagccagctgaaggaacttcctgaatggaattgcccaggagccaacatacctagagcttgtttttccttgtattgaagcaaggatatgtggaagcgctcggcacatagcctgctttggcactgcgagttgaaacgaaatggaaaacggaggccgcctgacgtaaatgagtgcgattgtaataaattgtatgtagttcatagctgggttggtatcagagttcaccatttcgtttttgctgtagcgaatttcgtttttttaaccaaagtttgactcttatattttttgaatttggaaccaaaatccataaaaaacctgaccgaaattcgcatcttggtcaacagcgagcagcgaaaattggaaatttcaccaaaattcggtgatttccgagaaacgaatccgtggttgggcatagatgtacgcagcggtacattttctcgacgacttagctatgcttgtaattgcaatgatgttcaaacggaagtggatatcgtctttgaagcat

SEQ ID NO: 10645 - DNA, 3537 bp, Zea Mays
cacccacccggcccctgtcgcgtttccgtagttcctgtcctgtccgcgagccgcgtcagcgtcagtgcgtcaccggcctcccgtccgtcgccgccgccgggggcccatccacatccgccgccgcgggcccgtccgtccaccacaacgccgccatccgcggccgaaggcgctcccccgtccgcccgccaccacgccaccgcctcgcccctgtccgctgccgcgccgccgtcagctcggccccgtccgcaaccgtggccccatctacatctgtcgtcaccgccgccctcccatcacacgccgccatccgtccccttcggaagcagtgaagtgcttgcgcatcctctacctctctttgataaaactgggcttgggcccgctccaccacgaaggaacaagggaagggaaaggaagcagcaagcgctccgccgacctccccggtcgccgcaccgcttccctcccacgtcgcagacgccgcgcccgtcgcccgactcggaagaacggtcctggcccggcgctcgctcgcccgccgttagcttgtacccctcctgctcggatccaagaacgattccggtatcgacggcggcggcggtgttcctgttgtcaccggcgcgtttcgtctcgtgcgtctcgttctgtaactggaaaagaagccgcatcattttctttttttactcttagttatttctgatttatttgggtcctgctctttctcatctagttttggggcctgctcccggggttcttgagttgttaatgtcaagtgagaaaccgactgtaccagacattgttttaatcccccaccgtccggttcttttttgcacatgccgttgattcaatagttgtccttcactctgacacccggaggaaaataaaaaggaaaggaaaaataagtgttgaggcagtgaagggcaaaaagatcaaatttacgtttagcgaaggtagctgtgtgagaatttgttaattctgaagttgagtgttaggagagtttgtgagggctgtggaatgtcgaaggtgaagaacaataatggttatcatggagtcactgagccaatctcgctgagtggaccgactgagaaggaccttatgcagacagctgaggttgaaaagtacctttcagatgcaggactctatgagaggcaagatgaggctatcttgcgagaagaggttttaggcaagctggaccagactgtgaaagcttggattaagaaggctactaggatcagcgggtacatggccctggtgccgacattgacaccctatgtgttggtccaagacatgcaactcgaaacgagtacttcttcagatggcttcatgatatcctagctgagatgccagaagtttctgagttacatccagtaccagatgctcatgtgcctgttctgggattcaaaattaatggggtctcaattgaccttttgtatgctaatcttgctcatgcagtgattcctgaggacctagatctttctcaggactctatactgcataatgtcgatgaacagactgttcgtagtctaaatgggtgtcgagttactgatcaaattctaagattggttccaaacattctgagttttcgcacaaccttaagattcataaggtgttggggaaagcgccgtggggtttactcaaatgttatgggatttctgggtggtataaactgggcaattcttgtgggtcgcatctgtcaattgtacccaaatgcatcaccaagcatgttgatatcccgttttttccgagtctacagcaaatggaagtggcctaatcctgttatgctttgccatattgaggaaggttatcttggtctccctgtttgggatccaagaagaaattacagagacaggggccatcaaatgcctattattacacctgcttacccttgcatgaattcgagctacaatgtatctgttagtactaggtatgtgatggtccaagaattcacgcaagcatttgagatttgtcaggccatagatgaaggaaaagcagactgggatgcattgtttgagccatatccattttttgaatcatataaaaattatctagaagttaatatcacagcgagaaatgaagatgacctcaggaattggaaaggatgggtggaatctcgccttcgcactcttgtattaaagattgagcgttattcacatgagatgatccttgcacacccatatcccaaagatttctcagataaatccaggcccttacatatcttttacttcatgggtctttggagaaaacaaactacccaagctcaagaaactgagcaattcgacatcaggggaattgtaaatgagtttaagaatactatttgtgcatatcaacaccggaaagaaggaatggacattgaagtgtcccatgtaaaaagaaaagaaatccctttgtttgtttttcctggtggagtgcgtccttctcgtacttctagaacaacgcacaagaacagccgtgccattccaacacgtgatgtttcagctgatgatcaagtgggaaacctattgggcgttgccagttgtagtgatgctcaacatgtaccatgtaaaggcagctatatgaaacaaccagaaccagattttgctggaggctttcagttgccaggaagtatttctctgttgccccctagcttacccaataaagtagttctgaatgggtctgctaattttcatgcagaatctattgagagtgaacatccagaacactatcaggaaattcaaaaagggaatgtgcaggcagtgctgcaaacaacttgctgaagttatccccagctattccagccacacctgatgaacttgatgagctgatatcctatcaaactaatcagaaagatgtaaatgctgaaaataacttggagatcggttctgaaaataacttggaacaaatatgcagtctgaggccccaagaatctaataataatctgaagcgtaaagccaatcaagagctcgagccacttgagcttgccgtcccatccactggtgctgcgccgcaatcgacaggaactgccccaagaaaaccactcaggttgaggttaacgactttggggaaaccgaagccagctgaaggaacttcctgaatggaattgcccaggagccaacatacctagagcttgtttttccttgtattgaagcaaggatatgtggaagcgctcggcacatagcctgctttggcactgcgagttgaaacgaaatggaaaacggaggccgcctgacgtaaatgagtgcgattgtaataaattgtatgtagttcatagctgggttggtatcagagttcaccatttcgtttttgctgtagcgaatttcgtttttttaaccaaagtttgactcttatattttttgaatttggaaccaaaatccataaaaaacctgaccgaaattcgcatcttggtcaacagcgagcagcgaaaattggaaatttcaccaaaattcggtgatttccgagaaacgaatccgtggttgggcatagatgtacgcagcggtacattttctcgacgacttagctatgcttgtaattgcaatgatgttcaaacggaagtggatatcgtctttgaagcat

SEQ ID NO: 10646 - DNA, 3506 bp, Zea Mays
cacccacccggcccctgtcgcgtttccgtagttcctgtcctgtccgcgagccgcgtcagcgtcagtgcgtcaccggcctcccgtccgtcgccgccgccgggggcccatccacatccgccgccgcgggcccgtccgtccaccacaacgccgccatccgcggccgaaggcgctcccccgtccgcccgccaccacgccaccgcctcgcccctgtccgctgccgcgccgccgtcagctcggccccgtccgcaaccgtggccccatctacatctgtcgtcaccgccgccctcccatcacacgccgccatccgtccccttcggaagcagtgaagtgcttgcgcatcctctacctctctttgataaaactgggcttgggcccgctccaccacgaaggaacaagggaagggaaaggaagcagcaagcgctccgccgacctccccggtcgccgcaccgcttccctcccacgtcgcagacgccgcgcccgtcgcccgactcggaagaacggtcctggcccggcgctcgctcgcccgccgttagcttgtacccctcctgctcggatccaagaacgattccggtatcgacggcggcggcggtgttcctgttgtcaccggcgcgtttcgtctcttttggggcctgctcccggggttcttgagttgttaatgtcaagtgagaaaccgactgtaccagacattgttttaatcccccaccgtccggttcttttttgcacatgccgttgattcaatagttgtccttcactctgacacccggaggaaaataaaaaggaaaggaaaaataagtgttgaggcagtgaagggcaaaaagatcaaatttacgtttagcgaaggtagctgtgtgagaatttgttaattctgaagttgagtgttaggagagtttgtgagggctgtggaatgtcgaaggtgaagaacaataatggttatcatggagtcactgagccaatctcgctgagtggaccgactgagaaggaccttatgcagacagctgaggttgaaaagtacctttcagatgcaggactctatgagaggcaagatgaggctatcttgcgagaagaggttttaggcaagctggaccagactgtgaaagcttggattaagaaggctactaggatcagcgggtatggggagcaatttgtgcatgaagcaaatgcaaagatctttacatttggttcataccgtcttggggtacatggccctggtgccgacattgacaccctatgtgttggtccaagacatgcaactcgaaacgagtacttcttcagatggcttcatgatatcctagctgagatgccagaagtttctgagttacatccagtaccagatgctcatgtgcctgttctgggattcaaaattaatggggtctcaattgaccttttgtatgctaatcttgctcatgcagtgattcctgaggacctagatctttctcaggactctatactgcataatgtcgatgaacagactgttcgtagtctaaatgggtgtcgagttactgatcaaattctaagattggttccaaacattctgagttttcgcacaaccttaagattcataaggtgttggggaaagcgccgtggggtttactcaaatgttatgggatttctgggtggtataaactgggcaattcttgtgggtcgcatctgtcaattgtacccaaatgcatcaccaagcatgttgatatcccgttttttccgagtctacagcaaatggaagtggcctaatcctgttatgctttgccatattgaggaaggttatcttggtctccctgtttgggatccaagaagaaattacagagacaggggccatcaaatgcctattattacacctgcttacccttgcatgaattcgagctacaatgtatctgttagtactaggtatgtgatggtccaagaattcacgcaagcatttgagatttgtcaggccatagatgaaggaaaagcagactgggatgcattgtttgagccatatccattttttgaatcatataaaaattatctagaagttaatatcacagcgagaaatgaagatgacctcaggaattggaaaggatgggtggaatctcgccttcgcactcttgtattaaagattgagcgttattcacatgagatgatccttgcacacccatatcccaaagatttctcagataaatccaggcccttacatatcttttacttcatgggtctttggagaaaacaaactacccaagctcaagaaactgagcaattcgacatcaggggaattgtaaatgagtttaagaatactatttgtgcatatcaacaccggaaagaaggaatggacattgaagtgtcccatgtaaaaagaaaagaaatccctttgtttgtttttcctggtggagtgcgtccttctcgtacttctagaacaacgcacaagaacagccgtgccattccaacacgtgatgtttcagctgatgatcaagtgggaaacctattgggcgttgccagttgtagtgatgctcaacatgtaccatgtaaaggcagctatatgaaacaaccagaaccagattttgctggaggctttcagttgccaggaagtatttctctgttgccccctagcttacccaataaagtagttctgaatgggtctgctaattttcatgcagaatctattgagagtgaacatccagaacactatcaggaaattcaaaaagggaatgtgcaggcagtgctgcaaacaacttgctgaagttatccccagctattccagccacacctgatgaacttgatgagctgatatcctatcaaactaatcagaaagatgtaaatgctgaaaataacttggagatcggttctgaaaataacttggaacaaatatgcagtctgaggccccaagaatctaataataatctgaagcgtaaagccaatcaagagctcgagccacttgagcttgccgtcccatccactggtgctgcgccgcaatcgacaggaactgccccaagaaaaccactcaggttgaggttaacgactttggggaaaccgaagccagctgaaggaacttcctgaatggaattgcccaggagccaacatacctagagcttgtttttccttgtattgaagcaaggatatgtggaagcgctcggcacatagcctgctttggcactgcgagttgaaacgaaatggaaaacggaggccgcctgacgtaaatgagtgcgattgtaataaattgtatgtagttcatagctgggttggtatcagagttcaccatttcgtttttgctgtagcgaatttcgtttttttaaccaaagtttgactcttatattttttgaatttggaaccaaaatccataaaaaacctgaccgaaattcgcatcttggtcaacagcgagcagcgaaaattggaaatttcaccaaaattcggtgatttccgagaaacgaatccgtggttgggcatagatgtacgcagcggtacattttctcgacgacttagctatgcttgtaattgcaatgatgttcaaacggaagtggatatcgtctttgaagcat

SEQ ID NO: 10647 - DNA, 3210 bp, Zea Mays
tgctctcccactcctctaccctcctctcctctgcttctctgccgcccagcccagcttgccttctcgaacagcgcgagcgcgcaggcgaggagcagcgtgtccgtccgtccttgcactctctgcagcctccctctctctctaccccgcccatctccctccccaggccttcaaatccgcggccgcgccacccgctgcgctgctgccccggtccttgcattgctcgactcgaggcgccccagcgctggtcgcctccgtgccttccgcggtgttcctgggcgcggctcctaggctcgctcattttacttctgctgctcctgtgctgcctcttggggggcgttcctttacggcccggagcagcgcctagctgcttccgccattgatccggcaaccccagctctaggtttgctttgctctcgtgtgtggtagcgattctggtgttgggggggtgccaccaacagttacaggttgtcgccacgccgagggtgtcgtcctgcgttccttttttttatcttctctccgtgatctctctagctgcatccttgcccccccttcgctccttgctttcttctctgcgctgcctttggtgtgttgccagatagctcccgggacttcaccggttcgctaaccggcaccggcccatagtctgcggacaaacaggggccagttcggcctatttcatttcacaaaagggggcaaagattaggcggcggaatcctgttctttcccgattccttttggacatactgctcgagaggaagtgaaagcgcgcaactttggaggttccgaggagggaggaacacatcccttgcagctgcatgaggaggcaggcattgatacaatgagagatgacggttcaagcaagaacaagctgtcctggtccaagacccttgttaggaagtggttcaacatcaaaacaaaggcgaaggacttccattcggattatgcagctgaggaagtcggagtgcagtggaggaccagcagcttctctgatagagatgcatgtaaatccaagaaaagtaggacagagaggttgcctaagaggaatgtggagcgagatggtagagtagggaacggatttgatggtgcctatattacaaacacacaggactacagggtcttcgttggtacatggaacgtgggcggaaggtcaccatctagtcatttgaatctggaagactggcttcacacttctcctgctgctgatatatatgtgatagggaaattgttcccttgaatgctggtaatgttctattgactgaagacaatggtccagcgaggaaatgggtctctcttgttagaaaaactctgaataatcttgatcagcaaggctctggtgtctataattaccacaccccctcaccagctccggatccaatcgtggagctcaatgttgacttcgagcgatcgtcaagaagacaaaggaactcgtcgtttttccatcggcgttcgttccaatccttcaaccgtagctcaaggatcgacatgatggatccacactcgttagtggaccgtcgattcagtgtctgcgacaggattagcttcgggagcaggccgagtgatgttgacactagcatgaggtgtggtgggtcgtctgatgatgagaacattgacgaggaatcacctagcggtatattcttcccaccgatgccatgtgcatatggtgctccactgtgcactggttctaggtattgcttagttgccagcaagcaaatggttggaattttcctcatggtgtgggtgcgaagcgatataagggagcatgtgaagaacttgaaggtttcatgtgtcggtagaggtctgatgggctaccttgggaacaagggatccatatcaatcagtatgtctctgcatcagacaagcttctgcttcgtttgcacccacttaacgtcaggccaaaaggatggagatcaacttagacgaaatgcggatgtggtggaaatcctgaggaagaccagattcccgcatgtccatggagcaggcgacaggaagtcaccagagacgattctggatcatgatcgtattatttggctcggggacctgaactaccggatagctctttcgtatcgctcagtgaaggctttagttgagatgcacagctggaaacagttgctggagaaggaccagcttcgcatagagcagagatttggtcgggtctttgcaggctggaaagaaggaaggatttactttcctcccacctacaagtactcatacaactccgatagatacgctggcgacgacatgcacccgaacgagaagcgaaggactccggcatggtgtgaccggattctatggtacgggcgaggcctgtcccagctatgctacgtgcgcggcgagtctcggttctcggatcacaggcctgtgtacagcatattcacggcggaggttgagattccgagccagtcagctgctcacttcggcggcatcactcgttccgcgtctctcctggggctggacgagctgccaccgtaccagacttatccacgcagttacatggacataaacttctactgaccggtcatcgtctcgacggggaggacggggccagcagccagccaagagttgcagacagacattcctcgctacctgatgagtggcagggcaggccttctgacgaccgactgactgactgactgggggttcgtttctcccaaggttcagttccatcggtcggaaatcggaatgtttggtagctagcagatgtgactcctttcgccatgcgtttctgtgcacctggcgcctggactcttgctgctgctgtcctgcatgccattgacgcccccaactcctacgccgtgccgtcttcagcgtgcagaatagatactcgaggagatcaatgctttccgagcgtgagattgttgctaggaacatttgcacagctagttttgttgaatcataaccatctgcgtgtcccgatttactacgggagaaagaagaaggagaagaaaaaaaggagtttggttcttgcttttggtgtcctgatgtaatgcaacgagggccgcgccatgggctcattcaaatgttttcttttttttgttttaatagtccgaggaatgaaatgatggcttgtacagcaaactgttccagtaaacccggcctctgttcatgctcgcggcgaaatgatcacctgaacagcatgcatgcaggggtgtcatctagttcctgaacgcttgtgcgcgaagcgaccgtgctgaggctgccggctgccgcctc

SEQ ID NO: 10648 - DNA, 3244 bp, Zea Mays
cccactgccgccgctgctctcccactcctctaccctcctctcctctgcttctctgccgcccagcccagcttgccttctcgaacagcgcgagcgcgcaggcgaggagcagcgtgtccgtccgtccttgcactctctgcagcctccctctctctctaccccgcccatctccctccccaggccttcaaatccgcggccgcgccacccgctgcgctgctgccccggtccttgcattgctcgactcgaggcgccccagcgctggtcgcctccgtgccttccgcggtgttcctgggcgcggctcctaggctcgctcattttacttctgctgctcctgtgctgcctcttggggggcgttcctttacggcccggagcagcgcctagctgcttccgccattgatccggcaaccccagctctaggtttgctttgctctcgtgtgtggtagcgattctggtgttgggggggtgccaccaacagttacaggttgtcgccacgccgagggtgtcgtcctgcgttccttttttttatcttctctccgtgatctctctagctgcatccttgcccccccttcgctccttgctttcttctctgcgctgcctttggtgtgttgccagatagctcccgggacttcaccggttcgctaaccggcaccggcccatagtctgcggacaaacaggggccagttcggcctatttcatttcacaaaagggggcaaagattaggcggcggaatcctgttctttcccgattccttttggacatactgctcgagaggaagtgaaagcgcgcaactttggaggttccgaggagggaggaacacatcccttgcagctgcatgaggaggcaggcattgatacaatgagagatgacggttcaagcaagaacaagctgtcctggtccaagacccttgttaggaagtggttcaacatcaaaacaaaggcgaaggacttccattcggattatgcagctgaggaagtcggagtgcagtggaggaccagcagcttctctgatagagatgcatgtaaatccaagaaaagtaggacagagaggttgcctaagaggaatgtggagcgagatggtagagtagggaacggatttgatggtgcctatattacaaacacacaggactacagggtcttcgttggtacatggaacgtgggcggaaggtcaccatctagtcatttgaatctggaagactggcttcacacttctcctgctgctgatatatatgtgatagggttgttgtgccaggtttcaggaaattgttcccttgaatgctggtaatgttctattgactgaagacaatggtccagcgaggaaatgggtctctcttgttagaaaaactctgaataatcttgatcagcaaggctctggtgtctataattaccacaccccctcaccagctccggatccaatcgtggagctcaatgttgacttcgagcgatcgtcaagaagacaaaggaactcgtcgtttttccatcggcgttcgttccaatccttcaaccgtagctcaaggatcgacatgatggatccacactcgttagtggaccgtcgattcagtgtctgcgacaggattagcttcgggagcaggccgagtgatgttgacactagcatgaggtgtggtgggtcgtctgatgatgagaacattgacgaggaatcacctagcggtatattcttcccaccgatgccatgtgcatatggtgctccactgtgcactggttctaggtattgcttagttgccagcaagcaaatggttggaattttcctcatggtgtgggtgcgaagcgatataagggagcatgtgaagaacttgaaggtttcatgtgtcggtagaggtctgatgggctaccttgggaacaagggatccatatcaatcagtatgtctctgcatcagacaagcttctgcttcgtttgcacccacttaacgtcaggccaaaaggatggagatcaacttagacgaaatgcggatgtggtggaaatcctgaggaagaccagattcccgcatgtccatggagcaggcgacaggaagtcaccagagacgattctggatcatgatcgtattatttggctcggggacctgaactaccggatagctctttcgtatcgctcagtgaaggctttagttgagatgcacagctggaaacagttgctggagaaggaccagcttcgcatagagcagagatttggtcgggtctttgcaggctggaaagaaggaaggatttactttcctcccacctacaagtactcatacaactccgatagatacgctggcgacgacatgcacccgaacgagaagcgaaggactccggcatggtgtgaccggattctatggtacgggcgaggcctgtcccagctatgctacgtgcgcggcgagtctcggttctcggatcacaggcctgtgtacagcatattcacggcggaggttgagattccgagccagtcagctgctcacttcggcggcatcactcgttccgcgtctctcctggggctggacgagctgccaccgtaccagacttatccacgcagttacatggacataaacttctactgaccggtcatcgtctcgacggggaggacggggccagcagccagccaagagttgcagacagacattcctcgctacctgatgagtggcagggcaggccttctgacgaccgactgactgactgactgggggttcgtttctcccaaggttcagttccatcggtcggaaatcggaatgtttggtagctagcagatgtgactcctttcgccatgcgtttctgtgcacctggcgcctggactcttgctgctgctgtcctgcatgccattgacgcccccaactcctacgccgtgccgtcttcagcgtgcagaatagatactcgaggagatcaatgctttccgagcgtgagattgttgctaggaacatttgcacagctagttttgttgaatcataaccatctgcgtgtcccgatttactacgggagaaagaagaaggagaagaaaaaaaggagtttggttcttgcttttggtgtcctgatgtaatgcaacgagggccgcgccatgggctcattcaaatgttttcttttttttgttttaatagtccgaggaatgaaatgatggcttgtacagcaaactgttccagtaaacccggcctctgttcatgctcgcggcgaaatgatcacctgaacagcatgcatgcaggggtgtcatctagttcctgaacgcttgtgcgcgaagcgaccgtgctgaggctgccggctgccgcctc

SEQ ID NO: 10649 - DNA, 3291 bp, Zea Mays
cgcctttgcctttattcccttcatatatttctcagctcctttgccccctccctctcactgcccactgccgccgctgctctcccactcctctaccctcctctcctctgcttctctgccgcccagcccagcttgccttctcgaacagcgcgagcgcgcaggcgaggagcagcgtgtccgtccgtccttgcactctctgcagcctccctctctctctaccccgcccatctccctccccaggccttcaaatccgcggccgcgccacccgctgcgctgctgccccggtccttgcattgctcgactcgaggcgccccagcgctggtcgcctccgtgccttccgcggtgttcctgggcgcggctcctaggctcgctcattttacttctgctgctcctgtgctgcctcttggggggcgttcctttacggcccggagcagcgcctagctgcttccgccattgatccggcaaccccagctctaggtttgctttgctctcgtgtgtggtagcgattctggtgttgggggggtgccaccaacagttacaggttgtcgccacgccgagggtgtcgtcctgcgttccttttttttatcttctctccgtgatctctctagctgcatccttgcccccccttcgctccttgctttcttctctgcgctgcctttggtgtgttgccagatagctcccgggacttcaccggttcgctaaccggcaccggcccatagtctgcggacaaacaggggccagttcggcctatttcatttcacaaaagggggcaaagattaggcggcggaatcctgttctttcccgattccttttggacatactgctcgagaggaagtgaaagcgcgcaactttggaggttccgaggagggaggaacacatcccttgcagctgcatgaggaggcaggcattgatacaatgagagatgacggttcaagcaagaacaagctgtcctggtccaagacccttgttaggaagtggttcaacatcaaaacaaaggcgaaggacttccattcggattatgcagctgaggaagtcggagtgcagtggaggaccagcagcttctctgatagagatgcatgtaaatccaagaaaagtaggacagagaggttgcctaagaggaatgtggagcgagatggtagagtagggaacggatttgatggtgcctatattacaaacacacaggactacagggtcttcgttggtacatggaacgtgggcggaaggtcaccatctagtcatttgaatctggaagactggcttcacacttctcctgctgctgatatatatgtgatagggtttcaggaaattgttcccttgaatgctggtaatgttctattgactgaagacaatggtccagcgaggaaatgggtctctcttgttagaaaaactctgaataatcttgatcagcaaggctctggtgtctataattaccacaccccctcaccagctccggatccaatcgtggagctcaatgttgacttcgagcgatcgtcaagaagacaaaggaactcgtcgtttttccatcggcgttcgttccaatccttcaaccgtagctcaaggatcgacatgatggatccacactcgttagtggaccgtcgattcagtgtctgcgacaggattagcttcgggagcaggccgagtgatgttgacactagcatgaggtgtggtgggtcgtctgatgatgagaacattgacgaggaatcacctagcggtatattcttcccaccgatgccatgtgcatatggtgctccactgtgcactggttctaggtattgcttagttgccagcaagcaaatggttggaattttcctcatggtgtgggtgcgaagcgatataagggagcatgtgaagaacttgaaggtttcatgtgtcggtagaggtctgatgggctaccttgggaacaagggatccatatcaatcagtatgtctctgcatcagacaagcttctgcttcgtttgcacccacttaacgtcaggccaaaaggatggagatcaacttagacgaaatgcggatgtggtggaaatcctgaggaagaccagattcccgcatgtccatggagcaggcgacaggaagtcaccagagacgattctggatcatgatcgtattatttggctcggggacctgaactaccggatagctctttcgtatcgctcagtgaaggctttagttgagatgcacagctggaaacagttgctggagaaggaccagcttcgcatagagcagagatttggtcgggtctttgcaggctggaaagaaggaaggatttactttcctcccacctacaagtactcatacaactccgatagatacgctggcgacgacatgcacccgaacgagaagcgaaggactccggcatggtgtgaccggattctatggtacgggcgaggcctgtcccagctatgctacgtgcgcggcgagtctcggttctcggatcacaggcctgtgtacagcatattcacggcggaggttgagattccgagccagtcagctgctcacttcggcggcatcactcgttccgcgtctctcctggggctggacgagctgccaccgtaccagacttatccacgcagttacatggacataaacttctactgaccggtcatcgtctcgacggggaggacggggccagcagccagccaagagttgcagacagacattcctcgctacctgatgagtggcagggcaggccttctgacgaccgactgactgactgactgggggttcgtttctcccaaggttcagttccatcggtcggaaatcggaatgtttggtagctagcagatgtgactcctttcgccatgcgtttctgtgcacctggcgcctggactcttgctgctgctgtcctgcatgccattgacgcccccaactcctacgccgtgccgtcttcagcgtgcagaatagatactcgaggagatcaatgctttccgagcgtgagattgttgctaggaacatttgcacagctagttttgttgaatcataaccatctgcgtgtcccgatttactacgggagaaagaagaaggagaagaaaaaaaggagtttggttcttgcttttggtgtcctgatgtaatgcaacgagggccgcgccatgggctcattcaaatgttttcttttttttgttttaatagtccgaggaatgaaatgatggcttgtacagcaaactgttccagtaaacccggcctctgttcatgctcgcggcgaaatgatcacctgaacagcatgcatgcaggggtgtcatctagttcctgaacgcttgtgcgcgaagcgaccgtgctgaggctgccggctgccgcctc

SEQ ID NO: 10650 - DNA, 184 bp, Zea Mays
ctcgaaccccagcacggcctcgtagaaggcggcgagtcgggccacgtcggaggtctcccgcgcgatgtggttgagctgcagcgtcgccatcggagaagagggtggggacaaggaagaggatcagaggagttgggcgcggcgcggccggcgaggcgtctcgtaatgttgggagttgggacttgag

SEQ ID NO: 10651 - DNA, 916 bp, Zea Mays
gaagaggtgatggccatgtcgccttggctagctctgccccctccttatgagtccacacgctctggcacaaaaaaaaagaaataaaaaaaggggaagacagccttatcctcagccacgaaccgcccctcagtcccttgcacaccatggccgctgcctcagcttcgcttctccacctcgcgaccccgaccctgactcgctccactcgcctcgccgtccgcctccccagcgcccagctgtcgcgctggccatcgggggcacgcatcgccgccgcgcagccgccgcgggcgtacaaggtgacgatcgagcacggcggcgagtcgcgggtggtggaggtggaggaggacgagacgatcctgtcccgcgcgctggacgagggcctggacgtgccgcacgactgcaagctcggcgtgtgcatgacgtgcccggcgcggctggtctccgggacggtggaccagagcgacggcatgctcagcgacgacgtcgtcgcgcgggggtacgcgctgctctgcgccgcgtacccgcgctccgactgcaccatccgcgtcatccccgaggacgagctgctcaaggtccagctcgccaccgccgacgactgactgacgctccgccgatgaccagcggaccggccagcaggcatcaacctccggcggtgtaatgatgtccctgagacttgtacaccattgttgactagtagcactagtgacagagcttttctcgagaatagatgctgtgtgatatgcctctctgccaaatttctggtatccaaatcgagcatttcgcgacgtgtggtagcatactgctgattgtctccactttctcagtggttaatgatgcttcagttctgaaactaatagtgaaacgtgaatgagtgagtgaatgacaaggaaattatttagactccattagccagttgtca

SEQ ID NO: 10652 - DNA, 1373 bp, Zea Mays
ctcccacccaccagacgaccccccttgcattctcagtttctcacgcccctgcgctgtcccgtcgcgagatagataaccctagctcccttccattgcttgccctcttccccaacctctctccagatctctataaaagaccagaatttcgaattccccctcgaacccgtgacacgcgcgctcctttcccgcccatttaggcctctgattcggcgcggattcgcggcgcggagccgccgaggttgcgtgcgtgattgggatggcggagccggggctcgaggacagccagccggtggatctgtccaagcacccctccggcatcgtccccacgctccagaatattgtatcaacagttaatttggattgtaaacttgacctcaaagcaatagctttgcaagcaagaaatgcggagtataacccaaagcgttttgctgcagtaatcatgagaataagagaacccaaaaccacggcactgatatttgcatcgggtaaaatggtatgtactggagctaagagcgagcagcaatctaagcttgcagcaagaaagtatgctcgtattattcagaaacttggttttccagctaaattcaaggactttaagattcagaatattgttggctcttgtgatgtaaagtttccaattaggcttgagggccttgcctattctcatggtgccttctcaagttacgaaccagaactctttcctggccttatctatcggatgaaacaaccaaagattgttcttttaatttttgtttcaggcaagattgttttgactggagcaaaggtgagagaggagacctacactgccttcgaaaacatctatcctgtgctggcagagtttcgaaaagttcagcaatgcgttaacttgagtgctaacaagagtagataaattttggtctgcttcgtctttgaggcaggagtccttcaaagtctcttctgagtatgtttcagtgtgatgtgcgatgatgaaaaggctggcgctgtatgtaacgtgggacaagggcaaagggcaagggcaatgtactgacgactggttgtaagttatctgttgtatttgagtttgagatgctgtagcgtttgacattggggtaaatcttgctggttatgaccgtatggaggaaccggtcgattgaccatgctattggtgtgactctgttagagacaataatgtgcacttaaaccgtgcaatcaaacgatctgatgtatgcaagctattttagatgaaagatttcaaatataaaattgctataggttaaatattgcagggattaaatataaaatagtagttactgttgcattttaattagacgtctctgatagtttgattatatggttgtatcaacatgatattgattgtatatgtcatgtttttc

SEQ ID NO: 10653 - DNA, 1816 bp, Zea Mays
ctcccacccaccagacgaccccccttgcattctcagtttctcacgcccctgcgctgtcccgtcgcgagatagataaccctagctcccttccattgcttgccctcttccccaacctctctccagatctctataaaagaccagaatttcgaattccccctcgaacccgtgacacgcgcgctcctttcccgcccatttaggcctctgattcggcgcggattcgcggcgcggagccgccgaggttgcgtgcgtgattgggatggcggagccggggctcgaggacagccagccggtggatctgtccaagcacccctccggcatcgtccccacgctccagtaagtcccggatctgggtcgtctggggttaggggttgcggagagatcccgtgccgtacgtgctagggtcgcgcggcggatggcggtgcttgggttccctagaggctggagctgccagggcttgagtctgggcagcggggtgcctctctgtactgaatattgtatcaacagttaatttggattgtaaacttgacctcaaagcaatagctttgcaagcaagaaatgcggagtataacccaaagcgttttgctgcagtaatcatgagaataagagaacccaaaaccacggcactgatatttgcatcgggtaaaatggtatgtactggagctaagagcgagcagcaatctaagcttgcagcaagaaagtatgctcgtattattcagaaacttggttttccagctaaattcaaggactttaagattcagaatattgttggctcttgtgatgtaaagtttccaattaggcttgagggccttgcctattctcatggtgccttctcaagttacgaaccagaactctttcctggccttatctatcggatgaaacaaccaaagattgttcttttaatttttgtttcaggcaagattgttttgactggagcaaaggtgagagaggagacctacactgccttcgaaaacatctatcctgtgctggcagagtttcgaaaagttcagcaatgatgacctgttgtgaaggtcacatccttctaattacaagcttccttgatgattttcgtgtgaccataaattctaactgtgtacataaaaagtctggcggaatttatagcatcttgtaatttctgtgagctgctgtctggcatgattgggtgggcgtgtcgtggtagctggtggaattgtcaagatgatccgtttgggtagaggccctggtgaacacggacactacattatgtcgcagtttgagtagtttgtgtgagctgcagggtacatgcttgtcccatgtggttgcagcgttaacttgagtgctaacaagagtagataaattttggtctgcttcgtctttgaggcaggagtccttcaaagtctcttctgagtatgtttcagtgtgatgtgcgatgatgaaaaggctggcgctgtatgtaacgtgggacaagggcaaagggcaagggcaatgtactgacgactggttgtaagttatctgttgtatttgagtttgagatgctgtagcgtttgacattggggtaaatcttgctggttatgaccgtatggaggaaccggtcgattgaccatgctattggtgtgactctgttagagacaataatgtgcacttaaaccgtgcaatcaaacgatctgatgtatgcaagctattttagatgaaagatttcaaatataaaattgctataggttaaatattgcagggattaaatataaaatagtagttactgttgcattttaattagacgtctctgatagtttgattatatggttgtatcaacatgatattgattgtatatgtcatgtttttc

SEQ ID NO: 10654 - DNA, 1893 bp, Zea Mays
ctcccacccaccagacgaccccccttgcattctcagtttctcacgcccctgcgctgtcccgtcgcgagatagataaccctagctcccttccattgcttgccctcttccccaacctctctccagatctctataaaagaccagaatttcgaattccccctcgaacccgtgacacgcgcgctcctttcccgcccatttaggcctctgattcggcgcggattcgcggcgcggagccgccgaggttgcgtgcgtgattgggatggcggagccggggctcgaggacagccagccggtggatctgtccaagcacccctccggcatcgtccccacgctccatggcatattcctgaaatatgcggataactcggtcccctcaaattgggtggacgaagtcattccttgcggaacgcgccgccgtgccatctttgtgtcgccaggtgcgagtgcggttggacagagggctctgccatggggaagctctgtgctcaaggcaatcagaggagatgagatggatatagattacacaacgtactgggatagctctgacaacaagaggattggggtgaggaatattgtatcaacagttaatttggattgtaaacttgacctcaaagcaatagctttgcaagcaagaaatgcggagtataacccaaagcgttttgctgcagtaatcatgagaataagagaacccaaaaccacggcactgatatttgcatcgggtaaaatggtatgtactggagctaagagcgagcagcaatctaagcttgcagcaagaaagtatgctcgtattattcagaaacttggttttccagctaaattcaaggactttaagattcagaatattgttggctcttgtgatgtaaagtttccaattaggcttgagggccttgcctattctcatggtgccttctcaagttacgaaccagaactctttcctggccttatctatcggatgaaacaaccaaagattgttcttttaatttttgtttcaggcaagattgttttgactggagcaaaggtgagagaggagacctacactgccttcgaaaacatctatcctgtgctggcagagtttcgaaaagttcagcaatgatgacctgttgtgaaggtcacatccttctaattacaagcttccttgatgattttcgtgtgaccataaattctaactgtgtacataaaaagtctggcggaatttatagcatcttgtaatttctgtgagctgctgtctggcatgattgggtgggcgtgtcgtggtagctggtggaattgtcaagatgatccgtttgggtagaggccctggtgaacacggacactacattatgtcgcagtttgagtagtttgtgtgagctgcagggtacatgcttgtcccatgtggttgcagcgttaacttgagtgctaacaagagtagataaattttggtctgcttcgtctttgaggcaggagtccttcaaagtctcttctgagtatgtttcagtgtgatgtgcgatgatgaaaaggctggcgctgtatgtaacgtgggacaagggcaaagggcaagggcaatgtactgacgactggttgtaagttatctgttgtatttgagtttgagatgctgtagcgtttgacattggggtaaatcttgctggttatgaccgtatggaggaaccggtcgattgaccatgctattggtgtgactctgttagagacaataatgtgcacttaaaccgtgcaatcaaacgatctgatgtatgcaagctattttagatgaaagatttcaaatataaaattgctataggttaaatattgcagggattaaatataaaatagtagttactgttgcattttaattagacgtctctgatagtttgattatatggttgtatcaacatgatattgattgtatatgtcatgtttttc

SEQ ID NO: 10655 - DNA, 1688 bp, Zea Mays
ctctcgctatccccatcttccttgtccgctccatttcgagttcaatcgctgcccgctctccactcctccggtccttccgccggcgggcacgcgccgggcgaaatggaagcggcaccatccctccgcaccttctccccctcatcgttcttctccgcggggcctagacactgccttctgctcgcgggcccggcctcgcggcgcgcccgggcgctcccggcgccgcccctgccccgcgccgtcgcctccacccgcgcgccgctggtggtctccagcccgccaccgcccgcggcctcggggacgaccgcacccgcgcacgccaaggttgaccgctccggccgcttctgcagccctcgcgccgcccgggagctagcgctgatgatttcctacgccgcgtgtctggagggaaccgacgtcgttcggctcttcgaccgcaggatcagcgcaagacgagagcccgggtttgttttcgacaaggcatgcctactgagttacaaccatatgagctttggcgggggaccgctcgaggttggaacggaggaggaggctgagaagctgaccagtcagaacgagaaggattcagccaacgaagcagatgtactttcagctcctccaaaactggtttacaacaactttgtcttacggtatacttttcttctcgccccattccactaaaggcatcaggttgtccagggaacttttagtggctgttgccagtggatgggataagcatgtagagatcatcgacaaaataatcccccaagcttggaaggatgagcctgtggcaaggatactcgagctctgcattctacatattgctatggcagagatgacatcaaaaggaacacctcacaaagttgtgattaatgaggcagtagatttggcaaagcgattttgtgatggtggtgcccctcgggtaatcaatggatgccttcgaacatttgtaaaggatcatgttgacgttgcaggcactagccagggagctgaatcaaaattgtgaacctttgcaaataccctgaatcgtacaacagaatggtggctgaagtaaagaactatgtagaaaacatagctgtcttggagttccagcaaccacattccatcatgaagatttagcgtttaacctaagggaacctaaacaacaaacatgctgggctcatcaaggagccacagatagttcattctttcagagtgatcggttattgggtgaagtatacagggctgtaaactggtggtgcacatccatcctccatctgaaacaactgagggttatcgcttctgataacccacagatcgttaaatgatcagataaagatcacaagttctgtaaaagcttgatgtatatgtaaaatgttctgcttatcataggcttattgcactgggagctggataattctagtttaataaattaatgcgagactatacactcgttttagtattattaatctcttatgtcgcatattgtgtttgcttctacttggatttattttagaccttttttttctcaacaaaattcgttttagatttctgtccttgtactgtccttattgcctgtctctccattctaaaatggaagaaatcttagctaacgtttttttttacatactgcaagatgttttagttaacatgaacgtgcacagcagcagtgacaaacatgaatgttgaaaccgtcgttataataattacttaaaagg

SEQ ID NO: 10656 - DNA, 2830 bp, Zea Mays
ccgacggatttggcagctgggaaatgggatctcaccagatcccgtaagcgcgcgccacgccgccacctaacgcagacactgcatcctctacctctacaaatgaaacccctcagacagtcagacgtcccgtgctcgtcatcaccacccacatctcagttcaccccggcgtcgtcctcttcccccggagctactctcccgctccacgttccaaaggatggcgtcccatattgttggataccctcgcatgggccccaagagagagctcaagtttgccttggagtctttctgggatgggaagagcagcgccgatgatttagagaaagttgcctctgacctcaggtctagcatctggaagcaaatgtcagaagctgggatcaagtacattcccagcaacaccttctcgtactatgaccaggtccttgataccacggccatgcttggtgctgtcccagagcgctactcttggactggaggcgagattggcttgagcacctatttctcaatggccaggggaaatgccactgtccctgctatggagatgaccaagtggtttgatacaaactaccactttattgtccctgaacttggcccaagcaccaagttcacatacgcttctcacaaggctgtttctgagtacaaggaggcaaaagcgctcggtattgatactgtcccagtgcttgttggaccagtgtcatacttgctcctctctaagcctgccaagggtgtggagaaatctttctctcttctttcgcttcttggcagcattcttcccatctacaaggaggttgtttctgaactgaaggcagctggtgcttcatggattcagtttgatgagcctacccttgttaaagaccttgatgttcacgaattggcagcattctcttcagcatatgctgaactagagtcggcattctctggattgaatgtgcttatcgagacatactttgctgacattcctgctgagtcctacaagaccctcacgtcattgagtggtgtgactgcttacggttttgatcttatccgtggagccaagacccttgatcttatcaggagcagcttcccctctgggaagtacctcttcgctggtgttgtggatggacgcaacatttgggctgatgatcttgctgcatctcttagcactcttcagtctcttgaggccgttgctggcaaggacaaacttgtggtgtcaacctcctgctcactgatgcacaccgctgttgatcttgtcaatgaaactaagctggatgatgagattaagtcatggcttgcatttgctgcccaaaaggttgtcgaggttaatgcccttgcgaaagctttggcaggccaaaaggatgaggcttactttgcagccaatgctgctgctcaggcctcaaggagatcatcacctagagtgacaaacgaggaggtccaaaaggctgcagctgctttgaagggttctgaccaccgccgtgctaccactgttgctgctagattggatgctcagcagaaaaagctcaaccttcctgtccttcccacaaccacaattggttcattccctcagactgtggaactcaggagggtccgtcgtgagtacaaggcaaagaagatctccgaggaggaatacatcagtgccatcaaggaagaaatcagcaaggttgtcaagatccaagaggagcttgacattgatgtgcttgtgcatggagagccagagagaaatgacatggttgagtacttcggtgagcaattatctggttttgcattcactgccaacggatgggtgcaatcttatggatcacgttgtgtgaagccacccattatctatggcgatgtcagccggccgaaccccatgactgttttctggtccaagacggcacagagcatgaccgctcgtcccatgaagggaatgttgactggtccagtcacaatcctcaactggtcatttgtcaggaacgatcagcctaggtttgagacatgctaccaaatagctcttgcaataaaaaaggaggttgaggatcttgaggctgctggtattcaggtgatccagattgatgaggcagctctaagggagggtctgccactgcgcaagtcagagcatgcattctacctggactgggctgtccactctttcagaatcaccaactgcggagtccaggacaccacccagatccacacccatatgtgctactccaacttcaacgacatcatccactccatcatcgacatggacgcagatgtgatcaccatcgagaactcccggtccgacgagaagctactgtccgtgttccgcgagggtgtgaagtacggagctggaatcggtccaggtgtctacgacatccactcgcccaggatcccctccaccgaggagatcgcggaccgcgtcaacaagatgctcgccgtgctcgacaccaacatcctctgggtgaaccctgactgcggtctcaagacacgcaagtacacggaggtgaagcctgccctgaccaacatggtctccgccaccaagctcatccgcacccagctcggcagcgcgaaatgagtcagatttggtagatccatggtttgttgaacacaaaagccagcagggtcatttgtttcgaataatttgggtccttactcctgttccatggcgttaggttagcctcattggtgttggtggggtacggcgttacgtgtccgtgttctaagtttggagtgtgtgtttctcttttttgttggggtttgtgtgctttggttatataaacagaaatggagtacgcagtcttcgaatcgcaacaccaactgcattgtcatgttctccttccagaggggaacgccatgccccgtgctattgcacatgatacgtgcagacatagaa

SEQ ID NO: 10657 - DNA, 3785 bp, Zea Mays
ccctctcctcctcctgcaccttcgccggagcaccaccccctcgccgtcttgcgcccccgcctccctcgcacatctcactccttaccgtaccctccgcctacctctgctccccttatccatcctcgagctcacctgccgcgtggatcgcctcggcacattttgcttcttattatttttttttacctccccgcctgagcgttagctggttggcggatgtacgtgtcctgaccggagatgaagattcctctgtcttgaggggttgatctcggggagccgcctttagtggccggccgtccttggccccgccgcgtcggccatggacatggagaggggggcgggaagcgagcaggggtcgcccgatagcgaaatgggcgaaggcgacaacgatagcgtcggctacggcgcggagatggaggtggacgccgggagcggctcggctccggcgagctcggcgtccgcatcggcctcggtctccgcgtcggcgtacgcggcgcgcgccggcgccttcgacggggtcgaccctttcgagggcatggagttcgacgacgaggaggacgcctggacgttctataacgtctacgcccaccgcgtgggcttcagcacccggatcagcgtcatgcaccggtcgcgccgggacggctccgtcatgtcgcgccagttcgtctgcgccaaggagggcttccgcacttaccgcgggaagaatgaggtttcccgtgctgatgccgcagacgctggcgacgacgatagtgggaggggtcggaggacacgcgctgtcacccgggttggctgcaaggccatgatccgggtgaagaagcaggacaatggccgctggagtgtgactaagctggagactgcacataaccatcccctggtccccacgaaccaggcacactgcctgcgtccgcacaagccactgtcggagtgtggaaagcaccgtccttttgggggccatcgaaatggcggctcgcttctggcaattgagccaccgccaccacctcttacgccgcctgtgcctcacacaagcgtagctcaagtggttcctcagtatttttcggatggtatcgggaatgccactagagtaattttggattatgtcaaacgcatgcaagctgaagatccagcgttcttttatgccatgcaatttgttgaggggcgtccagtgggtaatgtgttttgggctgatgcgagggctaggacgacatacaaagactttggagatgccgttgtcttggatgactactgcaaaaggagcaagcatgaactgccacttgtcgcttttactggagttaatcaccattgccagccaatcctatttggctgtgccatcatggcacataacaatgaagtatcctttgtttggttgtttgagacatttctcttagcaatgtctggatgccaccctacatctcttattatggagcatgataatgttttaaaaccagctgctttgaaagtatttcctctaactaggctccagttttgtaagtggcacatcatgaacgaagcacatgataagctgtcatatctcctagatgcatttccatcattccatgacgactttattaattgcatcaatatgtctgagacaataaatgagtttgaagaaaattggaaggcattaatttctaaggccagctctcaaaaaagtgaatggcttgacttggtgtacaattgccgtcatcattgggtcccggtatatctgagagatacattctttggggatgtgtcgttaaagctgcagtgttctagcaggagttcgttgtttgaaggttatattagtgccaaaactgattcacagtcattcattcagcaatatgaaaaagctttagactgttgttatgagaaggaggtgaaggaagaatttgaaacaaaatattcacttccggatattaagacatcatctcctatagaaaagcaaggagcagagttatatacgaggtcaatgtttttgaaattccaacaggaattgatatgtgccactgcttacactgctgaaatggtgaaagaggagggcaatgcttcaatttatacagtggccatatctgaaggaagtgagaagtctgtaacagttcagttctgttcttctggaagttctgcgacatgtagctgtcggatgtttgaatattttggtattgtctgcaggcacatacttactgtgtttggtgtaagaggtgtctctgcacttccttctcattattttgtaaaaagatggacaaagaatgcattggatagaagcttaggcaagaatgttgatgaagttagcagagaggagctcaaggaggagccaagaagtagcgctgaagatggtgagcaatccctgacatggcgttacaacagtttgtgtcatgaagcactaaggtatgctgaagagggagcatcatcattagaggtttatattgtggcgatgcaagctcttcaagaggctgctaacagggttaatatggccaagagaggtattggacaggtagcaccattagcggtaatgccaattgcagcacaaccaccagaaagttttgcaagaaatcaggagattacttccaataagcaaaagaagagaaaaaagaattcaagtagctcaagggagaacgccacatcaaatcaacttatcaacttcaactggaaatctgcaaggtggagtaacaaaatccataggggctgattcacgaataaaagagagtcatgaattatcccaagctaatggtaacaggggatgcagtgtaaatacattaaactctagtgctgcgcgacagctcgtgactgtccctattggattgtgccttccacccactgatggctccgagatatctgcggcttgtttgaactctgtagactctggagatatcagtagcaatggcaagttatcacttggtcttcatcaatctcagtcatctgcacaacagccagctacaccgtcacagacaaaaacacttgacagtattgattgtcgtgcaaatcctgagggttcatctataagggctgcagccattgcagccggtgcacgcattggatcaccatctgatgcagctacaatcataaaagcggctcagtcaaaaggcgccatctacattaggcctggggaaataatcccgaattacctgaaaccactagcaccaaaaccactttcctcgctaccaccgatgaacccagggcagctcagacgatttggtgattctgctgccgcgaaggatgcaatcttcggttcttcggatggcacggacgatgacgacgaggaagacactgatgacgaggaggacgacgagctgactgacaacgatgcagaacatgaataatcttctccccctgcactaacctctcctaatggtatgtgacgtggtgatcttcaacaacctcttcaaccaatggaatcttgtagagcatagctgtatacatgtttatagtctgtatttaaggccccagctgccacctccatgagccaagaattcttctttgatctctctctctcacttagcatgcctagaagccccacttatttgacctaaggacaaacattggactccttaatctccttttttcttctgttggctcctggcgaggttggtggtggtgggtctgatggtcagttcacatgtgtagctggttagctatgttatgtacagcatgagttgtacgctggcgaactgctttcaacagtccaaaattttgtaccctgtttttctcttgctggaaagggatttgttggaactgagctcacaggtcctttgttgattggacttggcttggaagagtggttggttcgttgctggaaaaaaaaaatcaaaattgat

SEQ ID NO: 10658 - DNA, 3612 bp, Zea Mays
cccctctcctcctcctgcaccttcgccggagcaccaccccctcgccgtcttgcgcccccgcctccctcgcacatctcactccttaccgtaccctccgcctacctctgctccccttatccatcctcgagctcacctgccgcgtggatcgcctcggcacattttgcttcttattatttttttttacctccccgcctgagcgttagctggttggcggatgtacgtgtcctgaccggagatgaagattcctctgtcttgaggggttgatctcggggagccgcctttagtggccggccgtccttggccccgccgcgtcggccatggacatggagaggggggcgggaagcgagcaggggtcgcccgatagcgaaatgggcgaaggcgacaacgatagcgtcggctacggcgcggagatggaggtggacgccgggagcggctcggctccggcgagctcggcgtccgcatcggcctcggtctccgcgtcggcgtacgcggcgcgcgccggcgccttcgacggggtcgaccctttcgagggcatggagttcgacgacgaggaggacgcctggacgttctataacgtctacgcccaccgcgtgggcttcagcacccggatcagcgtcatgcaccggtcgcgccgggacggctccgtcatgtcgcgccagttcgtctgcgccaaggagggcttccgcacttaccgcgggaagaatgaggtttcccgtgctgatgccgcagacgctggcgacgacgatagtgggaggggtcggaggacacgcgctgtcacccgggttggctgcaaggccatgatccgggtgaagaagcaggacaatggccgctggagtgtgactaagctggagactgcacataaccatcccctggtccccacgaaccaggcacactgcctgcgtccgcacaagccactgtcggagtgtggaaagcaccgtccttttgggggccatcgaaatggcggctcgcttctggcaattgagccaccgccaccacctcttacgccgcctgtgcctcacacaagcgtagctcaagtggttcctcagtatttttcggatggtatcgggaatgccactagagtaattttggattatgtcaaacgcatgcaagctgaagatccagcgttcttttatgccatgcaatttgttgaggggcgtccagtgggtaatgtgttttgggctgatgcgagggctaggacgacatacaaagactttggagatgccgttgtcttggatgactactgcaaaaggagcaagcatgaactgccacttgtcgcttttactggagttaatcaccattgccagccaatcctatttggctgtgccatcatggcacataacaatgaagtatcctttgtttggttgtttgagacatttctcttagcaatgtctggatgccaccctacatctcttattatggagcatgataatgttttaaaaccagctgctttgaaagtatttcctctaactaggctccagttttgtaagtggcacatcatgaacgaagcacatgataagctgtcatatctcctagatgcatttccatcattccatgacgactttattaattgcatcaatatgtctgagacaataaatgagtttgaagaaaattggaaggcattaatttctaaggccagctctcaaaaaagtgaatggcttgacttggtgtacaattgccgtcatcattgggtcccggtatatctgagagatacattctttggggatgtgtcgttaaagctgcagtgttctagcaggagttcgttgtttgaaggttatattagtgccaaaactgattcacagtcattcattcagcaatatgaaaaagctttagactgttgttatgagaaggaggtgaaggaagaatttgaaacaaaatattcacttccggatattaagacatcatctcctatagaaaagcaaggagcagagttatatacgaggtcaatgtttttgaaattccaacaggaattgatatgtgccactgcttacactgctgaaatggtgaaagaggagggcaatgcttcaatttatacagtggccatatctgaaggaagtgagaagtctgtaacagttcagttctgttcttctggaagttctgcgacatgtagctgtcggatgtttgaatattttggtattgtctgcaggcacatacttactgtgtttggtgtaagaggtgtctctgcacttccttctcattattttgtaaaaagatggacaaagaatgcattggatagaagcttaggcaagaatgttgatgaagttagcagagaggagctcaaggaggagccaagaagtagcgctgaagatggtgagcaatccctgacatggcgttacaacagtttgtgtcatgaagcactaaggtagcaccattagcggtaatgccaattgcagcacaaccaccagaaagttttgcaagaaatcaggagattacttccaataagcaaaagaagagaaaaaagaattcaagtagctcaagggagaacgccacatcaaatcaacttatagtcatgaattatcccaagctaatggtaacaggggatgcagtgtaaatacattaaactctagtgctgcgcgacagctcgtgactgtccctattggattgtgccttccacccactgatggctccgagatatctgcggcttgtttgaactctgtagactctggagatatcagtagcaatggcaagttatcacttggtcttcatcaatctcagtcatctgcacaacagccagctacaccgtcacagacaaaaacacttgacagtattgattgtcgtgcaaatcctgagggttcatctataagggctgcagccattgcagccggtgcacgcattggatcaccatctgatgcagctacaatcataaaagcggctcagtcaaaaggcgccatctacattaggcctggggaaataatcccgaattacctgaaaccactagcaccaaaaccactttcctcgctaccaccgatgaacccagggcagctcagacgatttggtgattctgctgccgcgaaggatgcaatcttcggttcttcggatggcacggacgatgacgacgaggaagacactgatgacgaggaggacgacgagctgactgacaacgatgcagaacatgaataatcttctccccctgcactaacctctcctaatggtatgtgacgtggtgatcttcaacaacctcttcaaccaatggaatcttgtagagcatagctgtatacatgtttatagtctgtatttaaggccccagctgccacctccatgagccaagaattcttctttgatctctctctctcacttagcatgcctagaagccccacttatttgacctaaggacaaacattggactccttaatctccttttttcttctgttggctcctggcgaggttggtggtggtgggtctgatggtcagttcacatgtgtagctggttagctatgttatgtacagcatgagttgtacgctggcgaactgctttcaacagtccaaaattttgtaccctgtttttctcttgctggaaagggatttgttggaactgagctcacaggtcctttgttgattggacttggcttggaagagtggttggttcgttgctggaaaaaaaaaatcaaaattgat

SEQ ID NO: 10659 - DNA, 3637 bp, Zea Mays
gcccctctcctcctcctgcaccttcgccggagcaccaccccctcgccgtcttgcgcccccgcctccctcgcacatctcactccttaccgtaccctccgcctacctctgctccccttatccatcctcgagctcacctgccgcgtggatcgcctcggcacattttgcttcttattatttttttttacctccccgcctgagcgttagctggttggcggatgtacgtgtcctgaccggagatgaagattcctctgtcttgaggggttgatctcggggagccgcctttagtggccggccgtccttggccccgccgcgtcggccatggacatggagaggggggcgggaagcgagcaggggtcgcccgatagcgaaatgggcgaaggcgacaacgatagcgtcggctacggcgcggagatggaggtggacgccgggagcggctcggctccggcgagctcggcgtccgcatcggcctcggtctccgcgtcggcgtacgcggcgcgcgccggcgccttcgacggggtcgaccctttcgagggcatggagttcgacgacgaggaggacgcctggacgttctataacgtctacgcccaccgcgtgggcttcagcacccggatcagcgtcatgcaccggtcgcgccgggacggctccgtcatgtcgcgccagttcgtctgcgccaaggagggcttccgcacttaccgcgggaagaatgaggtttcccgtgctgatgccgcagacgctggcgacgacgatagtgggaggggtcggaggacacgcgctgtcacccgggttggctgcaaggccatgatccgggtgaagaagcaggacaatggccgctggagtgtgactaagctggagactgcacataaccatcccctggtccccacgaaccaggcacactgcctgcgtccgcacaagccactgtcggagtgtggaaagcaccgtccttttgggggccatcgaaatggcggctcgcttctggcaattgagccaccgccaccacctcttacgccgcctgtgcctcacacaagcgtagctcaagtggttcctcagtatttttcggatggtatcgggaatgccactagagtaattttggattatgtcaaacgcatgcaagctgaagatccagcgttcttttatgccatgcaatttgttgaggggcgtccagtgggtaatgtgttttgggctgatgcgagggctaggacgacatacaaagactttggagatgccgttgtcttggatgactactgcaaaaggagcaagcatgaactgccacttgtcgcttttactggagttaatcaccattgccagccaatcctatttggctgtgccatcatggcacataacaatgaattttgtaagtggcacatcatgaacgaagcacatgataagctgtcatatctcctagatgcatttccatcattccatgacgactttattaattgcatcaatatgtctgagacaataaatgagtttgaagaaaattggaaggcattaatttctaaggccagctctcaaaaaagtgaatggcttgacttggtgtacaattgccgtcatcattgggtcccggtatatctgagagatacattctttggggatgtgtcgttaaagctgcagtgttctagcaggagttcgttgtttgaaggttatattagtgccaaaactgattcacagtcattcattcagcaatatgaaaaagctttagactgttgttatgagaaggaggtgaaggaagaatttgaaacaaaatattcacttccggatattaagacatcatctcctatagaaaagcaaggagcagagttatatacgaggtcaatgtttttgaaattccaacaggaattgatatgtgccactgcttacactgctgaaatggtgaaagaggagggcaatgcttcaatttatacagtggccatatctgaaggaagtgagaagtctgtaacagttcagttctgttcttctggaagttctgcgacatgtagctgtcggatgtttgaatattttggtattgtctgcaggcacatacttactgtgtttggtgtaagaggtgtctctgcacttccttctcattattttgtaaaaagatggacaaagaatgcattggatagaagcttaggcaagaatgttgatgaagttagcagagaggagctcaaggaggagccaagaagtagcgctgaagatggtgagcaatccctgacatggcgttacaacagtttgtgtcatgaagcactaaggtatgctgaagagggagcatcatcattagaggtttatattgtggcgatgcaagctcttcaagaggctgctaacagggttaatatggccaagagaggtattggacaggtagcaccattagcggtaatgccaattgcagcacaaccaccagaaagttttgcaagaaatcaggagattacttccaataagcaaaagaagagaaaaaagaattcaagtagctcaagggagaacgccacatcaaatcaacttatcaacttcaactggaaatctgcaaggtggagtaacaaaatccataggggctgattcacgaataaaagagagtcatgaattatcccaagctaatggtaacaggggatgcagtgtaaatacattaaactctagtgctgcgcgacagctcgtgactgtccctattggattgtgccttccacccactgatggctccgagatatctgcggactctggagatatcagtagcaatggcaagttatcacttggtcttcatcaatctcagtcatctgcacaacagccagctacaccgtcacagacaaaaacacttgacagtattgattgtcgtgcaaatcctgagggttcatctataagggctgcagccattgcagccggtgcacgcattggatcaccatctgatgcagctacaatcataaaagcggctcagtcaaaaggcgccatctacattaggcctggggaaataatcccgaattacctgaaaccactagcaccaaaaccactttcctcgctaccaccgatgaacccagggcagctcagacgatttggtgattctgctgccgcgaaggatgcaatcttcggttcttcggatggcacggacgatgacgacgaggaagacactgatgacgaggaggacgacgagctgactgacaacgatgcagaacatgaataatcttctccccctgcactaacctctcctaatggtatgtgacgtggtgatcttcaacaacctcttcaaccaatggaatcttgtagagcatagctgtatacatgtttatagtctgtatttaaggccccagctgccacctccatgagccaagaattcttctttgatctctctctctcacttagcatgcctagaagccccacttatttgacctaaggacaaacattggactccttaatctccttttttcttctgttggctcctggcgaggttggtggtggtgggtctgatggtcagttcacatgtgtagctggttagctatgttatgtacagcatgagttgtacgctggcgaactgctttcaacagtccaaaattttgtaccctgtttttctcttgctggaaagggatttgttggaactgagctcacaggtcctttgttgattggacttggcttggaagagtggttggttcgttgctggaaaaaaaaaatcaaaattgat

SEQ ID NO: 10660 - DNA, 3716 bp, Zea Mays
caaccgtaccctcccgcccctctcctcctcctgcaccttcgccggagcaccaccccctcgccgtcttgcgcccccgcctccctcgcacatctcactccttaccgtaccctccgcctacctctgctccccttatccatcctcgagctcacctgccgcgtggatcgcctcggcacattttgcttcttattatttttttttacctccccgcctgagcgttagctggttggcggatgtacgtgtcctgaccggagatgaagattcctctgtcttgaggggttgatctcggggagccgcctttagtggccggccgtccttggccccgccgcgtcggccatggacatggagaggggggcgggaagcgagcaggggtcgcccgatagcgaaatgggcgaaggcgacaacgatagcgtcggctacggcgcggagatggaggtggacgccgggagcggctcggctccggcgagctcggcgtccgcatcggcctcggtctccgcgtcggcgtacgcggcgcgcgccggcgccttcgacggggtcgaccctttcgagggcatggagttcgacgacgaggaggacgcctggacgttctataacgtctacgcccaccgcgtgggcttcagcacccggatcagcgtcatgcaccggtcgcgccgggacggctccgtcatgtcgcgccagttcgtctgcgccaaggagggcttccgcacttaccgcgggaagaatgaggtttcccgtgctgatgccgcagacgctggcgacgacgatagtgggaggggtcggaggacacgcgctgtcacccgggttggctgcaaggccatgatccgggtgaagaagcaggacaatggccgctggagtgtgactaagctggagactgcacataaccatcccctggtccccacgaaccaggcacactgcctgcgtccgcacaagccactgtcggagtgtggaaagcaccgtccttttgggggccatcgaaatggcggctcgcttctggcaattgagccaccgccaccacctcttacgccgcctgtgcctcacacaagcgtagctcaagtggttcctcagtatttttcggatggtatcgggaatgccactagagtaattttggattatgtcaaacgcatgcaagctgaagatccagcgttcttttatgccatgcaatttgttgaggggcgtccagtgggtaatgtgttttgggctgatgcgagggctaggacgacatacaaagactttggagatgccgttgtcttggatgactactgcaaaaggagcaagcatgaactgccacttgtcgcttttactggagttaatcaccattgccagccaatcctatttggctgtgccatcatggcacataacaatgaagtatcctttgtttggttgtttgagacatttctcttagcaatgtctggatgccaccctacatctcttattatggagcatgataatgttttaaaaccagctgctttgaaagtatttcctctaactaggctccagttttgtaagtggcacatcatgaacgaagcacatgataagctgtcatatctcctagatgcatttccatcattccatgacgactttattaattgcatcaatatgtctgagacaataaatgagtttgaagaaaattggaaggcattaatttctaaggccagctctcaaaaaagtgaatggcttgacttggtgtacaattgccgtcatcattgggtcccggtatatctgagagatacattctttggggatgtgtcgttaaagctgcagtgttctagcaggagttcgttgtttgaaggttatattagtgccaaaactgattcacagtcattcattcagcaatatgaaaaagctttagactgttgttatgagaaggaggtgaaggaagaatttgaaacaaaatattcacttccggatattaagacatcatctcctatagaaaagcaaggagcagagttatatacgaggtcaatgtttttgaaattccaacaggaattgatatgtgccactgcttacactgctgaaatggtgaaagaggagggcaatgcttcaatttatacagtggccatatctgaaggaagtgagaagtctgtaacagttcagttctgttcttctggaagttctgcgacatgtagctgtcggatgtttgaatattttggtattgtctgcaggcacatacttactgtgtttggtgtaagaggtgtctctgcacttccttctcattattttgtaaaaagatggacaaagaatgcattggatagaagcttaggcaagaatgttgatgaagttagcagagaggagctcaaggaggagccaagaagtagcgctgaagatggtgagcaatccctgacatggcgttacaacagtttgtgtcatgaagcactaaggtatgctgaagagggagcatcatcattagaggtttatattgtggcgatgcaagctcttcaagaggctgctaacagggttaatatggccaagagaggtattggacaggtagcaccattagcggtaatgccaattgcagcacaaccaccagaaagttttgcaagaaatcaggagattacttccaataagcaaaagaagagaaaaaagaattcaagtagctcaagggagaacgccacatcaaatcaacttatagtcatgaattatcccaagctaatggtaacaggggatgcagtgtaaatacattaaactctagtgctgcgcgacagctcgtgactgtccctattggattgtgccttccacccactgatggctccgagatatctgcggactctggagatatcagtagcaatggcaagttatcacttggtcttcatcaatctcagtcatctgcacaacagccagctacaccgtcacagacaaaaacacttgacagtattgattgtcgtgcaaatcctgagggttcatctataagggctgcagccattgcagccggtgcacgcattggatcaccatctgatgcagctacaatcataaaagcggctcagtcaaaaggcgccatctacattaggcctggggaaataatcccgaattacctgaaaccactagcaccaaaaccactttcctcgctaccaccgatgaacccagggcagctcagacgatttggtgattctgctgccgcgaaggatgcaatcttcggttcttcggatggcacggacgatgacgacgaggaagacactgatgacgaggaggacgacgagctgactgacaacgatgcagaacatgaataatcttctccccctgcactaacctctcctaatggtatgtgacgtggtgatcttcaacaacctcttcaaccaatggaatcttgtagagcatagctgtatacatgtttatagtctgtatttaaggccccagctgccacctccatgagccaagaattcttctttgatctctctctctcacttagcatgcctagaagccccacttatttgacctaaggacaaacattggactccttaatctccttttttcttctgttggctcctggcgaggttggtggtggtgggtctgatggtcagttcacatgtgtagctggttagctatgttatgtacagcatgagttgtacgctggcgaactgctttcaacagtccaaaattttgtaccctgtttttctcttgctggaaagggatttgttggaactgagctcacaggtcctttgttgattggacttggcttggaagagtggttggttcgttgctggaaaaaaaaaatcaaaattgat

SEQ ID NO: 10661 - DNA, 3979 bp, Zea Mays
cccaaccgtaccctcccgcccctctcctcctcctgcaccttcgccggagcaccaccccctcgccgtcttgcgcccccgcctccctcgcacatctcactccttaccgtaccctccgcctacctctgctccccttatccatcctcgagctcacctgccgcgtggatcgcctcggcacattttgcttcttattatttttttttacctccccgcctgagcgttagctggttggcggatgtacgtgtcctgaccggagatgaagattcctctgtcttgaggggttgatctcggggagccgcctttagtggccggccgtccttggccccgccgcgtcggccatggacatggagaggggggcgggaagcgagcaggggtcgcccgatagcgaaatgggcgaaggcgacaacgatagcgtcggctacggcgcggagatggaggtggacgccgggagcggctcggctccggcgagctcggcgtccgcatcggcctcggtctccgcgtcggcgtacgcggcgcgcgccggcgccttcgacggggtcgaccctttcgagggcatggagttcgacgacgaggaggacgcctggacgttctataacgtctacgcccaccgcgtgggcttcagcacccggatcagcgtcatgcaccggtcgcgccgggacggctccgtcatgtcgcgccagttcgtctgcgccaaggagggcttccgcacttaccgcgggaagaatgaggtttcccgtgctgatgccgcagacgctggcgacgacgatagtgggaggggtcggaggacacgcgctgtcacccgggttggctgcaaggccatgatccgggtgaagaagcaggacaatggccgctggagtgtgactaagctggagactgcacataaccatcccctggtccccacgaaccaggcacactgcctgcgtccgcacaagccactgtcggagtgtggaaagcaccgtccttttgggggccatcgaaatggcggctcgcttctggcaattgagccaccgccaccacctcttacgccgcctgtgcctcacacaagcgtagctcaagtggttcctcagtatttttcggatggtatcgggaatgccactagagtaattttggattatgtcaaacgcatgcaagctgaagatccagcgttcttttatgccatgcaatttgttgaggggcgtccagtgggtaatgtgttttgggctgatgcgagggctaggacgacatacaaagactttggagatgccgttgtcttggatgactactgcaaaaggagcaagcatgaactgccacttgtcgcttttactggagttaatcaccattgccagccaatcctatttggctgtgccatcatggcacataacaatgaagtatcctttgtttggttgtttgagacatttctcttagcaatgtctggatgccaccctacatctcttattatggagcatgataatgttttaaaaccagctgctttgaaagtatttcctctaactaggctccagttttgtaagtggcacatcatgaacgaagcacatgataagctgtcatatctcctagatgcatttccatcattccatgacgactttattaattgcatcaatatgtctgagacaataaatgagtttgaagaaaattggaaggcattaatttctaaggccagctctcaaaaaagtgaatggcttgacttggtgtacaattgccgtcatcattgggtcccggtatatctgagagatacattctttggggatgtgtcgttaaagctgcagtgttctagcaggagttcgttgtttgaaggttatattagtgccaaaactgattcacagtcattcattcagcaatatgaaaaagctttagactgttgttatgagaaggaggtgaaggaagaatttgaaacaaaatattcacttccggatattaagacatcatctcctatagaaaagcaaggagcagagttatatacgaggtcaatgtttttgaaattccaacaggaattgatatgtgccactgcttacactgctgaaatggtgaaagaggagggcaatgcttcaatttatacagtggccatatctgaaggaagtgagaagtctgtaacagttcagttctgttcttctggaagttctgcgacatgtagctgtcggatgtttgaatattttggtattgtctgcaggcacatacttactgtgtttggtgtaagaggtgtctctgcacttccttctcattattttgtaaaaagatggacaaagaatgcattggatagaagcttaggcaagaatgttgatgaagttagcagagaggagctcaaggaggagccaagaagtagcgctgaagatggtgagcaatccctgacatggcgttacaacagtttgtgtcatgaagcactaaggtatgctgaagagggagcatcatcattagaggtttatattgtggcgatgcaagctcttcaagaggctgctaacagggttaatatggccaagagaggtattggacaggtagcaccattagcggtaatgccaattgcagcacaaccaccagaaagttttgcaagaaatcaggagattacttccaataagcaaaagaagagaaaaaagaattcaagtagctcaagggagaacgccacatcaaatcaacttatttgataagttttctgggttacctgaccaaaatgcaccagcaacttcaactggaaatctgcaaggtggagtaacaaaatccataggggctgattcacgaataaaagaggtacctttgcatacgaacttagcgcggcagcttagttcccagttattactgagagagactataaaattccttattataagcctcggcttacagcttagtttagctgcaatatcttcttttgcactcgtcgccacggagtcatgaattatcccaagctaatggtaacaggggatgcagtgtaaatacattaaactctagtgctgcgcgacagctcgtgactgtccctattggattgtgccttccacccactgatggctccgagatatctgcggcttgtttgaactctgtagactctggagatatcagtagcaatggcaagttatcacttggtcttcatcaatctcagtcatctgcacaacagccagctacaccgtcacagacaaaaacacttgacagtattgattgtcgtgcaaatcctgagggttcatctataagggctgcagccattgcagccggtgcacgcattggatcaccatctgatgcagctacaatcataaaagcggctcagtcaaaaggcgccatctacattaggcctggggaaataatcccgaattacctgaaaccactagcaccaaaaccactttcctcgctaccaccgatgaacccagggcagctcagacgatttggtgattctgctgccgcgaaggatgcaatcttcggttcttcggatggcacggacgatgacgacgaggaagacactgatgacgaggaggacgacgagctgactgacaacgatgcagaacatgaataatcttctccccctgcactaacctctcctaatggtatgtgacgtggtgatcttcaacaacctcttcaaccaatggaatcttgtagagcatagctgtatacatgtttatagtctgtatttaaggccccagctgccacctccatgagccaagaattcttctttgatctctctctctcacttagcatgcctagaagccccacttatttgacctaaggacaaacattggactccttaatctccttttttcttctgttggctcctggcgaggttggtggtggtgggtctgatggtcagttcacatgtgtagctggttagctatgttatgtacagcatgagttgtacgctggcgaactgctttcaacagtccaaaattttgtaccctgtttttctcttgctggaaagggatttgttggaactgagctcacaggtcctttgttgattggacttggcttggaagagtggttggttcgttgctggaaaaaaaaaatcaaaattgat

SEQ ID NO: 10662 - DNA, 3851 bp, Zea Mays
tccccccacccaaccgtaccctcccgcccctctcctcctcctgcaccttcgccggagcaccaccccctcgccgtcttgcgcccccgcctccctcgcacatctcactccttaccgtaccctccgcctacctctgctccccttatccatcctcgagctcacctgccgcgtggatcgcctcggcacattttgcttcttattatttttttttacctccccgcctgagcgttagctggttggcggatgtacgtgtcctgaccggagatgaagattcctctgtcttgaggggttgatctcggggagccgcctttagtggccggccgtccttggccccgccgcgtcggccatggacatggagaggggggcgggaagcgagcaggggtcgcccgatagcgaaatgggcgaaggcgacaacgatagcgtcggctacggcgcggagatggaggtggacgccgggagcggctcggctccggcgagctcggcgtccgcatcggcctcggtctccgcgtcggcgtacgcggcgcgcgccggcgccttcgacggggtcgaccctttcgagggcatggagttcgacgacgaggaggacgcctggacgttctataacgtctacgcccaccgcgtgggcttcagcacccggatcagcgtcatgcaccggtcgcgccgggacggctccgtcatgtcgcgccagttcgtctgcgccaaggagggcttccgcacttaccgcgggaagaatgaggtttcccgtgctgatgccgcagacgctggcgacgacgatagtgggaggggtcggaggacacgcgctgtcacccgggttggctgcaaggccatgatccgggtgaagaagcaggacaatggccgctggagtgtgactaagctggagactgcacataaccatcccctggtccccacgaaccaggcacactgcctgcgtccgcacaagccactgtcggagtgtggaaagcaccgtccttttgggggccatcgaaatggcggctcgcttctggcaattgagccaccgccaccacctcttacgccgcctgtgcctcacacaagcgtagctcaagtggttcctcagtatttttcggatggtatcgggaatgccactagagtaattttggattatgtcaaacgcatgcaagctgaagatccagcgttcttttatgccatgcaatttgttgaggggcgtccagtgggtaatgtgttttgggctgatgcgagggctaggacgacatacaaagactttggagatgccgttgtcttggatgactactgcaaaaggagcaagcatgaactgccacttgtcgcttttactggagttaatcaccattgccagccaatcctatttggctgtgccatcatggcacataacaatgaagtatcctttgtttggttgtttgagacatttctcttagcaatgtctggatgccaccctacatctcttattatggagcatgataatgttttaaaaccagctgctttgaaagtatttcctctaactaggctccagttttgtaagtggcacatcatgaacgaagcacatgataagctgtcatatctcctagatgcatttccatcattccatgacgactttattaattgcatcaatatgtctgagacaataaatgagtttgaagaaaattggaaggcattaatttctaaggccagctctcaaaaaagtgaatggcttgacttggtgtacaattgccgtcatcattgggtcccggtatatctgagagatacattctttggggatgtgtcgttaaagctgcagtgttctagcaggagttcgttgtttgaaggttatattagtgccaaaactgattcacagtcattcattcagcaatatgaaaaagctttagactgttgttatgagaaggaggtgaaggaagaatttgaaacaaaatattcacttccggatattaagacatcatctcctatagaaaagcaaggagcagagttatatacgaggtcaatgtttttgaaattccaacaggaattgatatgtgccactgcttacactgctgaaatggtgaaagaggagggcaatgcttcaatttatacagtggccatatctgaaggaagtgagaagtctgtaacagttcagttctgttcttctggaagttctgcgacatgtagctgtcggatgtttgaatattttggtattgtctgcaggcacatacttactgtgtttggtgtaagaggtgtctctgcacttccttctcattattttgtaaaaagatggacaaagaatgcattggatagaagcttaggcaagaatgttgatgaagttagcagagaggagctcaaggaggagccaagaagtagcgctgaagatggtgagcaatccctgacatggcgttacaacagtttgtgtcatgaagcactaaggtatgctgaagagggagcatcatcattagaggtttatattgtggcgatgcaagctcttcaagaggctgctaacagggttaatatggccaagagaggtattggacaggtagcaccattagcggtaatgccaattgcagcacaaccaccagaaagttttgcaagaaatcaggagattacttccaataagcaaaagaagagaaaaaagaattcaagtagctcaagggagaacgccacatcaaatcaacttatttgataagttttctgggttacctgaccaaaatgcaccagcaacttcaactggaaatctgcaaggtggagtaacaaaatccataggggctgattcacgaataaaagagagtcatgaattatcccaagctaatggtaacaggggatgcagtgtaaatacattaaactctagtgctgcgcgacagctcgtgactgtccctattggattgtgccttccacccactgatggctccgagatatctgcggcttgtttgaactctgtagactctggagatatcagtagcaatggcaagttatcacttggtcttcatcaatctcagtcatctgcacaacagccagctacaccgtcacagacaaaaacacttgacagtattgattgtcgtgcaaatcctgagggttcatctataagggctgcagccattgcagccggtgcacgcattggatcaccatctgatgcagctacaatcataaaagcggctcagtcaaaaggcgccatctacattaggcctggggaaataatcccgaattacctgaaaccactagcaccaaaaccactttcctcgctaccaccgatgaacccagggcagctcagacgatttggtgattctgctgccgcgaaggatgcaatcttcggttcttcggatggcacggacgatgacgacgaggaagacactgatgacgaggaggacgacgagctgactgacaacgatgcagaacatgaataatcttctccccctgcactaacctctcctaatggtatgtgacgtggtgatcttcaacaacctcttcaaccaatggaatcttgtagagcatagctgtatacatgtttatagtctgtatttaaggccccagctgccacctccatgagccaagaattcttctttgatctctctctctcacttagcatgcctagaagccccacttatttgacctaaggacaaacattggactccttaatctccttttttcttctgttggctcctggcgaggttggtggtggtgggtctgatggtcagttcacatgtgtagctggttagctatgttatgtacagcatgagttgtacgctggcgaactgctttcaacagtccaaaattttgtaccctgtttttctcttgctggaaagggatttgttggaactgagctcacaggtcctttgttgattggacttggcttggaagagtggttggttcgttgctggaaaaaaaaaatcaaaattgat

SEQ ID NO: 10663 - DNA, 3833 bp, Zea Mays
tccccccacccaaccgtaccctcccgcccctctcctcctcctgcaccttcgccggagcaccaccccctcgccgtcttgcgcccccgcctccctcgcacatctcactccttaccgtaccctccgcctacctctgctccccttatccatcctcgagctcacctgccgcgtggatcgcctcggcacattttgcttcttattatttttttttacctccccgcctgagcgttagctggttggcggatgtacgtgtcctgaccggagatgaagattcctctgtcttgaggggttgatctcggggagccgcctttagtggccggccgtccttggccccgccgcgtcggccatggacatggagaggggggcgggaagcgagcaggggtcgcccgatagcgaaatgggcgaaggcgacaacgatagcgtcggctacggcgcggagatggaggtggacgccgggagcggctcggctccggcgagctcggcgtccgcatcggcctcggtctccgcgtcggcgtacgcggcgcgcgccggcgccttcgacggggtcgaccctttcgagggcatggagttcgacgacgaggaggacgcctggacgttctataacgtctacgcccaccgcgtgggcttcagcacccggatcagcgtcatgcaccggtcgcgccgggacggctccgtcatgtcgcgccagttcgtctgcgccaaggagggcttccgcacttaccgcgggaagaatgaggtttcccgtgctgatgccgcagacgctggcgacgacgatagtgggaggggtcggaggacacgcgctgtcacccgggttggctgcaaggccatgatccgggtgaagaagcaggacaatggccgctggagtgtgactaagctggagactgcacataaccatcccctggtccccacgaaccaggcacactgcctgcgtccgcacaagccactgtcggagtgtggaaagcaccgtccttttgggggccatcgaaatggcggctcgcttctggcaattgagccaccgccaccacctcttacgccgcctgtgcctcacacaagcgtagctcaagtggttcctcagtatttttcggatggtatcgggaatgccactagagtaattttggattatgtcaaacgcatgcaagctgaagatccagcgttcttttatgccatgcaatttgttgaggggcgtccagtgggtaatgtgttttgggctgatgcgagggctaggacgacatacaaagactttggagatgccgttgtcttggatgactactgcaaaaggagcaagcatgaactgccacttgtcgcttttactggagttaatcaccattgccagccaatcctatttggctgtgccatcatggcacataacaatgaagtatcctttgtttggttgtttgagacatttctcttagcaatgtctggatgccaccctacatctcttattatggagcatgataatgttttaaaaccagctgctttgaaagtatttcctctaactaggctccagttttgtaagtggcacatcatgaacgaagcacatgataagctgtcatatctcctagatgcatttccatcattccatgacgactttattaattgcatcaatatgtctgagacaataaatgagtttgaagaaaattggaaggcattaatttctaaggccagctctcaaaaaagtgaatggcttgacttggtgtacaattgccgtcatcattgggtcccggtatatctgagagatacattctttggggatgtgtcgttaaagctgcagtgttctagcaggagttcgttgtttgaaggttatattagtgccaaaactgattcacagtcattcattcagcaatatgaaaaagctttagactgttgttatgagaaggaggtgaaggaagaatttgaaacaaaatattcacttccggatattaagacatcatctcctatagaaaagcaaggagcagagttatatacgaggtcaatgtttttgaaattccaacaggaattgatatgtgccactgcttacactgctgaaatggtgaaagaggagggcaatgcttcaatttatacagtggccatatctgaaggaagtgagaagtctgtaacagttcagttctgttcttctggaagttctgcgacatgtagctgtcggatgtttgaatattttggtattgtctgcaggcacatacttactgtgtttggtgtaagaggtgtctctgcacttccttctcattattttgtaaaaagatggacaaagaatgcattggatagaagcttaggcaagaatgttgatgaagttagcagagaggagctcaaggaggagccaagaagtagcgctgaagatggtgagcaatccctgacatggcgttacaacagtttgtgtcatgaagcactaaggtatgctgaagagggagcatcatcattagaggtttatattgtggcgatgcaagctcttcaagaggctgctaacagggttaatatggccaagagaggtattggacaggtagcaccattagcggtaatgccaattgcagcacaaccaccagaaagttttgcaagaaatcaggagattacttccaataagcaaaagaagagaaaaaagaattcaagtagctcaagggagaacgccacatcaaatcaacttatttgataagttttctgggttacctgaccaaaatgcaccagcaacttcaactggaaatctgcaaggtggagtaacaaaatccataggggctgattcacgaataaaagagagtcatgaattatcccaagctaatggtaacaggggatgcagtgtaaatacattaaactctagtgctgcgcgacagctcgtgactgtccctattggattgtgccttccacccactgatggctccgagatatctgcggactctggagatatcagtagcaatggcaagttatcacttggtcttcatcaatctcagtcatctgcacaacagccagctacaccgtcacagacaaaaacacttgacagtattgattgtcgtgcaaatcctgagggttcatctataagggctgcagccattgcagccggtgcacgcattggatcaccatctgatgcagctacaatcataaaagcggctcagtcaaaaggcgccatctacattaggcctggggaaataatcccgaattacctgaaaccactagcaccaaaaccactttcctcgctaccaccgatgaacccagggcagctcagacgatttggtgattctgctgccgcgaaggatgcaatcttcggttcttcggatggcacggacgatgacgacgaggaagacactgatgacgaggaggacgacgagctgactgacaacgatgcagaacatgaataatcttctccccctgcactaacctctcctaatggtatgtgacgtggtgatcttcaacaacctcttcaaccaatggaatcttgtagagcatagctgtatacatgtttatagtctgtatttaaggccccagctgccacctccatgagccaagaattcttctttgatctctctctctcacttagcatgcctagaagccccacttatttgacctaaggacaaacattggactccttaatctccttttttcttctgttggctcctggcgaggttggtggtggtgggtctgatggtcagttcacatgtgtagctggttagctatgttatgtacagcatgagttgtacgctggcgaactgctttcaacagtccaaaattttgtaccctgtttttctcttgctggaaagggatttgttggaactgagctcacaggtcctttgttgattggacttggcttggaagagtggttggttcgttgctggaaaaaaaaaatcaaaattgat

SEQ ID NO: 10664 - DNA, 748 bp, Zea Mays
ggaccaccagagtgaactgctgtactatttttttagctgcctagttttttagtcgtttcctcttaaaaaagttgttgtgcttctcgtttcaccgtgcgccacaagcacacaactagggcgaccgccgccgacctacggccagctgtgcccatgtcttcgtcgggccctttgctggcgacgggaacccaccacaccggccgccaacctgaggttttgtgggctcagcgctccgagaagattttcttgactatctcattgccagatgcgaaagatgttgtgttaaagaccgatcctaagggcctctttaccttctctgctgttgtccatggggaaccttttagcttcactttggagctttttgattcaatactgtcagagggaagtaaaacgaagacaaagatgggcctgcgaaacataatctgttcaatccagaaagaaaagaaaggttggtggaagcgcttgctaaagtcagaggaaaagcatccatacatcaaagttgactggaacaaatggtgcgatgaggatgaagagtctggtatgtgctaatgatatacatccccagatatatgcagttgtttttggtctagatgcattctgaatttagtatgaataaagggttgtaaaaaatcaagccaggttggaattcagtagtttaaattgatgaaatgtgtattttttttatggaacttggatttgttgttgtggtggccatggagtccattccaaactagtttaattttgttaacaa

SEQ ID NO: 10665 - DNA, 240 bp, Zea Mays
aatatatctaaaaatttagccttaaataaggaataaaaaacagttattcatgtgccttagccttaaacatgaacaaatgaaaaacagttatgccctgaaacttattttgtgcttttgttgggggttttaactccactgtagctttagaactaagctgacttaattgttgctgctaaagcagatgagaacgacaatatacagcggagtcaaatatatttgactggcacaacccgattctaa

SEQ ID NO: 10666 - DNA, 1255 bp, Zea Mays
aggattcaggggacattggtggactgggttaaccagctcaaggcttctggtcgaatcagtgatgctattgataaaccattgcgtggaaagggccatgaggcagagattcaggagttcttgaagatagcttttgcttgcacccagccccgtgtgacggagaggcattcaatgtatcgggttttccacgctctgaagagcatcggagagggctgcgatgtcacggagcagtttgatgagttcccattggcctataacaaggatgattcagacgctatttagctgatgatgctgattgccaattcgattgtggaaatgtttggtcaggcttattgatgatatatatatttagccttgctatggacagaccggaagcataaatgagtgataagagaacaatatcgaggcaccaaatctagcgccggatgccgggtggtcaattacatcgttgcatcgacaggggatgtgataaccataagtaatattgctcgaaaatgtagagctgactcttgaagcctttgactacatgcagctgccattcacgctgaaaggacaaattaggaagctaagcatctagataggagaatttgattggttcgtgtcaatatttaatttcttagctcactctgttcatgcctttgtggttcatggacaactgctgctacgtgctcccttccccgacagcgcattctaacacggcatgatacaccagcaactggaatgttgtcaacatcagcggcaacgacgacaacgccacatcgagaaacaacaactgtgggccagggagcacaatcccgtggtgcggtgacttgcccacgtttgccatgctgccttgatgcatggcacatcaacaagaagagcaccagtttggaaggctaattccgaaggaattgagatgtgcagagggagatgaagaatgtggagaaagacatcagggtagctaccaagcgcaatgacatgttatctgcaaaggtacggtcggtctgatcttgttttctatataagtgttcctctcttgtagcatggattgctgggattctgacagtagcacagttagtcaaggtgaatcttggagtaatgtagatacaaatcaaagttatctcctggcgctaaataaggttttagaattgatgttcatcttcttgtctaatgtggattgggtgctattacatgagcaaaagaaaaccttaaaggttgtcttagtgtataaataataaacatggcaggagcagaaccaaaagaaaaaacaatatcataa

SEQ ID NO: 10667 - DNA, 468 bp, Zea Mays
ctgagcactcatgcagtaacggaccgtttggttcagagcttcccaggcagcttcgttgccaggcaaggatgtcatccccaggtgcccaaaatcggatgcctggcgacgcccacagtgcctgtcaaagctgcctgggagcaaagaaaacaggtcaatcaaggttgtttagagatgcctgccaacactgattgttctgaagatttattccaaagccatgaagcagaaatgcttgagaacgcagaattttggtcaaagtcaaactactcccctgtggagcatctggagtgccatatggaagttaacatggagctgaacgaaggagaacaaatgattgatcacacagaagctagccgatatgaattgtttagcaacgatctgcagagcaaatcaagaacttccaacttggacaatgaacattttccaagggatgcatcaaaccacgctaatgttgaagcaactggacctcca

SEQ ID NO: 10668 - DNA, 787 bp, Zea Mays
cgatcagtcgcaccacgaaaccacccaccccggtccgcctccgaaaataacgaccccgattccggctcggccattccgaacgccagacccgttcctttttatttaaatcccatctcggagcgaattttcctttcgttcgacgcggatgccatcttctttttagccccctcccgtcaccaccaccacaggtccacagccgcgctgattggaaaaggggtttcgctcttccggagaaggcaaggcgtttgcggtttgcccgccgccgtgaatcgtatgtgatcgaatcgcgcggcgggtgatggcggaggaaccggtggtcggttatgatggcttcgaggccgccggtgatgctggcgccggtggcgcggaggacaacctgtcgatgtccctcggcgacttcatggcgttcctcgaaactgagcccacgtcacccgaggaaggctggaaggaggagcagcagatgcagcctgcggtcaatcaaggttgtttagagatgcctgccaacactgattgttctgaagatttattccaaagccatgaagaaatgcttgagaacgcagaattttggtcaaagtcaaactactcccctgtggagcatctggagtgccatatggaagttaacatggagctgaacgaaggagaacaaatgattgatcacacagaagctagccgatatgaattgtttagcaacgatctgcagagcaaatcaagaacttccaacttggacaatgaacattttccaagggatgcatcaaaccacgctaatgttgaagcaactggacctcca

SEQ ID NO: 10669 - DNA, 821 bp, Zea Mays
aaacgaggcaaccggctgcaccgcctcgtgacgatcagtcgcaccacgaaaccacccaccccggtccgcctccgaaaataacgaccccgattccggctcggccattccgaacgccagacccgttcctttttatttaaatcccatctcggagcgaattttcctttcgttcgacgcggatgccatcttctttttagccccctcccgtcaccaccaccacaggtccacagccgcgctgattggaaaaggggtttcgctcttccggagaaggcaaggcgtttgcggtttgcccgccgccgtgaatcgtatgtgatcgaatcgcgcggcgggtgatggcggaggaaccggtggtcggttatgatggcttcgaggccgccggtgatgctggcgccggtggcgcggaggacaacctgtcgatgtccctcggcgacttcatggcgttcctcgaaactgagcccacgtcacccgaggaaggctggaaggaggagcagcagatgcagcctgcggtcaatcaaggttgtttagagatgcctgccaacactgattgttctgaagatttattccaaagccatgaagcagaaatgcttgagaacgcagaattttggtcaaagtcaaactactcccctgtggagcatctggagtgccatatggaagttaacatggagctgaacgaaggagaacaaatgattgatcacacagaagctagccgatatgaattgtttagcaacgatctgcagagcaaatcaagaacttccaacttggacaatgaacattttccaagggatgcatcaaaccacgctaatgttgaagcaactggacctcca

SEQ ID NO: 10670 - DNA, 1597 bp, Zea Mays
atcaaacccaactccccgcaccaattccttccaagttccttccaactcgctcccaaatccagacgagaaaaagctccgcgtctgcggtttgattgcgctcgcgccccttccgaatcctctcgccaccccccgccgtcatggacgacgaccacgaccacgacgcgtcgtcgccggccgccggggagcggtgcccgtgctgctcctccccctcctcctcgccggccgtgccgtggcggcggtccgtgaagcggaagctgggcgcggagaagggggaggagggcggggaggcggggcccacggcgcgggtcgaggcggaggacgagtgcgcggcgctgcgggaggcggtggcggcggcccagtccacggcgtcggcgctgcgggccgaggtcgaggaggagcgcctcgccgcggccagcgccgccagcgaggccatggccatgatgctccgcctgcagcgcgacaaggccgaggtccagatggagctccgccagttccgccgcttcgccgacgagaagatggcgctcgacgccgcggacatcgaccagctgcgcgcgctcctcgcccagcgcgcgcgccgcctggtgcgcctccgcgccaggctccgcgagtacaggcgccagttcctccacctcggcatcccgctccccgagggcgaggacctcctgttcgcccagaccgccgccgaggaggaagaggacctactcctcctcgagggcgaggacggctacgccgatggcgatggcgatggtgatggagggtactaccctcagctccgctgcaacgacggggagtactactacgaggacgaggaggaagaagatgcggttgccctcgatctggagcgccggatctgccgcctcgagcacgatcaggaaactcccctgcttgagccaccccttcaggaagacgaagaggaaggcacccacctctacacagaagaggcgttgccggacttgtctgggcatgagcagggtggcctctatgctgatgacatgttatctgtggacggtgtggaagaactgagcgacctccacaatgacgatgaagagctgccagagtctcctactgctggccgtggtgatagggtggaagcaagcgaggctgatggtgttgacagtggcagtgatagggtatacaccattgacaaggtgcatcaaggtgagtctgcgcctattgcaagggtcatggataagtaccagggtgaggcggtggagccagacattaagaagctttacatgaggctggaggcactggaggctgatagggagtcgatgaggcaggcccttgtggcaatgcgcacagagaaggcacaacttgttcttctttgtgagattgcgcagcatcttgccaaggatggagttccagctggggtggggccaggtgtacaccgttcccctagaaaacgagcagttgggattgtagaaaggagattcacggaggacaagagggtggcactcctcaagacatattccgtggttgccttgtttaagtgggtcctcactttatttggcaagaaaaagaagctatctcaaagcaggtggagccaatacaggtacgttgtctttatgctcacgcattgactgaaacctgatattag

SEQ ID NO: 10671 - DNA, 2033 bp, Zea Mays
caacacatcaaacccaactccccgcaccaattccttccaagttccttccaactcgctcccaaatccagacgagaaaaagctccgcgtctgcggtttgattgcgctcgcgccccttccgaatcctctcgccaccccccgccgtcatggacgacgaccacgaccacgacgcgtcgtcgccggccgccggggagcggtgcccgtgctgctcctccccctcctcctcgccggccgtgccgtggcggcggtccgtgaagcggaagctgggcgcggagaagggggaggagggcggggaggcggggcccacggcgcgggtcgaggcggaggacgagtgcgcggcgctgcgggaggcggtggcggcggcccagtccacggcgtcggcgctgcgggccgaggtcgaggaggagcgcctcgccgcggccagcgccgccagcgaggccatggccatgatgctccgcctgcagcgcgacaaggccgaggtccagatggagctccgccagttccgccgcttcgccgacgagaagatggcgctcgacgccgcggacatcgaccagctgcgcgcgctcctcgcccagcgcgcgcgccgcctggtgcgcctccgcgccaggctccgcgagtacaggcgccagttcctccacctcggcatcccgctccccgagggcgaggacctcctgttcgcccagaccgccgccgaggaggaagaggacctactcctcctcgagggcgaggacggctacgccgatggcgatggcgatggtgatggagggtactaccctcagctccgctgcaacgacggggagtactactacgaggacgaggaggaagaagatgcggttgccctcgatctggagcgccggatctgccgcctcgagcacgatcaggaaactcccctgcttgagccaccccttcaggaagacgaagaggaaggcacccacctctacacagaagaggcgttgccggacttgtctgggcatgagcagggtggcctctatgctgatgacatgttatctgtggacggtgtggaagaactgagcgacctccacaatgacgatgaagagctgccagagtctcctactgctggccgtggtgatagggtggaagcaagcgaggctgatggtgttgacagtggcagtgatagggtatacaccattgacaaggtgcatcaaggtgagtctgcgcctattgcaagggtcatggataagtaccagggtgaggcggtggagccagacattaagaagctttacatgaggctggaggcactggaggctgatagggagtcgatgaggcaggcccttgtggcaatgcgcacagagaaggcacaacttgttcttctttgtgagattgcgcagcatcttgccaaggatggagttccagctggggtggggccaggtgtacaccgttcccctagaaaacgagcagttgggattgtagaaaggagattcacggaggacaagagggtggcactcctcaagacatattccgtggttgccttgtttaagtgggtcctcactttatttggcaagaaaaagaagctatctcaaagtatacttttggcttatcaagtaataatgttggtttgctcctactcttggataagtgcccacggatccagaaaaccctcatgagaacaaagtaaaacctgccgaaaagaagcagcagcagcagctgtacaatgtaaataaatagctgtcagttgggaagtttgcatcggattgttttttttgttaatgctgggtggagccagagttcttttgattctttagttgatgattttctgatttcacatctttggtgatgaggatatgcgcgttggtcttgcaatcgttcaagtcacaaaaaagctattgctttgcttctttctcaccagcaagagctacaatgcatgtatagtaatacactggtggttggtttacttgcttgcaggttgatgagtgaatatttatgacttttagcttacatgtccaaactgcaaacttttgtaaaaaaatgttccttgtattcaaattaaatctgtttatgcttgtagcctagcggtt

SEQ ID NO: 10672 - DNA, 2138 bp, Zea Mays
ggacaagttccacagtcgacgacatactgtatctccggaggagcctacttggggcccacctcgcgaaggggaaaagccgaaaagaagaagagaaggcggctcaacacatcaaacccaactccccgcaccaattccttccaagttccttccaactcgctcccaaatccagacgagaaaaagctccgcgtctgcggtttgattgcgctcgcgccccttccgaatcctctcgccaccccccgccgtcatggacgacgaccacgaccacgacgcgtcgtcgccggccgccggggagcggtgcccgtgctgctcctccccctcctcctcgccggccgtgccgtggcggcggtccgtgaagcggaagctgggcgcggagaagggggaggagggcggggaggcggggcccacggcgcgggtcgaggcggaggacgagtgcgcggcgctgcgggaggcggtggcggcggcccagtccacggcgtcggcgctgcgggccgaggtcgaggaggagcgcctcgccgcggccagcgccgccagcgaggccatggccatgatgctccgcctgcagcgcgacaaggccgaggtccagatggagctccgccagttccgccgcttcgccgacgagaagatggcgctcgacgccgcggacatcgaccagctgcgcgcgctcctcgcccagcgcgcgcgccgcctggtgcgcctccgcgccaggctccgcgagtacaggcgccagttcctccacctcggcatcccgctccccgagggcgaggacctcctgttcgcccagaccgccgccgaggaggaagaggacctactcctcctcgagggcgaggacggctacgccgatggcgatggcgatggtgatggagggtactaccctcagctccgctgcaacgacggggagtactactacgaggacgaggaggaagaagatgcggttgccctcgatctggagcgccggatctgccgcctcgagcacgatcaggaaactcccctgcttgagccaccccttcaggaagacgaagaggaaggcacccacctctacacagaagaggcgttgccggacttgtctgggcatgagcagggtggcctctatgctgatgacatgttatctgtggacggtgtggaagaactgagcgacctccacaatgacgatgaagagctgccagagtctcctactgctggccgtggtgatagggtggaagcaagcgaggctgatggtgttgacagtggcagtgatagggtatacaccattgacaaggtgcatcaaggtgagtctgcgcctattgcaagggtcatggataagtaccagggtgaggcggtggagccagacattaagaagctttacatgaggctggaggcactggaggctgatagggagtcgatgaggcaggcccttgtggcaatgcgcacagagaaggcacaacttgttcttctttgtgagattgcgcagcatcttgccaaggatggagttccagctggggtggggccaggtgtacaccgttcccctagaaaacgagcagttgggattgtagaaaggagattcacggaggacaagagggtggcactcctcaagacatattccgtggttgccttgtttaagtgggtcctcactttatttggcaagaaaaagaagctatctcaaagcaggtatacttttggcttatcaagtaataatgttggtttgctcctactcttggataagtgcccacggatccagaaaaccctcatgagaacaaagtaaaacctgccgaaaagaagcagcagcagcagctgtacaatgtaaataaatagctgtcagttgggaagtttgcatcggattgttttttttgttaatgctgggtggagccagagttcttttgattctttagttgatgattttctgatttcacatctttggtgatgaggatatgcgcgttggtcttgcaatcgttcaagtcacaaaaaagctattgctttgcttctttctcaccagcaagagctacaatgcatgtatagtaatacactggtggttggtttacttgcttgcaggttgatgagtgaatatttatgacttttagcttacatgtccaaactgcaaacttttgtaaaaaaatgttccttgtattcaaattaaatctgtttatgcttgtagcctagcggtt

SEQ ID NO: 10673 - DNA, 3349 bp, Zea Mays
aaacaagcctttttctgcctgcttcagaccgctccaaagctccccaagcccaaaccctagccaccacggcaatggcggcggtggagagggccgacgagtcggcggcgaccgcggcgggtgacccgcgccacgtccgcaacacgtgcatcctcgcgcacgtggaccacggcaagaccacgctggccgaccacctggtggcgtcttgcggggacgggctcctccacccgaagctcgccggacggctccgcttcatggactacctcgacgaggagcagcggcgggctatcaccatgaagtccgccgccatcgcgctccgctcccgggccggccaccgcatcagcctcatcgactccccgggccacatcgacttctgttccgaggtctcctccgctgcgcgcctttcggactcggcgctcattctcgtcgacgccgtcgagggggtgcacatccagacgcacgccgcgctgcgccaggccttcatcgagcgcctccggccctgcctcgtgctcaacaaaatcgaccgccttatcaccgagctcagcctcacccccgccgaggcctacgtccgcctccaccgcatcgtctccgacgtcaactctatctattccgcgctccgctcccactcctacttctccctcctctccgcactggaggacaacccctccacaagctcttcgtcctcagctgaggacctaccggaggactttgaagacgacgatgacaacgaggacgccttccagcccctcaagggcaatgtcgtcttcgcctgtgcacttgacggctggggctttcgcccccaacagttcgccaacctctacgccagaaagatcggggtcaacccctctgccttcctgaaaggattgtggggccccagatatctagataagaagacggggaaggttgtagggaagaaagccatcaagagctcagacccacagccaatgttcgtggagtttgtgctaagtgccctgtggaagatgtacgagctggtgctgaaggatggtggtgagagtaagggggtgaagaaattgattgtaaactttgacttgaaaattcccgaacgagagctgaagaacagagatacaaaggctgtgctgcagtccgtcatgagccggtggctgccgctggcagatgctgtgatggatatggtggtggagtgcacgcctgatcctgttgctgctcaaggggtcagggttgcaaggcttatgccaaagagggaggttactccagaagatgctgctggatgccctgaggttgtttcggaggcagagagggtgcggaggtgtgttgaggcctgtgatgtgagtgctgatgcgccagtggtagtttatgtgtcaaagatgtttgctgtgccatctaagatgttgccattgaagggagtgtatggggaactattgaaccaccaaagtaccagtgagtcagaggagtgctttatggcatttgcgagggtcttcagtggcgtccttcatgcagggcagaaggtatttgtgctatcaccattgtatgatccagtaaaaggggatacggttcagaagcatgtgcaggaggtggagctgcaatacttgtatgagatgctaggacaaggcctgaagccagttgccagcgtgggtgcagggaatgtggttgcaatccagggtcttgggcagcatatattgaagagcgccacattgtcgtccaccaagaattgctggcccttctcgagcatgatgttccaggcgtctccgatgcttaaggttgcaattgagccctcaaatccagctgatttaggagctcttgttaaagggcttaggcttcttaaccgggcagacccatttgttgagtatacagtttcgcagaggggcgagcatgtccttgctgctgctggtgagatacatttggagcggtgcataaaggatttggaggagagattttcaaaggtcaaattggtggtctcagaccccctagtttcttttaaggagacaatcgaagggatgggtgtcagtttagtggagagcttgaagaacccacaggagtttgttgagaggactactccaaatggtaggtgtactgtgcgagtccaggtcttgaggcttcccattgccctgactaaggtccttgaggaaagtgaacagttgcttggtcaaataattgatgggaaaacagcaaaaagggatggtgttttggatcctcgcctttctcaggaagatggtgattccgctgcaactctaagacagcggatgatcgatgccatagacagtgaattagaagcaatatctaagcaagttgataaagaaaaactcgacaggtatagaaagacatggcttggacaccttgaaagaatctggtcactaggtccttggcaggttggtccaaatatccttcttttggctgaatcaaaatcaagtggtggtgcagtaactgtccaggatggaaggcaaggtgtacttgtgagtggtccagctcatgtctctgagaaattggggtttgtgagggattgcgataccaaaaataacaacaatcttgacaatggtgaatatgcaacggatgctcctgaatcattgcatatagagtctacaacactaaggaacagcattgtctcaggattccagattgccactaatgctgggcctttatgtgatgaacctatgtggggtcttgcgtttattgttgagccttacatatttgctgatggctctgatgctgccaaccaatctgatcaatacaatgtcttcagcggtcaagtaatcactgcggttaaagaagcatgcagagcagctgttcttcagaacaagccaaggcttgttgaggctatgtatttctgtgagttgaccacgccaaccgagcagttaggtgcaacttatgcagttcttggtaagaggcgggcaaggattctgaaagaagagatgcaagaaggaacctcgttatttacagtgcacgcttacctgccagttgcggagagcgttggattttcgaatcaacttaggagtttaactgcaggtgcagttagtgctctcctcgttcttagccactgggaagctattcctgaggaccccttctttgtcccaaagacgcaggatgagctcgaagaattcggggatggttcaagcattgggccaaacttggctaaaaagcttatgaattctgtcagacgaaggaaaggactgcatgtcgaagagaaagttgtggagcatggcacaaaacagcggactctcgctaaaaaagtgtagttgttggccaatggcctccatacagatgcggagcaggagacgcaggcgtcgataaggacggctggcaatggcatggccagcgcagaaggatctcagttccagcggaaacagagaagcgtacttgcttgcaagttgaaactttg

SEQ ID NO: 10674 - DNA, 3720 bp, Zea Mays
aaacaagcctttttctgcctgcttcagaccgctccaaagctccccaagcccaaaccctagccaccacggcaatggcggcggtggagagggccgacgagtcggcggcgaccgcggcgggtgacccgcgccacgtccgcaacacgtgcatcctcgcgcacgtggaccacggcaagaccacgctggccgaccacctggtggcgtcttgcggggacgggctcctccacccgaagctcgccggacggctccgcttcatggactacctcgacgaggagcagcggcgggctatcaccatgaagtccgccgccatcgcgctccgctcccgggccggccaccgcatcagcctcatcgactccccgggccacatcgacttctgttccgaggtctcctccgctgcgcgcctttcggactcggcgctcattctcgtcgacgccgtcgagggggtgcacatccagacgcacgccgcgctgcgccaggccttcatcgagcgcctccggccctgcctcgtgctcaacaaaatcgaccgccttatcaccgagctcagcctcacccccgccgaggcctacgtccgcctccaccgcatcgtctccgacgtcaactctatctattccgcgctccgctcccactcctacttctccctcctctccgcactggaggacaacccctccacaagctcttcgtcctcagctgaggacctaccggaggactttgaagacgacgatgacaacgaggacgccttccagcccctcaagggcaatgtcgtcttcgcctgtgcacttgacggctggggctttcgcccccaacagttcgccaacctctacgccagaaagatcggggtcaacccctctgccttcctgaaaggattgtggggccccagatatctagataagaagacggggaaggttgtagggaagaaagccatcaagagctcagacccacagccaatgttcgtggagtttgtgctaagtgccctgtggaagatgtacgagctggtgctgaaggatggtggtgagagtaagggggtgaagaaattgattgtaaactttgacttgaaaattcccgaacgagagctgaagaacagagatacaaaggctgtgctgcagtccgtcatgagccggtggctgccgctggcagatgctgtgatggatatggtggtggagtgcacgcctgatcctgttgctgctcaaggggtcagggttgcaaggcttatgccaaagagggaggttactccagaagatgctgctggatgccctgaggttgtttcggaggcagagagggtgcggaggtgtgttgaggcctgtgatgtgagtgctgatgcgccagtggtagtttatgtgtcaaagatgtttgctgtgccatctaagatgttgccattgaagggagtgtatggggaactattgaaccaccaaagtaccagtgagtcagaggagtgctttatggcatttgcgagggtcttcagtggcgtccttcatgcagggcagaaggtatttgtgctatcaccattgtatgatccagtaaaaggggatacggttcagaagcatgtgcaggaggtggagctgcaatacttgtatgagatgctaggacaaggcctgaagccagttgccagcgtgggtgcagggaatgtggttgcaatccagggtcttgggcagcatatattgaagagcgccacattgtcgtccaccaagaattgctggcccttctcgagcatgatgttccaggcgtctccgatgcttaaggttgcaattgagccctcaaatccagctgatttaggagctcttgttaaagggcttaggcttcttaaccgggcagacccatttgttgagtatacagtttcgcagaggggcgagcatgtccttgctgctgctggtgagatacatttggagcggtgcataaaggatttggaggagagattttcaaaggtcaaattggtggtctcagaccccctagtttcttttaaggagacaatcgaagggatgggtgtcagtttagtggagagcttgaagaacccacaggagtttgttgagaggactactccaaatggtaggtgtactgtgcgagtccaggtcttgaggcttcccattgccctgactaaggtccttgaggaaagtgaacagttgcttggtcaaataattgatgggaaaacagcaaaaagggatggtgttttggatcctcgcctttctcaggaagatggtgattccgctgcaactctaagacagcggatgatcgatgccatagacagtgaattagaagcaatatctaagcaagttgataaagaaaaactcgacaggtatagaaagacatggcttggacaccttgaaagaatctggtcactaggtccttggcaggttggtccaaatatccttcttttggctgaatcaaaatcaagtggtggtgcagtaactgtccaggatggaaggcaaggtgtacttgtgagtggtccagctcatgtctctgagaaattggggtttgtgagggattgcgataccaaaaataacaacaatcttgacaatggtgaatatgcaacggatgctcctgaatcattgcatatagagtctacaacactaaggaacagcattgtctcaggattccagattgccactaatgctgggcctttatgtgatgaacctatgtggggtcttgcgtttattgttgagccttacatatttgctgatggctctgatgctgccaaccaatctgatcaatacaatgtcttcagcggtcaagtaatcactgcggttaaagaagcatgcagagcagctgttcttcagaacaagccaaggcttgttgaggctatgtatttctgtgagttgaccacgccaaccgagcagttaggtgcaacttatgcagttcttggtaagaggcgggcaaggattctgaaagaagagatgcaagaaggaacctcgttatttacagtgcacgcttacctgccagttgcggagagcgttggattttcgaatcaacttaggagtttaactgcaggtgcagttagtgctctcctcgttcttagccactgggaagctattcctgaggaccccttctttgtcccaaagacgcaggatgagctcgaagaattcggggatggttcaagcattgggccaaacttggctaaaaagcttatgaattctgtcagacgaaggaaaggactgcatgtcgaagagaaagttgtggagcatggcacaaaacagcggactctcgctaaaaaagtgtagttgttggccaatggcctccatacagatgcgtgaaatagctttcattcagtacgacattgttgtttgagagagttgagatgggatatgtacgggcggcattggtggtgccttggtctacaatattagaaagatcacagtttgttgtgaggaaaacggggacgatttaccaaaaaaaaaaagcccttcatgataggtattttctggaccttcgtatcttgcaataccaatgaaatagcatagagcgcccattttgtcctgggagcaagagcaaacttcgtctattattggtttgcatgtgtactgagtgagtgagaagctatgttctttgtaggaagctatgtgtactgagagtgagaagctatgttctttgtagcaagctgtcttgttgctctaacagggcgacagaacactcggataaacatttttgtaaacctaccctttgtggaagggactgttggagcacaaaaaactaactccctacatggcgtgtatagagtgatactattgaatggca

SEQ ID NO: 10675 - DNA, 3770 bp, Zea Mays
atgtgcactcgataagttttcctggtgtccggtccggctacccctgttccctctcgcagtcgcagacttctcttctcgccaaaccctaatcctgctcctgcctttctcgtctccaaccgttggccgagcagtagcggtggcgatggagggcaaggaagaaggtcggatcttcgtgggcggcctgtcgtggcaaacggacgagcgcaagcttgaggacgcctttggccgcttcggcaaggtcgtcgacgcccaggtacccgtgcccccagtccgtctacgttagtgctcatgcccgccccaggtagttttgctagatccatcgatttcgtgttgtccgcggtgcgatattgttgggtatgatggttggaagatcggtgggtgaggtggaaaggcggatctgtagattgtttttgcgttctgtcgaacagagatgtgtgttttgcgtaggaaggaggattgcgatttctgctcacttttatgtctttcgttgttcagcaagaggcgtaacttggtgagagaaaatatttttcttctctttagtttgcagtagcaaagttgaattctttggcatcactgagagcgaaattaaaatgatgaaacggtacttcttgttgcgatgaaccaagaaattagtatcctgtagacctgtacaaacatgcatccttggattccttgcttcttaaagagagtaaggacctaaatagtctagtgtcatttgtctattatggttcatgtttatttttctatgttgatagcttgctctcagaaattcatgaatactcactgttcttgtttttccatctttctttgcaactgggatctgttctctcggccattctttgtttgctgaggctgaatgagcggcagatttccagagttggaatgcaaagcgaataagcgatgcttgttgctttctagagctgaattgctgatgtggttcattacagttagatgcctgatttgagcactttgtctatgaaattggattgaacaaatggagaacagccattggtcctactgttgctggtgttctgctatttcttagttcagtttcatggtctgatgaaagagagggaatgttactgttgatttttttggctagaattggatgaacaacacctccttagtttctgatctgtgggaattctgctcggccagcacgagttgtgcacacctgcagagaactacaacagggactatgctcatgacactgattgatagatgaagctgtgtgactaattggcagatctgcacacgttactgctccagtgggttgaactgattttattggctgataagatgcaacagtaattatcaatttgttataagtgtttggttgtgttgactgccctgggcatgttttcagttgagttcattggcatccttgctgcagatagaatcatgactgcagttgacttcttttgtttttattgatatgacttgcctacatagctcctcgtcctgctacctttgtcagcatttagtgaactggcagcaattttttttcttttctcgccttttgtgttttgttagaactagatagagcttgcaatgatatatggctgcaactctttacgcaagggcttgtttcttaacagctccagcaaaatttgttttttgcacttttttctgtttaaaactcaagcaacttcttttcttaaggactcccttttgaagttctttcttgtgtaatgcatttttagtaccattgctgcttgagccttgaggacagtaaatgattctgccatccggaccaatgctgggtgctggagcagaaaattgatgctagcctcaccagtgtggaccctttcagccagctccatgcgatgcattgcagttttgggaagacaaactgggtaactaggagcccagcttaccagcagctcagacttccactgttgttaccatggaaatgcaagtcgtttggctttaggtttgtgcattggtttaaatgatctggtatgcaaactagagaatatggcagtggacatacctgctacattgtcctgtcaccagaatatgctgacatttttgagaagttagttcatgtcggtaacggtaaaattggttccttgttggaaatagcccagttctccaaaacatggttcccagaggctctatagctttgctccttgtccgtgttaacgagctttgctgtcttgggactagactttttcatgaaggtagttacagctagatgcatctgtgtcaggattatgatttgttcttgaattaccgagatccaggaataacctaatctcagtgcttctcttctgagatcatggtggagagacacactaaccgccacaggggctttggcttcgtgacatttgaagatcggagggcagttgacagcgctattaaagagatgcatggccaagaaatagatggccgtaccatctcagtgaacaaggctgagcctaagatgaatacagatgacacaaggtatgccggtggtggtggacgaggagagtatcgtggtggtagaggtgatggtccaccccctggcaattgctttgagtgtggtcgtcctggtcattgggtccgtgactgccctagtgctgctggcggtcgttctggcaggttcccatccaagttcagtggtggcagtggcgttggcaggggagaccgcttttctggttcagataggtttggtgatcgttacatggatgatcgttatgatggtggtcgctatgggtaccgtgatcaagctgatgcaagggacaggtatgctggtggccgagatcgctatgccaatgaccgttacccatctggtggcgatcactttggtggagacaggtatggaggtggtccggattgttatgtgccaagtggttatggtagggagcgagaaagaagctacgagagagatggagttcgtggtggtggtggcggcggcggcggctatgataggagtggcccaaggggtggtggtgggtatgacagggatggtccacgcggcggtggaggaagtgcacgctatgatggaggaaattacagggagaggcctgggccatatgatcgccctagcaggggaggacgttttgatgatcgctactgatgaactgcctgtagactcaagctccttgtcttggtagtttaatgtttgcagttttgcatggccgaatgcttaatgggctatggaagatgcttaatttatccctcttcggcactttaatgtctgctctttatttcaaccagtactggggcactggtttgccttgataagtttatccagctgacagtttttgcatgagatgagtcatgctctgggctattaccctgcctgttggatatttcagtagctgaggtttgcagtgatcgattgtcattgttgatctgaatatctggtatgcgtggactatgtttaaagtgattgcctgtcatcattggtctatatagttggtgagcatatatatgttcagtgtcggtgcttgtcattgttgttggtctggatatctaggcttgcaaggatatatttgcagggctgagttgcaagggcttaacagaacaatagccaaagtaccttatattttagtagctggagaccatgttaattatgctataattagctggagaccatgtaaatttagcttagtttttgtcggcggtctgacttttggtgggattttatcttgaacaaacaccgtccctgacatttaagagtgtagagccgactaacagtagtcaatctctatttcacatttgtctaggatcgacttcgcacttgagaaaaacgattatattgataagaaaggaaaaagataaat

SEQ ID NO: 10676 - DNA, 2336 bp, Zea Mays
atgtgcactcgataagttttcctggtgtccggtccggctacccctgttccctctcgcagtcgcagacttctcttctcgccaaaccctaatcctgctcctgcctttctcgtctccaaccgttggccgagcagtagcggtggcgatggagggcaaggaagaaggtcggatcttcgtgggcggcctgtcgtggcaaacggacgagcgcaagcttgaggacgcctttggccgcttcggcaaggtcgtcgacgcccagggttaagatttgcatattggtatgttatacaatatattcagtgatcatttatggacacttgaaggaccaatgctgggtgctggagcagaaaattgatgctagcctcaccagtgtggaccctttcagccagctccatgcgatgcattgcagttttgggaagacaaactgggtaactaggagcccagcttaccagcagctcagacttccactgttgttaccatggaaatgcaagtcgtttggctttaggtttgtgcattggtttaaatgatctggtatgcaaactagagaatatggcagtggacatacctgctacattgtcctgtcaccagaatatgctgacatttttgagaagttagttcatgtcggtaacggtaaaattggttccttgttggaaatagcccagttctccaaaacatggttcccagaggctctatagctttgctccttgtccgtgttaacgagctttgctgtcttgggactagactttttcatgaaggtagttacagctagatgcatctgtgtcaggattatgatttgttcttgaattaccgagatccaggaataacctaatctcagtgcttctcttctgagatcatggtggagagacacactaaccgccacaggggctttggcttcgtgacatttgaagatcggagggcagttgacagcgctattaaagagatgcatggccaagaaatagatggccgtaccatctcagtgaacaaggctgagcctaagatgaatacagatgacacaaggtatgccggtggtggtggacgaggagagtatcgtggtggtagaggtgatggtccaccccctggcaattgctttgagtgtggtcgtcctggtcattgggtccgtgactgccctagtgctgctggcggtcgttctggcaggttcccatccaagttcagtggtggcagtggcgttggcaggggagaccgcttttctggttcagataggtttggtgatcgttacatggatgatcgttatgatggtggtcgctatgggtaccgtgatcaagctgatgcaagggacaggtatgctggtggccgagatcgctatgccaatgaccgttacccatctggtggcgatcactttggtggagacaggtatggaggtggtccggattgttatgtgccaagtggttatggtagggagcgagaaagaagctacgagagagatggagttcgtggtggtggtggcggcggcggcggctatgataggagtggcccaaggggtggtggtgggtatgacagggatggtccacgcggcggtggaggaagtgcacgctatgatggaggaaattacagggagaggcctgggccatatgatcgccctagcaggggaggacgttttgatgatcgctactgatgaactgcctgtagactcaagctccttgtcttggtagtttaatgtttgcagttttgcatggccgaatgcttaatgggctatggaagatgcttaatttatccctcttcggcactttaatgtctgctctttatttcaaccagtactggggcactggtttgccttgataagtttatccagctgacagtttttgcatgagatgagtcatgctctgggctattaccctgcctgttggatatttcagtagctgaggtttgcagtgatcgattgtcattgttgatctgaatatctggtatgcgtggactatgtttaaagtgattgcctgtcatcattggtctatatagttggtgagcatatatatgttcagtgtcggtgcttgtcattgttgttggtctggatatctaggcttgcaaggatatatttgcagggctgagttgcaagggcttaacagaacaatagccaaagtaccttatattttagtagctggagaccatgttaattatgctataattagctggagaccatgtaaatttagcttagtttttgtcggcggtctgacttttggtgggattttatcttgaacaaacaccgtccctgacatttaagagtgtagagccgactaacagtagtcaatctctatttcacatttgtctaggatcgacttcgcacttgagaaaaacgattatattgataagaaaggaaaaagataaat

SEQ ID NO: 10677 - DNA, 2248 bp, Zea Mays
atgtgcactcgataagttttcctggtgtccggtccggctacccctgttccctctcgcagtcgcagacttctcttctcgccaaaccctaatcctgctcctgcctttctcgtctccaaccgttggccgagcagtagcggtggcgatggagggcaaggaagaaggtcggatcttcgtgggcggcctgtcgtggcaaacggacgagcgcaagcttgaggacgcctttggccgcttcggcaaggtcgtcgacgcccagaaaattgatgctagcctcaccagtgtggaccctttcagccagctccatgcgatgcattgcagttttgggaagacaaactgggtaactaggagcccagcttaccagcagctcagacttccactgttgttaccatggaaatgcaagtcgtttggctttaggtttgtgcattggtttaaatgatctggtatgcaaactagagaatatggcagtggacatacctgctacattgtcctgtcaccagaatatgctgacatttttgagaagttagttcatgtcggtaacggtaaaattggttccttgttggaaatagcccagttctccaaaacatggttcccagaggctctatagctttgctccttgtccgtgttaacgagctttgctgtcttgggactagactttttcatgaaggtagttacagctagatgcatctgtgtcaggattatgatttgttcttgaattaccgagatccaggaataacctaatctcagtgcttctcttctgagatcatggtggagagacacactaaccgccacaggggctttggcttcgtgacatttgaagatcggagggcagttgacagcgctattaaagagatgcatggccaagaaatagatggccgtaccatctcagtgaacaaggctgagcctaagatgaatacagatgacacaaggtatgccggtggtggtggacgaggagagtatcgtggtggtagaggtgatggtccaccccctggcaattgctttgagtgtggtcgtcctggtcattgggtccgtgactgccctagtgctgctggcggtcgttctggcaggttcccatccaagttcagtggtggcagtggcgttggcaggggagaccgcttttctggttcagataggtttggtgatcgttacatggatgatcgttatgatggtggtcgctatgggtaccgtgatcaagctgatgcaagggacaggtatgctggtggccgagatcgctatgccaatgaccgttacccatctggtggcgatcactttggtggagacaggtatggaggtggtccggattgttatgtgccaagtggttatggtagggagcgagaaagaagctacgagagagatggagttcgtggtggtggtggcggcggcggcggctatgataggagtggcccaaggggtggtggtgggtatgacagggatggtccacgcggcggtggaggaagtgcacgctatgatggaggaaattacagggagaggcctgggccatatgatcgccctagcaggggaggacgttttgatgatcgctactgatgaactgcctgtagactcaagctccttgtcttggtagtttaatgtttgcagttttgcatggccgaatgcttaatgggctatggaagatgcttaatttatccctcttcggcactttaatgtctgctctttatttcaaccagtactggggcactggtttgccttgataagtttatccagctgacagtttttgcatgagatgagtcatgctctgggctattaccctgcctgttggatatttcagtagctgaggtttgcagtgatcgattgtcattgttgatctgaatatctggtatgcgtggactatgtttaaagtgattgcctgtcatcattggtctatatagttggtgagcatatatatgttcagtgtcggtgcttgtcattgttgttggtctggatatctaggcttgcaaggatatatttgcagggctgagttgcaagggcttaacagaacaatagccaaagtaccttatattttagtagctggagaccatgttaattatgctataattagctggagaccatgtaaatttagcttagtttttgtcggcggtctgacttttggtgggattttatcttgaacaaacaccgtccctgacatttaagagtgtagagccgactaacagtagtcaatctctatttcacatttgtctaggatcgacttcgcacttgagaaaaacgattatattgataagaaaggaaaaagataaat

SEQ ID NO: 10678 - DNA, 3084 bp, Zea Mays
aaaattctatgtgcactcgataagttttcctggtgtccggtccggctacccctgttccctctcgcagtcgcagacttctcttctcgccaaaccctaatcctgctcctgcctttctcgtctccaaccgttggccgagcagtagcggtggcgatggagggcaaggaagaaggtcggatcttcgtgggcggcctgtcgtggcaaacggacgagcgcaagcttgaggacgcctttggccgcttcggcaaggtcgtcgacgcccagttagatgcctgatttgagcactttgtctatgaaattggattgaacaaatggagaacagccattggtcctactgttgctggtgttctgctatttcttagttcagtttcatggtctgatgaaagagagggaatgttactgttgatttttttggctagaattggatgaacaacacctccttagtttctgatctgtgggaattctgctcggccagcacgagttgtgcacacctgcagagaactacaacagggactatgctcatgacactgattgatagatgaagctgtgtgactaattggcagatctgcacacgttactgctccagtgggttgaactgattttattggctgataagatgcaacagtaattatcaatttgttataagtgtttggttgtgttgactgccctgggcatgttttcagttgagttcattggcatccttgctgcagatagaatcatgactgcagttgacttcttttgtttttattgatatgacttgcctacatagctcctcgtcctgctacctttgtcagcatttagtgaactggcagcaattttttttcttttctcgccttttgtgttttgttagaactagatagagcttgcaatgatatatggctgcaactctttacgcaagggcttgtttcttaacagctccagcaaaatttgttttttgcacttttttctgtttaaaactcaagcaacttcttttcttaaggactcccttttgaagttctttcttgtgtaatgcatttttagtaccattgctgcttgagccttgaggacagtaaatgattctgccatccggaccaatgctgggtgctggagcagaaaattgatgctagcctcaccagtgtggaccctttcagccagctccatgcgatgcattgcagttttgggaagacaaactgggtaactaggagcccagcttaccagcagctcagacttccactgttgttaccatggaaatgcaagtcgtttggctttaggtttgtgcattggtttaaatgatctggtatgcaaactagagaatatggcagtggacatacctgctacattgtcctgtcaccagaatatgctgacatttttgagaagttagttcatgtcggtaacggtaaaattggttccttgttggaaatagcccagttctccaaaacatggttcccagaggctctatagctttgctccttgtccgtgttaacgagctttgctgtcttgggactagactttttcatgaaggtagttacagctagatgcatctgtgtcaggattatgatttgttcttgaattaccgagatccaggaataacctaatctcagtgcttctcttctgagatcatggtggagagacacactaaccgccacaggggctttggcttcgtgacatttgaagatcggagggcagttgacagcgctattaaagagatgcatggccaagaaatagatggccgtaccatctcagtgaacaaggctgagcctaagatgaatacagatgacacaaggtatgccggtggtggtggacgaggagagtatcgtggtggtagaggtgatggtccaccccctggcaattgctttgagtgtggtcgtcctggtcattgggtccgtgactgccctagtgctgctggcggtcgttctggcaggttcccatccaagttcagtggtggcagtggcgttggcaggggagaccgcttttctggttcagataggtttggtgatcgttacatggatgatcgttatgatggtggtcgctatgggtaccgtgatcaagctgatgcaagggacaggtatgctggtggccgagatcgctatgccaatgaccgttacccatctggtggcgatcactttggtggagacaggtatggaggtggtccggattgttatgtgccaagtggttatggtagggagcgagaaagaagctacgagagagatggagttcgtggtggtggtggcggcggcggcggctatgataggagtggcccaaggggtggtggtgggtatgacagggatggtccacgcggcggtggaggaagtgcacgctatgatggaggaaattacagggagaggcctgggccatatgatcgccctagcaggggaggacgttttgatgatcgctactgatgaactgcctgtagactcaagctccttgtcttggtagtttaatgtttgcagttttgcatggccgaatgcttaatgggctatggaagatgcttaatttatccctcttcggcactttaatgtctgctctttatttcaaccagtactggggcactggtttgccttgataagtttatccagctgacagtttttgcatgagatgagtcatgctctgggctattaccctgcctgttggatatttcagtagctgaggtttgcagtgatcgattgtcattgttgatctgaatatctggtatgcgtggactatgtttaaagtgattgcctgtcatcattggtctatatagttggtgagcatatatatgttcagtgtcggtgcttgtcattgttgttggtctggatatctaggcttgcaaggatatatttgcagggctgagttgcaagggcttaacagaacaatagccaaagtaccttatattttagtagctggagaccatgttaattatgctataattagctggagaccatgtaaatttagcttagtttttgtcggcggtctgacttttggtgggattttatcttgaacaaacaccgtccctgacatttaagagtgtagagccgactaacagtagtcaatctctatttcacatttgtctaggatcgacttcgcacttgagaaaaacgattatattgataagaaaggaaaaagataaat

SEQ ID NO: 10679 - DNA, 3580 bp, Zea Mays
aaaattctatgtgcactcgataagttttcctggtgtccggtccggctacccctgttccctctcgcagtcgcagacttctcttctcgccaaaccctaatcctgctcctgcctttctcgtctccaaccgttggccgagcagtagcggtggcgatggagggcaaggaagaaggtcggatcttcgtgggcggcctgtcgtggcaaacggacgagcgcaagcttgaggacgcctttggccgcttcggcaaggtcgtcgacgcccagtttgcagtagcaaagttgaattctttggcatcactgagagcgaaattaaaatgatgaaacggtacttcttgttgcgatgaaccaagaaattagtatcctgtagacctgtacaaacatgcatccttggattccttgcttcttaaagagagtaaggacctaaatagtctagtgtcatttgtctattatggttcatgtttatttttctatgttgatagcttgctctcagaaattcatgaatactcactgttcttgtttttccatctttctttgcaactgggatctgttctctcggccattctttgtttgctgaggctgaatgagcggcagatttccagagttggaatgcaaagcgaataagcgatgcttgttgctttctagagctgaattgctgatgtggttcattacagttagatgcctgatttgagcactttgtctatgaaattggattgaacaaatggagaacagccattggtcctactgttgctggtgttctgctatttcttagttcagtttcatggtctgatgaaagagagggaatgttactgttgatttttttggctagaattggatgaacaacacctccttagtttctgatctgtgggaattctgctcggccagcacgagttgtgcacacctgcagagaactacaacagggactatgctcatgacactgattgatagatgaagctgtgtgactaattggcagatctgcacacgttactgctccagtgggttgaactgattttattggctgataagatgcaacagtaattatcaatttgttataagtgtttggttgtgttgactgccctgggcatgttttcagttgagttcattggcatccttgctgcagatagaatcatgactgcagttgacttcttttgtttttattgatatgacttgcctacatagctcctcgtcctgctacctttgtcagcatttagtgaactggcagcaattttttttcttttctcgccttttgtgttttgttagaactagatagagcttgcaatgatatatggctgcaactctttacgcaagggcttgtttcttaacagctccagcaaaatttgttttttgcacttttttctgtttaaaactcaagcaacttcttttcttaaggactcccttttgaagttctttcttgtgtaatgcatttttagtaccattgctgcttgagccttgaggacagtaaatgattctgccatccggtaatggaagctgaattttgtttagggttaagatttgcatattggtatgttatacaatatattcagtgatcatttatggacacttgaaggaccaatgctgggtgctggagcagaaaattgatgctagcctcaccagtgtggaccctttcagccagctccatgcgatgcattgcagttttgggaagacaaactgggtaactaggagcccagcttaccagcagctcagacttccactgttgttaccatggaaatgcaagtcgtttggctttaggtttgtgcattggtttaaatgatctggtatgcaaactagagaatatggcagtggacatacctgctacattgtcctgtcaccagaatatgctgacatttttgagaagttagttcatgtcggtaacggtaaaattggttccttgttggaaatagcccagttctccaaaacatggttcccagaggctctatagctttgctccttgtccgtgttaacgagctttgctgtcttgggactagactttttcatgaaggtagttacagctagatgcatctgtgtcaggattatgatttgttcttgaattaccgagatccaggaataacctaatctcagtgcttctcttctgagatcatggtggagagacacactaaccgccacaggggctttggcttcgtgacatttgaagatcggagggcagttgacagcgctattaaagagatgcatggccaagaaatagatggccgtaccatctcagtgaacaaggctgagcctaagatgaatacagatgacacaaggtatgccggtggtggtggacgaggagagtatcgtggtggtagaggtgatggtccaccccctggcaattgctttgagtgtggtcgtcctggtcattgggtccgtgactgccctagtgctgctggcggtcgttctggcaggttcccatccaagttcagtggtggcagtggcgttggcaggggagaccgcttttctggttcagataggtttggtgatcgttacatggatgatcgttatgatggtggtcgctatgggtaccgtgatcaagctgatgcaagggacaggtatgctggtggccgagatcgctatgccaatgaccgttacccatctggtggcgatcactttggtggagacaggtatggaggtggtccggattgttatgtgccaagtggttatggtagggagcgagaaagaagctacgagagagatggagttcgtggtggtggtggcggcggcggcggctatgataggagtggcccaaggggtggtggtgggtatgacagggatggtccacgcggcggtggaggaagtgcacgctatgatggaggaaattacagggagaggcctgggccatatgatcgccctagcaggggaggacgttttgatgatcgctactgatgaactgcctgtagactcaagctccttgtcttggtagtttaatgtttgcagttttgcatggccgaatgcttaatgggctatggaagatgcttaatttatccctcttcggcactttaatgtctgctctttatttcaaccagtactggggcactggtttgccttgataagtttatccagctgacagtttttgcatgagatgagtcatgctctgggctattaccctgcctgttggatatttcagtagctgaggtttgcagtgatcgattgtcattgttgatctgaatatctggtatgcgtggactatgtttaaagtgattgcctgtcatcattggtctatatagttggtgagcatatatatgttcagtgtcggtgcttgtcattgttgttggtctggatatctaggcttgcaaggatatatttgcagggctgagttgcaagggcttaacagaacaatagccaaagtaccttatattttagtagctggagaccatgttaattatgctataattagctggagaccatgtaaatttagcttagtttttgtcggcggtctgacttttggtgggattttatcttgaacaaacaccgtccctgacatttaagagtgtagagccgactaacagtagtcaatctctatttcacatttgtctaggatcgacttcgcacttgagaaaaacgattatattgataagaaaggaaaaagataaat

SEQ ID NO: 10680 - DNA, 2344 bp, Zea Mays
cagaggatgtccttagcaaatatataaaacaactacagacgataatacgtgcatcatgtgcactaaaattctatgtgcactcgataagttttcctggtgtccggtccggctacccctgttccctctcgcagtcgcagacttctcttctcgccaaaccctaatcctgctcctgcctttctcgtctccaaccgttggccgagcagtagcggtggcgatggagggcaaggaagaaggtcggatcttcgtgggcggcctgtcgtggcaaacggacgagcgcaagcttgaggacgcctttggccgcttcggcaaggtcgtcgacgcccaggaccaatgctgggtgctggagcagaaaattgatgctagcctcaccagtgtggaccctttcagccagctccatgcgatgcattgcagttttgggaagacaaactgggtaactaggagcccagcttaccagcagctcagacttccactgttgttaccatggaaatgcaagtcgtttggctttaggtttgtgcattggtttaaatgatctggtatgcaaactagagaatatggcagtggacatacctgctacattgtcctgtcaccagaatatgctgacatttttgagaagttagttcatgtcggtaacggtaaaattggttccttgttggaaatagcccagttctccaaaacatggttcccagaggctctatagctttgctccttgtccgtgttaacgagctttgctgtcttgggactagactttttcatgaaggtagttacagctagatgcatctgtgtcaggattatgatttgttcttgaattaccgagatccaggaataacctaatctcagtgcttctcttctgagatcatggtggagagacacactaaccgccacaggggctttggcttcgtgacatttgaagatcggagggcagttgacagcgctattaaagagatgcatggccaagaaatagatggccgtaccatctcagtgaacaaggctgagcctaagatgaatacagatgacacaaggtatgccggtggtggtggacgaggagagtatcgtggtggtagaggtgatggtccaccccctggcaattgctttgagtgtggtcgtcctggtcattgggtccgtgactgccctagtgctgctggcggtcgttctggcaggttcccatccaagttcagtggtggcagtggcgttggcaggggagaccgcttttctggttcagataggtttggtgatcgttacatggatgatcgttatgatggtggtcgctatgggtaccgtgatcaagctgatgcaagggacaggtatgctggtggccgagatcgctatgccaatgaccgttacccatctggtggcgatcactttggtggagacaggtatggaggtggtccggattgttatgtgccaagtggttatggtagggagcgagaaagaagctacgagagagatggagttcgtggtggtggtggcggcggcggcggctatgataggagtggcccaaggggtggtggtgggtatgacagggatggtccacgcggcggtggaggaagtgcacgctatgatggaggaaattacagggagaggcctgggccatatgatcgccctagcaggggaggacgttttgatgatcgctactgatgaactgcctgtagactcaagctccttgtcttggtagtttaatgtttgcagttttgcatggccgaatgcttaatgggctatggaagatgcttaatttatccctcttcggcactttaatgtctgctctttatttcaaccagtactggggcactggtttgccttgataagtttatccagctgacagtttttgcatgagatgagtcatgctctgggctattaccctgcctgttggatatttcagtagctgaggtttgcagtgatcgattgtcattgttgatctgaatatctggtatgcgtggactatgtttaaagtgattgcctgtcatcattggtctatatagttggtgagcatatatatgttcagtgtcggtgcttgtcattgttgttggtctggatatctaggcttgcaaggatatatttgcagggctgagttgcaagggcttaacagaacaatagccaaagtaccttatattttagtagctggagaccatgttaattatgctataattagctggagaccatgtaaatttagcttagtttttgtcggcggtctgacttttggtgggattttatcttgaacaaacaccgtccctgacatttaagagtgtagagccgactaacagtagtcaatctctatttcacatttgtctaggatcgacttcgcacttgagaaaaacgattatattgataagaaaggaaaaagataaat

SEQ ID NO: 10681 - DNA, 1765 bp, Zea Mays
aattatcttgtgttggccaaacgagccacccttgttctgctaagaactgaaagaacgtttcagtgattcactcgcatagttaaaaaatattattttatattatagattatattatttatagaatggagtttaagtaatgagaggatgatgcgtaagctgctggatggaggtagtataaaggtaagaggtaatataaagcgctaaaaaggttcccacctccaacgcccgccttcgtgaacccagctgcgggatggaggatcggacggccagggtctctccggggaggagaactcacagccaccatctcagccaacaggtccggatagcgtctcgtcgtcctcccgcctcgctccctccgtcgccttctccaacgggaaatagccattaccgaaggaggcccgtcagcagcgtcggggcaaaaatttcaccgcgcgcgatcaagcgattgatgcccccgtcatggcgtccgtgccgctgtcctcgccgtcgcaggccggcctccttggccccccgttcccgctcctgccaccgcccttcggtgcatgcctccgctaccgcttgccgaggctgcctacaggcctctcgtcgagcgtgaggaagggagggctcctgccgctgccgctcctggtgcctccccgggccgcggggggcaaggacgggcgggccgtgaccaaggaggagttggaagaggaggaagaggagttcgaggtgaccaaggagggcgaggaggttaatcaggagacaggaggaggcagtggagccaccaaggaggcggcggcaaggggttcgggtcgattcgcggcggactacgtctcgctcggcgtcagggagcccgtctacgaggtgatagaagtgagatcaaatgggaggatgtccaccaagaaaataagcaggcggcagctactgaaatctagtggtctccgcctacgagatactagaagtgttgacccatcactatggttaatgaattcaatgccttccctgctggtacgtgagcaagctattttactcaatcttggttcgttgcgagcaattgctatgtatgcgcgtgttcttatattcaactataacagcccaggagggaaggcctttctagggttattactgtctaggttaaatccaagaaacatcaatggtgggcctgcaatgccttttcagcttgaggttgttgaagctgcacttctttctagaatacaaagattggagcagagactaatgaaaattgagcctcatgtggctacattgctagaagttctgccaaatcgcttgacagctgatgtgttggagcagcttcgtctaagtaaacaagcattggttgagctgggatcacgagcaggtgacctcaagcagatgcttatcgatctcctagatgatcctcatgaaatcagacgaatatgcataatggggagaaattgcacacttgatagattgagtgatattgtggagtgcactgttcctttagagaagcagattgctgaagaggaagaggaagaaattgaaatgttattggaaaattatcttcaacgatgtgaatcatgccatggtcaagcagagagacttctgaattctgcaagagagatggaagactcgatttctgtgaacttaagttctcgacgacttgaagtaagtagagtggagctgctgcttcaagtgggaacattttgcgttgcaataggagcattaattgcaggaatatttggcatgaatcttaaatcatatctggaaacaaatgcggtacattttactcaaactccaatgaagccag

SEQ ID NO: 10682 - DNA, 2219 bp, Zea Mays
aattatcttgtgttggccaaacgagccacccttgttctgctaagaactgaaagaacgtttcagtgattcactcgcatagttaaaaaatattattttatattatagattatattatttatagaatggagtttaagtaatgagaggatgatgcgtaagctgctggatggaggtagtataaaggtaagaggtaatataaagcgctaaaaaggttcccacctccaacgcccgccttcgtgaacccagctgcgggatggaggatcggacggccagggtctctccggggaggagaactcacagccaccatctcagccaacaggtccggatagcgtctcgtcgtcctcccgcctcgctccctccgtcgccttctccaacgggaaatagccattaccgaaggaggcccgtcagcagcgtcggggcaaaaatttcaccgcgcgcgatcaagcgattgatgcccccgtcatggcgtccgtgccgctgtcctcgccgtcgcaggccggcctccttggccccccgttcccgctcctgccaccgcccttcggtgcatgcctccgctaccgcttgccgaggctgcctacaggcctctcgtcgagcgtgaggaagggagggctcctgccgctgccgctcctggtgcctccccgggccgcggggggcaaggacgggcgggccgtgaccaaggaggagttggaagaggaggaagaggagttcgaggtgaccaaggagggcgaggaggttaatcaggagacaggaggaggcagtggagccaccaaggaggcggcggcaaggggttcgggtcgattcgcggcggactacgtctcgctcggcgtcagggagcccgtctacgaggtgatagaagtgagatcaaatgggaggatgtccaccaagaaaataagcaggcggcagctactgaaatctagtggtctccgcctacgagatactagaagtgttgacccatcactatggttaatgaattcaatgccttccctgctggtacgtgagcaagctattttactcaatcttggttcgttgcgagcaattgctatgtatgcgcgtgttcttatattcaactataacagcccaggagggaaggcctttctagggttattactgtctaggttaaatccaagaaacatcaatggtgggcctgcaatgccttttcagcttgaggttgttgaagctgcacttctttctagaatacaaagattggagcagagactaatgaaaattgagcctcatcttttgactctactcctttgagatacagtagggaagtgccctaccaagttgatactgcattttcaatgtgctgatctaggtggctacattgctagaagttctgccaaatcgcttgacagctgatgtgttggagcagcttcgtctaagtaaacaagcattggttgagctgggatcacgagcaggtgacctcaagcagatgcttatcgatctcctagatgatcctcatgaaatcagacgaatatgcataatggggagaaattgcacacttgatagattgagtgatattgtggagtgcactgttcctttagagaagcagattgctgaagaggaagaggaagaaattgaaatgttattggaaaattatcttcaacgatgtgaatcatgccatggtcaagcagagagacttctgaattctgcaagagagatggaagactcgatttctgtgaacttaagttctcgacgacttgaagtaagtagagtggagctgctgcttcaagtgggaacattttgcgttgcaataggagcattaattgcaggaatatttggcatgaatcttaaatcatatctggaaacaaatgcgtgggcattttgggtgacgactggtggaatagtagttggagcagtagctggatttttcgtcgtatactcgtatctaagggctaggaagatattgtgaaccctgtaacatctgtatgttaggatattttttggagctgtaaataatgtcattagcacatccagtgagggatatgcgtgttccaaactctgcatggtttgtgtactctgtactcttgcgagaatgttgccaccctatgtatttgtagttgcccgttgagacggaaataggttagaactcagaaacaaatatttggtttccaccctagacgatttctcgtagctgcattttactatcctgtattgaaaattcgtgtcaacatctgtcttaatcttctaaattttggtaatgcactaaatgcttggggacc

SEQ ID NO: 10683 - DNA, 1349 bp, Zea Mays
aattatcttgtgttggccaaacgagccacccttgttctgctaagaactgaaagaacgtttcagtgattcactcgcatagttaaaaaatattattttatattatagattatattatttatagaatggagtttaagtaatgagaggatgatgcgtaagctgctggatggaggtagtataaaggtaagaggtaatataaagcgctaaaaaggttcccacctccaacgcccgccttcgtgaacccagctgcgggatggaggatcggacggccagggtctctccggggaggagaactcacagccaccatctcagccaacaggtccggatagcgtctcgtcgtcctcccgcctcgctccctccgtcgccttctccaacgggaaatagccattaccgaaggaggcccgtcagcagcgtcggggcaaaaatttcaccgcgcgcgatcaagcgattgatgcccccgtcatggcgtccgtgccgctgtcctcgccgtcgcaggccggcctccttggccccccgttcccgctcctgccaccgcccttcggtgcatgcctccgctaccgcttgccgaggctgcctacaggcctctcgtcgagcgtgaggaagggagggctcctgccgctgccgctcctggtgcctccccgggccgcggggggcaaggacgggcgggccgtgaccaaggaggagttggaagaggaggaagaggagttcgaggtgaccaaggagggcgaggaggttaatcaggagacaggaggaggcagtggagccaccaaggaggcggcggcaaggggttcgggtcgattcgcggcggactacgtctcgctcggcgtcagggagcccgtctacgaggtgatagaagtgagatcaaatgggaggatgtccaccaagaaaataagcaggcggcagctactgaaatctagtggtctccgcctacgagatactagaagtgttgacccatcactatggttaatgaattcaatgccttccctgctggtacgtgagcaagctattttactcaatcttggttcgttgcgagcaattgctatgtatgcgcgtgttcttatattcaactataacagcccaggagggaaggcctttctagggttattactgtctaggttaaatccaagaaacatcaatggtgggcctgcaatgccttttcagcttgaggttgttgaagctgcacttctttctagaatacaaagattggagcagagactaatgaaaattgagcctcattgtacacagtggaatccgaacagcaatgtttctggttatttccatctctttcagatacatcaaccagtacaaatccgagctgcaaattcacgatctattcctttcctatgacacat

SEQ ID NO: 10684 - DNA, 6355 bp, Zea Mays
ccaggatccatcttcaacaacagatattactgctctcatacgaagaaatcatcagaagtagagaggatacaacatatctctacaagatcttcatatttctatcacaaattatcatcactagtagtctagtggtcaagacacatgtctcttctggctccgaggaccaaggacatattaacgtctaatttagcttcaagctctgtggtgagtgggatttcataattatttgtctactcttctcacttctggtagatcggaggtagataatggtaagcatgccaaagggtggaattcagtgtagttcggctacctaaaccccaggtatatgtccattcaagaccgacctttaccatttagcttacagtgtataccaaacttgtcaaaggactatcccgagtcaattcagtgactataagtatttacaatttcgagagatgtatgcgacacaagcatagaggtcctagatagaacgagtaaagtggttcgacgggaacacactatggttttcacaccaacagagtcaaaattttctcaaaataacctctcggtatactcgcagcttcatgttgctagcggttacatgtccttttatctcatagtttgcttcatgtcatccagcgacaaagagagcaatgtgctaacatctgattgagcaatgtatgactgagatttctgatcttaaatcatttggtaaggtctttttgcttactaatataatcccaatttgtgatatcttttatgccaaaaaggctttcatgcattaatattgaatttcttcaggttacttcgggtaaaattttatgcacgaggagagagagcagagatttaacttatctgtgtttcattgtatttcgatttaatttcccagatttaatataggtgttatggccacgtggcgatatataaaaatatatgataccacaaaacacaatcaaacaaaatataaagtgaaaacaaaattatttacgaaggttgcgtataatgtgacttcaggggcttgaacaacccaccacaatccacacaagtacaagctctagtgtctggtgtcaacgcgtgtgtggccatcagggctacgacaacacagccaaccttcgtaattaatgcaacaagcacaattatggctcggtaatcggggtacacgataagtccatgtaatgtgcgcaacaggcgcaattgtgactcgatgatcacgggagacagacagcgcctgcagggcatgcgaaaaatacgcgactcggcaatggcggtatgactcaaccggagcgatccgactaaacaagagtgtcacatagcaatcacatgacgcaaccaagttcgaacgacacaaatattgcgtgtattgccagggcacagccaatgctatagctcagctgattaataatgtagtctgatcgacgtgtccgagtacccactatatcattaaatcactcgaggtgagtccaaaaactcaacataatataaatatttagagcgatttaagtatgcacaatatagacttttctgctagatatcttctagaaacattttctgctaaatatcttatacgagaaataaaagcagaaaaaacaccaaaattattatatgatcataacacatcaggtgtaaaaaacattttccatattcaaacatgtactaattatttactgcgggaaataattaattaaagtagaaattgtaacataaaacatgctttattctacttgttatttacaacaggaaataaatagaataaataacatggagcatgctgtaaattaaaattataccaaattttcttaacccaataaaaatttaaatgaaaaaattatgtgctcctacgcgattttcatgttctaagccactttgttaggatctttaactaacacatgcaaatttcacacaatattctaatcgttgcccccaactagttgggacggctgcatgggaactgagtgcatgcacgcatgcaacatgtgcttgtcatcgcctcatcctcatgcagatcgggtttcttttatcacggctccgtggataaccaaccactccggtaaaatggatcttgcaaaggtcagcagagtggactcagttgtacgccatcctataatttcggatcacccaacagcctcggctactattgggtctttgagggctaccacaccaagtctgatcaacggactgggctcgtggcatgcgggtagacgagcgcatcgtacatgtgccagggtgaggtgggttgtctgtattcatggacggatggacactatgcaatactcaacctcgacgtggccgccttggacgcggtaccgccggtacgcaccggcgccatcgccactcgtcaccaggcagcaaggcctctgcggttgtggactgtgcccatggctccaggccaacatgtaaatatatcgccgtgggcaacgaggtgagcgctgacgacgctgcggagatgctgctcgcctgctccttatcatcctggctgctggccgagtgaggaggcacgggcgtgtatggaacaaagcaacgcctcgagtgtcagcgtgcgccgccctgacacagagtgcaaggagtccatcctcgcttctgtgtacgccatctatcttgtggtctgacggctcatcgcgcgtactagagtccaccatgcagcaactgccgatgttttcttcaccgtgaacaaaggtaaagcgcagatccagtaaaatttcataccattgtttgattgcgtaggggaaatcgaagcctgtcgcgtaggacagttcggctaggccaaagacctgccggtttgacggagagttgatgcagatctgatctagccgcagcaacgtcgaggtagagcgtgctgataacgtattaagaactacgttaccacggatcaccagatccgttcccttccctcccgtcagcagtagagacgcaagaagatgtagagaacccgtctcccttcccataaatacgacagaggaaacacacgagacactggatatagggttgggcctctggcctctttctaatctctgtattatgagggatgtacggttccttatatagagatgtgagacccctcaggggcaaagcaggtatttgcccacataaccctgattagggttacttaacaagaacagtactatttcagtgttgtcttcagttgtctctcaaaattagagggacgagagaggacaccaggagacgtctctgtcctacctatctcgcaaccaaacacaccctaagtcagagaccgatctagccggccgagcccccaccgacacatcacacatccaccacccaccccgctgccgtgcacggctccggtcgccgccgcgcccggcaccacgcgtgtagtcgtgccgctgccccgcccaccctcactgttcctcccacaatcggcgtcgcaagcgaacaaaaaccgctggcgcgagctgaggccgggcccacgcggccgtgtggtgtggggctgtgggcagggcaccggatctccgcgcccaccgcaccggcggccggcgaggcaacgcgggcccacgacatgggcgggagcccgagtgcacctgcacagcacaaccgcgtactgtaagctatagtggcgaaattccctcgcgcacccagggcgacaccaacgagtccgtgaccgacactagcaccggctcgattggatcccccagtctagtctttcattcatggcaggtggcagcatacaagtggtgggtgcctgggtggtcactggccagggaggcaacgttacgcacacgtacgtggttgccggcatctatcgcagttcgcagtgcctctagtccggagccggcatgattgatctgcccgtgtaggaggagtacacatattggggacgagatccatcgttttcgggcgcgggcacattacagcgggtgtatccggagagatatttgcctgtcctggccgacgtacgcactgtccgcgcaccactgcagcctgcaggccaccgcttattcataggcagaaaccagctcaacaatctccgagtacccacagctccacctcatgagtcatgactcgtgtccagacgccaaacagtacatacaagtgaggtcggtgcggcagttagttggcggtcgcgtcgagacgtatccgcctacctgtccggataatggcgggtgcctggcctgctggcgacggaatggaatggaatcatcccccaggcggtgagagtgagacccttccaaacgtgcacgcgcattcgatccggcggtaagcggtgcagctcagctgtatgtgtgtccgtgagtgatgccgatgggaccgacgagaaaaaccatctgcgttcgggtgaagctctctggctagctggtgagatgtgtgtacggggaggacaatgcaagtccacttcggttgattgggcccggccgggcaggtggtgggcatgcacatggagctaccattatcttactgctaatggtagcactaatcgatcccaatcattcgttgctaatgctacgcgtactcatacgtggtggtggcctggtggtggggcaactagcgcgaggcagatgcgtagtgcctgcgcatgcctcactagctagtagtagtagtagctactgaataaagccgcaatgtgagctgatgatagacaggataaaaaagcagacagggcactacaatacggcttagcgcggcgctaatcatgagcgccgccgctaaccggagtacaattaagggcactttgtttgccatgctactttgtgggattgttaataaaagggcaaagcgcatgataataatgcagggagccagggacacgcacacgaggctagctgctgcctaggccaacaaacgttggtgggttttgttatgtaatgctgagatattatatttagctctcacaccgtgttgcgcgtacgcctaggccaacaaatatgcatcctttttcaaagaatcaaagatgcagcatgccagcatgcatgcatgggttagaacgcggaagcttctgcaggctgtgttttgtcagaaaataaaggcgtacggaaacaactagtacatatatttacatacatatggaacataagacaaagtcttattttcggcatataatattatgtgcacgatactgaagtgaatccgtgaatactagttaattacacgtgcatatatcatatagaaccgtttcttgtgtaacacaaactaatatagattaatagtggttaatcggtagccaccaatttgcacactatctagtcaaagacaaatttcaaagctgtactggcaaataaatcgcagttcaaagtggacaaaggaatcaaaactatagtcgtaatccgatccagaactaaggccatgtttggttacatgggctaatttttagtcctttcaatttagtctcttttagtctctaatttaccaaacacaaggactaaatgagggactaaaccaatttagttcctagtcccttaatgggtggctaaaagggactaaacaaaaaattttcctccattggccttatgctccctacctcacgtccgctctccattccaccgctaaccttccagcgtcgccgtttgagccgtaccatcttcccgccaaacacaagctactgttgcagtttggatggacttttgcatttgaaaaacctgaccgcttggaagtgcatgctacttctaggcatttcagtatttggacggacaaaagttaaaactgattgaaaccaaacatggcctaaggaaaccaaacatgttttagtcctagaactaaagtttagtcttagaactaattgaaaccaaacatggcctaaggaaacccgtacaaaaaaaagttaaaactgatctgatcacgaacaaacccgttcacggtgcagctgacagctgtcctactacttggtatccaagtctcgcaatcattaaatggcctggaaactcagctgagcgagggcgacggtggtgccgagtcactgtgagtagtgcgcagggtcgtgctgcactcgatccaggccggcttagcttccagatctcctacatggtgcattcgtgttggggagaggttgaggaatgaccaaatgagagggaaattgatcaggagccatgagcgtgcgtgcacgtgggtgctcgccccatgtgccgcccatcatcttctcttctccgatcgagcggatggagatgagagggggagacaaaacaaaaaaaaaaggaacgaagaacagctcggcccctcgagagtgaggtccaactcgtgacaagccgggagacagagacatcgccaaaactgaatctggtgatccggatcatctcacgcggaaaactctcttggccgggcggtgtaaagggggtctctaccacctcaaaccgtcagatgcagcagctttgaaggaagccttcatcagtcggtctcttcctagtcgagcacaatggcatgcacgtctagg

SEQ ID NO: 10685 - DNA, 1231 bp, Zea Mays
caaatcagttgatgtttcaaagtttttggaagcacaacatggcataataagcaaatagtctatcagtaatgacctcgggaaattgttgatgtttctaaaggtcaaatagtaatggagcaactgtgttggatgacatctctgatgattgggaatttgaggagacaaaggtaatgcaagctcaggaggagttaagatcaatccgggctaaaatagctgtgttagaagggaagatggctcttgagataattgaaaggaacaaaataattgaagataaacaaaggaggcttgataaagttgagaaggcactgagtgagctccgtactgtctgtattatgtgggccaaccctgcttcagatgttttagtggttgggtcctttgatggctggacaagtcaaagaaagttggaaagatcagaaaacggcatgttttccttaaatctgagactgtaccctggtagatatgagattaagtttattgttgatggtgtttggaagaatgatccgctgcgacccactgtgcacaacaatgggcatgaaaacaaccttctgcttgtcacttgatttgaagttttcaccctggtagcatttttgtagatcattgcctagctccttctcggtatggttgatggcaactgattagatcggtccctccgtgtaactaatcagctttcttttcagtttttttctgtcttttctagataggtgtgtacaacataaacagtgtagggtgttattgaaatgcgtcgccctgttgagatagagaagaaagtagtgtgttcttttcttcccgtcgttctcccctgtgttggctcttcttcatgattctgtttaacaatgttgtaatgtctatatgctgtgaaggtggtctatcatcgaaattatccaaaagttatttgcaggagttgcattattgacgtgctatgtttatctgcaactaaccccacatagaaatatagaatgcagctaggaatcgccgcggaggttttgtttgcggtggcaagagtatttcttccagccaaggtacggcatgaagaccaagtgaccaaccggaagtgaactttgaaggcattcgtttatccagttccgcgtcaacgaagtgtgaaggcatgtcaaggagtaaatgcttgcaatcataatctggtaactgagctaaagctttcattcaatcttacatccatttgtatttcagtttaaccacttacaagtaacaagaaaccaactgttttgtttct

SEQ ID NO: 10686 - DNA, 2441 bp, Zea Mays
ggctcgccaccggctgtacgccctctcctcctcctcttcttcctctccctcggcctcggtccctcccgtcgcgctctcgcctctgcgtctgcgcttctctccagttctccttgtcgtcgagcgggagcgccgagagagagagatgcgaccgcgatgcccccactcgtcccctcgctgctcctcccaatcccagccttgatcctacccgcgccacctcgcctctcccgccaccgctgcttcctgcccgccgtgtcctcctcctcctcctcctcgtcgtccccgcactccagggagccataccgccgccgccgacgcgacaccccgagccagacaccgacgcctgcgccgcgcccatcctcccagccgcagccgcctccgcgccgcgcaaatgccgccacgcccggcgctcggagtcaggaggagctggaggcggcgatctacgacttcatgtgccgctccgccaagccgggagccttccccacccgcgaggagctcgtcgcggccggccgctccgacctcgcggccgccgtcgcgtccagcgggggctggctctccctaggctggtcctccaccgccgcggagggccccgcgacgacggctgcaccgtgctcatcaggcgggggccaccctgactacccgcctgagacgggcgtgtattaccgtggtgatctagcgcccgtctcggtggaggactccgagtgggaggacgacgaagaggatgcctcaccatctgggcgggagtcgggaacagaggaggccagcgaggtccggctcaacgcaggaatcgaggggatgctcaccaggctgcagaaggatagagagcgagcgcggccacctccacggactagtacccacgacacacagggccaaagtgacgatgatgcgggcaacagtggcgctcctagccatacagcggctggtggcaggcatattccaagggctcctgagaatggaagtgtccatggatctcattctcaaaatggaacaatagagggcaacagcacctttcagggttcgaacgatgatgcatggcaaacatggacccttggcaagggcgatttatctcattttgaagctgctgaggtcttacctattgaaagaagaaaagtatcccgacatgatgacattgcatccgtgcaaaatgacattcacaggtcatctaatggtgtggctgtaagcgatttttctagcgatggtgttggcactggaagagatgagatacattcacggcttcaaattctggaattggacctttctgctgctctcaagacattaagatcaagatttgacaaagttttatcagatttgtcaaatagtaatggagcaactgtgttggatgacatctctgatgattgggaatttgaggagacaaaggtaatgcaagctcaggaggagttaagatcaatccgggctaaaatagctgtgttagaagggaagatggctcttgagataattgaaaggaacaaaataattgaagataaacaaaggaggcttgataaagttgagaaggcactgagtgagctccgtactgtctgtattatgtgggccaaccctgcttcagatgttttagtggttgggtcctttgatggctggacaagtcaaagaaagttggaaagatcagaaaacggcatgttttccttaaatctgagactgtaccctggtagatatgagattaagtttattgttgatggtgtttggaagaatgatccgctgcgacccactgtgcacaacaatgggcatgaaaacaaccttctgcttgtcacttgatttgaagttttcaccctggtagcatttttgtagatcattgcctagctccttctcggtatggttgatggcaactgattagatcggtccctccgtgtaactaatcagctttcttttcagtttttttctgtcttttctagataggtgtgtacaacataaacagtgtagggtgttattgaaatgcgtcgccctgttgagatagagaagaaagtagtgtgttcttttcttcccgtcgttctcccctgtgttggctcttcttcatgattctgtttaacaatgttgtaatgtctatatgctgtgaaggtggtctatcatcgaaattatccaaaagttatttgcaggagttgcattattgacgtgctatgtttatctgcaactaaccccacatagaaatatagaatgcagctaggaatcgccgcggaggttttgtttgcggtggcaagagtatttcttccagccaaggtagtacggcatgaagaccaagtgaccaaccggaagtgaactttgaaggcattcgtttatccagttccgcgtcaacgaagtgtgaaggcatgtcaaggagtaaatgcttgcaatcataatctggtaactgagctaaagctttcattcaatcttacatccatttgtatttcagtttaaccacttacaagtaacaagaaaccaactgttttgtttct

SEQ ID NO: 10687 - DNA, 1961 bp, Zea Mays
gggggattgacattggctcgccaccggctgtacgccctctcctcctcctcttcttcctctccctcggcctcggtccctcccgtcgcgctctcgcctctgcgtctgcgcttctctccagttctccttgtcgtcgagcgggagcgccgagagagagagatgcgaccgcgatgcccccactcgtcccctcgctgctcctcccaatcccagccttgatcctacccgcgccacctcgcctctcccgccaccgctgcttcctgcccgccgtgtcctcctcctcctcctcctcgtcgtccccgcactccagggagccataccgccgccgccgacgcgacaccccgagccagacaccgacgcctgcgccgcgcccatcctcccagccgcagccgcctccgcgccgcgcaaatgccgccacgcccggcgctcggagtcaggaggagctggaggcggcgatctacgacttcatgtgccgctccgccaagccgggagccttccccacccgcgaggagctcgtcgcggccggccgctccgacctcgcggccgccgtcgcgtccagcgggggctggctctccctaggctggtcctccaccgccgcggagggccccgcgacgacggctgcaccgtgctcatcaggcgggggccaccctgactacccgcctgagacgggcgtgtattaccgtggtgatctagcgcccgtctcggtggaggactccgagtgggaggacgacgaagaggatgcctcaccatctgggcgggagtcgggaacagaggaggccagcgaggtccggctcaacgcaggaatcgaggggatgctcaccaggctgcagaaggatagagagcgagcgcggccacctccacggactagtacccacgacacacagggccaaagtgacgatgatgcgggcaacagtggcgctcctagccatacagcggctggtggcaggcatattccaagggctcctgagaatggaagtgtccatggatctcattctcaaaatggaacaatagagggcaacagcacctttcagggttcgaacgatgatgcatggcaaacatggacccttggcaagggcgatttatctcattttgaagctgctgaggtcttacctattgaaagaagaaaagtatcccgacatgatgacattgcatccgtgcaaaatgacattcacaggtcatctaatggtgtggctgtaagcgatttttctagcgatggtgttggcactggaagagatgagatacattcacggcttcaaattctggaattggacctttctgctgctctcaagacattaagatcaagatttgacaaagttttatcagatttgtcaaatagtaatggagcaactgtgttggatgacatctctgatgattgggaatttgaggagacaaaggtaatgcaagctcaggaggagttaagatcaatccgggctaaaatagctgtgttagaagggaagatggctcttgagataattgaaaggaacaaaataattgaagataaacaaaggaggcttgataaagttgagaaggcactgagtgagctccgtactgtctgtattatgtgggccaaccctgcttcagatgttttagtggttgggtcctttgatggctggacaagtcaaagaaagttggaaagatcagaaaacggcatgttttccttaaatctgagactgtaccctggtagatatgagaatgcagctaggaatcgccgcggaggttttgtttgcggtggcaagagtatttcttccagccaaggtacggcatgaagaccaagtgaccaaccggaagtgaactttgaaggcattcgtttatccagttccgcgtcaacgaagtgtgaaggcatgtcaaggagtaaatgcttgcaatcataatctggtaactgagctaaagctttcattcaatcttacatccatttgtatttcagtttaaccacttacaagtaacaagaaaccaactgttttgtttct

SEQ ID NO: 10688 - DNA, 2103 bp, Zea Mays
cggcgagtacagcttcgcgcgcgggaggctgccgcctgcgggctgtagctgtaaccagcgcaggcaggcacggtcggtacgggcgcggaggcacagcgcgcctgacgcctgacgggcgacggctgggcgtgggggagcgcgcgttggctttgcgacttgcgagtcgcttgtcgccattcgattcgcacgaggcgcagagcgcgggggattgacattggctcgccaccggctgtacgccctctcctcctcctcttcttcctctccctcggcctcggtccctcccgtcgcgctctcgcctctgcgtctgcgcttctctccagttctccttgtcgtcgagcgggagcgccgagagagagagatgcgaccgcgatgcccccactcgtcccctcgctgctcctcccaatcccagccttgatcctacccgcgccacctcgcctctcccgccaccgctgcttcctgcccgccgtgtcctcctcctcctcctcctcgtcgtccccgcactccagggagccataccgccgccgccgacgcgacaccccgagccagacaccgacgcctgcgccgcgcccatcctcccagccgcagccgcctccgcgccgcgcaaatgccgccacgcccggcgctcggagtcaggaggagctggaggcggcgatctacgacttcatgtgccgctccgccaagccgggagccttccccacccgcgaggagctcgtcgcggccggccgctccgacctcgcggccgccgtcgcgtccagcgggggctggctctccctaggctggtcctccaccgccgcggagggccccgcgacgacggctgcaccgtgctcatcaggcgggggccaccctgactacccgcctgagacgggcgtgtattaccgtggtgatctagcgcccgtctcggtggaggactccgagtgcgaggtccggctcaacgcaggaatcgaggggatgctcaccaggctgcagaaggatagagagcgagcgcggccacctccacggactagtacccacgacacacagggccaaagtgacgatgatgcgggcaacagtggcgctcctagccatacagcggctggtggcaggcatattccaagggctcctgagaatggaagtgtccatggatctcattctcaaaatggaacaatagagggcaacagcacctttcagggttcgaacgatgatgcatggcaaacatggacccttggcaagggcgatttatctcattttgaagctgctgaggtcttacctattgaaagaagaaaagtatcccgacatgatgacattgcatccgtgcaaaatgacattcacaggtcatctaatggtgtggctgtaagcgatttttctagcgatggtgttggcactggaagagatgagatacattcacggcttcaaattctggaattggacctttctgctgctctcaagacattaagatcaagatttgacaaagttttatcagatttgtcaaatagtaatggagcaactgtgttggatgacatctctgatgattgggaatttgaggagacaaaggtaatgcaagctcaggaggagttaagatcaatccgggctaaaatagctgtgttagaagggaagatggctcttgagataattgaaaggaacaaaataattgaagataaacaaaggaggcttgataaagttgagaaggcactgagtgagctccgtactgtctgtattatgtgggccaaccctgcttcagatgttttagtggttgggtcctttgatggctggacaagtcaaagaaagttggaaagatcagaaaacggcatgttttccttaaatctgagactgtaccctggtagatatgagaatgcagctaggaatcgccgcggaggttttgtttgcggtggcaagagtatttcttccagccaaggtacggcatgaagaccaagtgaccaaccggaagtgaactttgaaggcattcgtttatccagttccgcgtcaacgaagtgtgaaggcatgtcaaggagtaaatgcttgcaatcataatctggtaactgagctaaagctttcattcaatcttacatccatttgtatttcagtttaaccacttacaagtaacaagaaaccaactgttttgtttct

SEQ ID NO: 10689 - DNA, 1825 bp, Zea Mays
cgcgcgttggctttgcgacttgcgagtcgcttgtcgccattcgattcgcacgaggcgcagagcgcgggggattgacattggctcgccaccggctgtacgccctctcctcctcctcttcttcctctccctcggcctcggtccctcccgtcgcgctctcgcctctgcgtctgcgcttctctccagttctccttgtcgtcgagcgggagcgccgagagagagagatgcgaccgcgatgcccccactcgtcccctcgctgctcctcccaatcccagccttgatcctacccgcgccacctcgcctctcccgccaccgctgcttcctgcccgccgtgtcctcctcctcctcctcctcgtcgtccccgcactccagggagccataccgccgccgccgacgcgacaccccgagccagacaccgacgcctgcgccgcgcccatcctcccagccgcagccgcctccgcgccgcgcaaatgccgccacgcccggcgctcggagtcaggaggagctggaggcggcgatctacgacttcatgtgccgctccgccaagccgggagccttccccacccgcgaggagctcgtcgcggccggccgctccgacctcgcggccgccgtcgcgtccagcgggggctggctctccctaggctggtcctccaccgccgcggagggccccgcgacgacggctgcaccgtgctcatcaggcgggggccaccctgactacccgcctgagacgggcgtgtattaccgtggtgatctagcgcccgtctcggtggaggactccgagtgggaggacgacgaagaggatgcctcaccatctgggcgggagtcgggaacagaggaggccagcgaggtccggctcaacgcaggaatcgaggggatgctcaccaggctgcagaaggatagagagcgagcgcggccacctccacggactagtacccacgacacacagggccaaagtgacgatgatgcgggcaacagtggcgctcctagccatacagcggctggtggcaggcatattccaagggctcctgagaatggaagtgtccatggatctcattctcaaaatggaacaatagagggcaacagcacctttcagggttcgaacgatgatgcatggcaaacatggacccttggcaagggcgatttatctcattttgaagctgctgaggtcttacctattgaaagaagaaaagtatcccgacatgatgacattgcatccgtgcaaaatgacattcacaggtcatctaatggtgtggctgtaagcgatttttctagcgatggtgttggcactggaagagatgagatacattcacggcttcaaattctggaattggacctttctgctgctctcaagacattaagatcaagatttgacaaagttttatcagatttgtcaaatagtaatggagcaactgtgttggatgacatctctgatgattgggaatttgaggagacaaaggtaatgcaagctcaggaggagttaagatcaatccgggctaaaatagctgtgttagaagggaagatggctcttgagataattgaaaggaacaaaataattgaagataaacaaaggaggcttgataaagttgagaaggcactgagtgagctccgtactgtctgtattatgtgggccaaccctgcttcagatgttttagtggttgggtcctttgatggctggacaagtcaaagaaagttggaaagatcagaaaacggcatgttttccttaaatctgagactgtaccctggtagatatgagaatgcagctaggaatcgccgcggaggttttgtttgcggtggcaagagtatttcttccagccaagctggacgatga

SEQ ID NO: 10690 - DNA, 1457 bp, Zea Mays
agcgggagcgccgagagagagagatgcgaccgcgatgcccccactcgtcccctcgctgctcctcccaatcccagccttgatcctacccgcgccacctcgcctctcccgccaccgctgcttcctgcccgccgtgtcctcctcctcctcctcctcgtcgtccccgcactccagggagccataccgccgccgccgacgcgacaccccgagccagacaccgacgcctgcgccgcgcccatcctcccagccgcagccgcctccgcgccgcgcaaatgccgccacgcccggcgctcggagtcaggaggagctggaggcggcgatctacgacttcatgtgccgctccgccaagccgggagccttccccacccgcgaggagctcgtcgcggccggccgctccgacctcgcggccgccgtcgcgtccagcgggggctggctctccctaggctggtcctccaccgccgcggagggccccgcgacgacggctgcaccgtgctcatcaggcgggggccaccctgactacccgcctgagacgggcgtgtattaccgtggtgatctagcgcccgtctcggtggaggactccgagtgcgaggtccggctcaacgcaggaatcgaggggatgctcaccaggctgcagaaggatagagagcgagcgcggccacctccacggactagtacccacgacacacagggccaaagtgacgatgatgcgggcaacagtggcgctcctagccatacagcggctggtggcaggcatattccaagggctcctgagaatggaagtgtccatggatctcattctcaaaatggaacaatagagggcaacagcacctttcagggttcgaacgatgatgcatggcaaacatggacccttggcaagggcgatttatctcattttgaagctgctgaggtcttacctattgaaagaagaaaagtatcccgacatgatgacattgcatccgtgcaaaatgacattcacaggtcatctaatggtgtggctgtaagcgatttttctagcgatggtgttggcactggaagagatgagatacattcacggcttcaaattctggaattggacctttctgctgctctcaagacattaagatcaagatttgacaaagttttatcagatttgtcaaatagtaatggagcaactgtgttggatgacatctctgatgattgggaatttgaggagacaaaggtaatgcaagctcaggaggagttaagatcaatccgggctaaaatagctgtgttagaagggaagatggctcttgagataattgaaaggaacaaaataattgaagataaacaaaggaggcttgataaagttgagaaggcactgagtgagctccgtactgtctgtattatgtgggccaaccctgcttcagatgttttagtggttgggtcctttgatggctggacaagtcaacaacaaattcaaagtcgatggttgcaaaggaaat

SEQ ID NO: 10691 - DNA, 1627 bp, Zea Mays
ccggctgtacgccctctcctcctcctcttcttcctctccctcggcctcggtccctcccgtcgcgctctcgcctctgcgtctgcgcttctctccagttctccttgtcgtcgagcgggagcgccgagagagagagatgcgaccgcgatgcccccactcgtcccctcgctgctcctcccaatcccagccttgatcctacccgcgccacctcgcctctcccgccaccgctgcttcctgcccgccgtgtcctcctcctcctcctcctcgtcgtccccgcactccagggagccataccgccgccgccgacgcgacaccccgagccagacaccgacgcctgcgccgcgcccatcctcccagccgcagccgcctccgcgccgcgcaaatgccgccacgcccggcgctcggagtcaggaggagctggaggcggcgatctacgacttcatgtgccgctccgccaagccgggagccttccccacccgcgaggagctcgtcgcggccggccgctccgacctcgcggccgccgtcgcgtccagcgggggctggctctccctaggctggtcctccaccgccgcggagggccccgcgacgacggctgcaccgtgctcatcaggcgggggccaccctgactacccgcctgagacgggcgtgtattaccgtggtgatctagcgcccgtctcggtggaggactccgagtgggaggacgacgaagaggatgcctcaccatctgggcgggagtcgggaacagaggaggccagcgaggtccggctcaacgcaggaatcgaggggatgctcaccaggctgcagaaggatagagagcgagcgcggccacctccacggactagtacccacgacacacagggccaaagtgacgatgatgcgggcaacagtggcgctcctagccatacagcggctggtggcaggcatattccaagggctcctgagaatggaagtgtccatggatctcattctcaaaatggaacaatagagggcaacagcacctttcagggttcgaacgatgatgcatggcaaacatggacccttggcaagggcgatttatctcattttgaagctgctgaggtcttacctattgaaagaagaaaagtatcccgacatgatgacattgcatccgtgcaaaatgacattcacaggtcatctaatggtgtggctgtaagcgatttttctagcgatggtgttggcactggaagagatgagatacattcacggcttcaaattctggaattggacctttctgctgctctcaagacattaagatcaagatttgacaaagttttatcagatttgtcaaatagtaatggagcaactgtgttggatgacatctctgatgattgggaatttgaggagacaaaggtaatgcaagctcaggaggagttaagatcaatccgggctaaaatagctgtgttagaagggaagatggctcttgagataattgaaaggaacaaaataattgaagataaacaaaggaggcttgataaagttgagaaggcactgagtgagctccgtactgtctgtattatgtgggccaaccctgcttcagatgttttagtggttgggtcctttgatggctggacaagtcaacaacaaattcaaagtcgatggttgcaaaggaaat

SEQ ID NO: 10692 - DNA, 1558 bp, Zea Mays
ccggctgtacgccctctcctcctcctcttcttcctctccctcggcctcggtccctcccgtcgcgctctcgcctctgcgtctgcgcttctctccagttctccttgtcgtcgagcgggagcgccgagagagagagatgcgaccgcgatgcccccactcgtcccctcgctgctcctcccaatcccagccttgatcctacccgcgccacctcgcctctcccgccaccgctgcttcctgcccgccgtgtcctcctcctcctcctcctcgtcgtccccgcactccagggagccataccgccgccgccgacgcgacaccccgagccagacaccgacgcctgcgccgcgcccatcctcccagccgcagccgcctccgcgccgcgcaaatgccgccacgcccggcgctcggagtcaggaggagctggaggcggcgatctacgacttcatgtgccgctccgccaagccgggagccttccccacccgcgaggagctcgtcgcggccggccgctccgacctcgcggccgccgtcgcgtccagcgggggctggctctccctaggctggtcctccaccgccgcggagggccccgcgacgacggctgcaccgtgctcatcaggcgggggccaccctgactacccgcctgagacgggcgtgtattaccgtggtgatctagcgcccgtctcggtggaggactccgagtgcgaggtccggctcaacgcaggaatcgaggggatgctcaccaggctgcagaaggatagagagcgagcgcggccacctccacggactagtacccacgacacacagggccaaagtgacgatgatgcgggcaacagtggcgctcctagccatacagcggctggtggcaggcatattccaagggctcctgagaatggaagtgtccatggatctcattctcaaaatggaacaatagagggcaacagcacctttcagggttcgaacgatgatgcatggcaaacatggacccttggcaagggcgatttatctcattttgaagctgctgaggtcttacctattgaaagaagaaaagtatcccgacatgatgacattgcatccgtgcaaaatgacattcacaggtcatctaatggtgtggctgtaagcgatttttctagcgatggtgttggcactggaagagatgagatacattcacggcttcaaattctggaattggacctttctgctgctctcaagacattaagatcaagatttgacaaagttttatcagatttgtcaaatagtaatggagcaactgtgttggatgacatctctgatgattgggaatttgaggagacaaaggtaatgcaagctcaggaggagttaagatcaatccgggctaaaatagctgtgttagaagggaagatggctcttgagataattgaaaggaacaaaataattgaagataaacaaaggaggcttgataaagttgagaaggcactgagtgagctccgtactgtctgtattatgtgggccaaccctgcttcagatgttttagtggttgggtcctttgatggctggacaagtcaaaaacattgtaggcacaaggatgaat

SEQ ID NO: 10693 - DNA, 2747 bp, Zea Mays
gtttatttatctcgctgttggtcgttggtcgagagctctgctgattttgatttggccggtaaaaattcggggcggattacatttggttcaactatcgacgagtttcgtaggttaggtaagtgttagattggaggttgctctaatgcaatgaagcgggagcagtttatgttagttatcttatcccttatgctgtctctttggtgttggcagcgagtttaaagtagatatttatgtatctttgcgtttcctcagtagtatgcattacgttaaaccatgtagacttgttatttttcagtgctcttctgtgtctttcttttgaacatgaagttatgtttattctcaacagtttgcatttctcagtaggctgccatagtttgcttaaaatactgggattaagtttgtccaataacccaggtgcctgaatgatgcacttcaagaactaaattctacttatgaatacatttgtagacatgtactacatgatggagtaatcatgcttttataccttggacctttagttgacatagaaatggctgctttgaagtttgaatttgactgctctaatcaacattatgtttacaagtttagctttattaattgctgacaaattaaactgtggaactatgtaattttgactgttatggaaaaagtaatccttgactagtaagtatctttggtgaattggtggtttttcagtatgctgtctgggaaatcagatggttgcatttgaattttcagaggctgagtttatacatgacgatggggcacttaagttgtaatcaatgtcggaagtaaatgatctcttcacgtttgtgatttatactccagatgttcattgtgtcagctgggacgctttcaaacaaactggaatcggtcatattctcataactacttatcagtatgcgactgataaacttattgttttttttaaaaaggcatgattatgtatgtctgtctatcctaactaggagactacaccacacatggatgtaaagacaaaaataaacaaaagagtagaagttacaggggaattttaggttatgtggcatgtgggttatctagagcctgtggcaattgtgggcactctgtgtgcactggtacagaggcaatctctgtccactactttttcttgtttcttatgcagtcttcttgtaatatatttgctaatggcttaaagttgactgtcagtctgtggcgctatacccatgctagatggaggttttgagcctaatgtgtgttgctttgactgtagttttctgtttgaagtgtaatgtcagcatgaccatatatggttgcaccatgtgcacaccagtatatgtgtgctgtgtgccaaaaacacacttgcagcgacttaatgaaattatgccccccctcccccacacataaaacagtttgagtgattgagtcactgtttttttggaaaaagtccattttgctaccctcaacaaatctctttccccatttgacaccctatacaaaatattgacttgatctagttcttcaaactattcaaattagtccaattcttcctgtacaagttgtgtttctatttttattttgggatgatacattgcatcatgttctatgacattttgataattttatgtccgtttcttttaacatcttcatatctcaagggctaggtctgtagtcatgaaactaattgcgaaaaaaaaacatgaaatgtgttttgttacatatgctacaacatcagctgccaccccacaaaatgtgttcctaaaactcaatagaactagtagaagggaaaaaaaaagacagataccatatttaatctggcctggaaagttttttttagaactttttgtttcattcctaaaccatggagttgatggggattggaggggattaggaggattttgacttgtttgggatttagtccccgtcaacccctcccattctccttggttgcaagagaaaccgaacaccaccttggggggatggggtgaatggggcctatatttcgtatagggggtctaaaaagcaaagtgaatagtttgaagtagtaaaatggaccttttccttgttgttcctaggctaattatggaatatcctgatcagccattcatggtatctctttatcgtccctaacagactggaagccgcctacaatctttttattaacttatgagaccatgtttgaatgcactagagctaatagttagctgttaaaattatttgaagacatccaaacagtctagctaatagttgaactattagctacttttagcaaattagctaatagttagctaactatttgctagttagctaattccactagcaattttttagccaactaattattagctctagtgcatttaaacaccccctaagtcagcgtgaacatgcaaaacatatgtttttatcaagaatctgacgtacatgtgtgctcctcaaattcctttattttgaatttccagatggccttatggtttctttatttgcctacagatctttgcccagaaggtctacttgggcatcaataagaaactctttcccctcaaactgattgtggttccatcctcttctgtctggaaaatgttgtcaccaaactaccctatttcctgttccagtttggcatggaagtataagttgtgtacttctattctcaagttgttgtctttgtattatgaaatgtttccaataatcagcagtttttgatgtatggtcgtggatccaaaggtggttctgtgctcggttttgctctgtactatgtgggtgtttgtttg

SEQ ID NO: 10694 - DNA, 572 bp, Zea Mays
atgggtttcatcatggacttcgcggagaatatgatcctccgtctgatggaggacccggacaagcgcgaccaggttcggcgggagcatgtctacaagatgaaggagcggtgcgagcgcactaaggcggcgtggagcctccctctgcgcccctacggcttctggaccttcgaccgcttcaactcgcagctctcctgggatccccagatcagccaggccgccggccgtcgggacccctacgatgacctcatcgcccgccactctggctcgccgccgtcttcctgaacacccgttccgatctttgcccagaaggtctacttgggcatcaataagaaactctttcccctcaaactgattgtggttccatcctcttctgtctggaaaatgttgtcaccaaactaccctatttcctgttccagtttggcatggaagtataagttgtgtacttctattctcaagttgttgtctttgtattatgaaatgtttccaataatcagcagtttttgatgtatggtcgtggatccaaaggtggttctgtgctcggttttgctctgtactatgtgggtgtttgtttg

SEQ ID NO: 10695 - DNA, 916 bp, Zea Mays
agaagccaacgagagggaaatggagaatgaagaaagaggagatctggaaggaagagaggagagacctcacaggaaaccacagtagcggcggcgacaccggctctgacgggagaagagaacggcgcgcggatggacaacgacgaaggatgattaatggttctcctcaacggctaataacgattatgagtctatttcagcggcttcgcgttctctgtattttcatattatcgaaaccctcgtctacatctccgtttcgacgaagccaaatctgtcgtgttttataatcccaaaagtctccacctaagtcaccgactcgatacggcaagatcgacagagagaccgacgcgccggcagatcccaagctcaccggagagggggaagagggcgaccgaaggcggcgatgggtttcatcatggacttcgcggagaatctgatcctccgtctgatggaggacccggacaagcgcgaccaggttcggcgggagcatgtctacaagatgaaggagcggtgcgagcgcactaaggcggcgtggagcctccctctgcgcccctacggcttctggaccttcgaccgcttcaactcgcagctctcctgggatccccagatcagccaggccgccggccgtcgggacccctacgacgacctcatcgcccgccactctggctcgccgccgtcttcctgaacacccgttccgatctttgcccagaaggtctacttgggcatcaataagaaactctttcccctcaaactgattgtggttccatcctcttctgtctggaaaatgttgtcaccaaactaccctatttcctgttccagtttggcatggaagtataagttgtgtacttctattctcaagttgttgtctttgtattatgaaatgtttccaataatcagcagtttttgatgaaaacaaaaa

SEQ ID NO: 10696 - DNA, 2381 bp, Zea Mays
gtggcttatgcagcggaaggagaaaacatagtacctgataccatgcaagcaatgttgttgctgactacacatataaccagtcaacaaaagaaaatgtcttgagcatgctggggtcaatgactaaggttttgcagtcatcttctgataaaacatctttagacactaaagaggaaaataagttttttgagtccgatatactggataaagtgtggcacatcctttatgatgattgtctgtatgctcttggtacttgtgtggaaggggaactcaagcatttccacaaggcgagatacaagcttgcgcaaggatattatagaagaggtgaagcaggggacctggaacgggctaaggaagagctctcgttctgtttcaaatcttctcggtcttcctttacagtaaacatgtgggagattgatggcactgttagaaaaggaaggaggaaaaatccaaatgtgggtggatccagaaagaatctggaggtcagtttgtcagaaagttcacggaaattcattacgtgcattagaaaatatatgatactctatttaaacctgctggagaagaacacggacctgtggactcttgagaaggcttatacttatctgcgaacagataagaggtttgcattgtgtttaggtgatattgttcctgttggtcttgggaagtatattctagttctaacggcagcaattcataatcctgagattcgtcgagcttctggtgatgcttctgttgagcaattacttgagaaaatgttcactgtattcatggatcatgcgaacatgtgggctgatataagcaatataccagaggtgaacagtccagaattatcagaaagcaatctttacagctatatccaccagtacatccatttgctcgagagtgatgtacgactagatgttctagaaggactaaacgagaagataagaaagcgtttcaagacaccgaagttatcaaatagtaacttcgctaagatatgcaagcatgcttctctggcatggtgccggtgtattctcatcaaactggcctcaatcactccactgcctgaatccgcagatgcaaccaatcagcctgcaccattatccaatgggcttctactctatgttgacttgcaacctgatgagcttcttatctcatcccctgatgggcctgctcaattcaaagggcttgacatgaactggtttgagacacttaacagaattaaaaacatcccggtcaagcaaacatccgaagataacttggagactgctgttacgttaatgaagagcacttataacttttatcgggagagcccttgtggaacatttccttcaggtatcaatctctacacggttacaccatcacaagctcctattgaagggctaccgccaaccgctgctgtagttgagacgctcgacttaagtattccaagaaaactccttctgtgggtatacactctggttcatggtcgttactcaaatatatcctccgttgtaaagtattgcgacgagatgaagttaagaagtaaaagaggaaccccagctgcgtctgcttcgtcacaagttgtgcagccagtgtcgcatagtaccgtttcttcccaagttgtatctaaagaaaagagctcccaagttgaacccgctgaagcagcacaaaatccttctgatctagctgccacttgcgttcctgcataccaagaagttggtggtgctagtgcctcgcaaagtgccattgaggcccagaaagctactgctgcggcatctcagctcactcgcagtggttcatcaagggcaatggaaaatgcacaggacggcggggagaggaagtaacgagatagagttcgattttttttatcctctatgctacatcgtatggatgcatatgatcctgcctgacgattctcaggtctcagctctccgtggctccgtgtgcaaatctctgccacgggcgtgttttaacgcctgattggatggttgcccgctggcgcgcccggccagcctcgtacggccacttcggacgcatctgcatcttcggaggtacccgcagatgtagatgaatggccgtaaaatggtttggtctgcgtctctttacatataaccaaataaaaactcagataaagttaactcatgtggtggtctatgttgagatgatgcgggtaaccaatcgaacggttaacaaattcaggtcgtatgtatatcctggtttacagttagtgtttcctaagtgcatttgtagattatagagctgtcaagattgaacgatacatctgtaaggtgttacaaatgctaaatgctaatcctgattttgtggctgatgctaaaaacctgtggactcttaattaccacagactgaactttccctcattttggcccaacaaatacaatagcagaggaagagtttcagttgga

SEQ ID NO: 10697 - DNA, 2361 bp, Zea Mays
attctataggttcatcttgttgaacttgaacaggttgttgctgactacacatataaccagtcaacaaaagaaaatgtcttgagcatgctggggtcaatgactaaggttttgcagtcatcttctgataaaacatctttagacactaaagaggaaaataagttttttgagtccgatatactggataaagtgtggcacatcctttatgatgattgtctgtatgctcttggtacttgtgtggaaggggaactcaagcatttccacaaggcgagatacaagcttgcgcaaggatattatagaagaggtgaagcaggggacctggaacgggctaaggaagagctctcgttctgtttcaaatcttctcggtcttcctttacagtaaacatgtgggagattgatggcactgttagaaaaggaaggaggaaaaatccaaatgtgggtggatccagaaagaatctggaggtcagtttgtcagaaagttcacggaaattcattacgtgcattagaaaatatatgatactctatttaaacctgctggagaagaacacggacctgtggactcttgagaaggcttatacttatctgcgaacagataagaggtttgcattgtgtttaggtgatattgttcctgttggtcttgggaagtatattctagttctaacggcagcaattcataatcctgagattcgtcgagcttctggtgatgcttctgttgagcaattacttgagaaaatgttcactgtattcatggatcatgcgaacatgtgggctgatataagcaatataccagaggtgaacagtccagaattatcagaaagcaatctttacagctatatccaccagtacatccatttgctcgagagtgatgtacgactagatgttctagaaggactaaacgagaagataagaaagcgtttcaagacaccgaagttatcaaatagtaacttcgctaagatatgcaagcatgcttctctggcatggtgccggtgtattctcatcaaactggcctcaatcactccactgcctgaatccgcagatgcaaccaatcagcctgcaccattatccaatgggcttctactctatgttgacttgcaacctgatgagcttcttatctcatcccctgatgggcctgctcaattcaaagggcttgacatgaactggtttgagacacttaacagaattaaaaacatcccggtcaagcaaacatccgaagataacttggagactgctgttacgttaatgaagagcacttataacttttatcgggagagcccttgtggaacatttccttcaggtatcaatctctacacggttacaccatcacaagctcctattgaagggctaccgccaaccgctgctgtagttgagacgctcgacttaagtattccaagaaaactccttctgtgggtatacactctggttcatggtcgttactcaaatatatcctccgttgtaaagtattgcgacgagatgaagttaagaagtaaaagaggaaccccagctgcgtctgcttcgtcacaagttgtgcagccagtgtcgcatagtaccgtttcttcccaagttgtatctaaagaaaagagctcccaagttgaacccgctgaagcagcacaaaatccttctgatctagctgccacttgcgttcctgcataccaagaagttggtggtgctagtgcctcgcaaagtgccattgaggcccagaaagctactgctgcggcatctcagctcactcgcagtggttcatcaagggcaatggaaaatgcacaggacggcggggagaggaagtaacgagatagagttcgattttttttatcctctatgctacatcgtatggatgcatatgatcctgcctgacgattctcaggtctcagctctccgtggctccgtgtgcaaatctctgccacgggcgtgttttaacgcctgattggatggttgcccgctggcgcgcccggccagcctcgtacggccacttcggacgcatctgcatcttcggaggtacccgcagatgtagatgaatggccgtaaaatggtttggtctgcgtctctttacatataaccaaataaaaactcagataaagttaactcatgtggtggtctatgttgagatgatgcgggtaaccaatcgaacggttaacaaattcaggtcgtatgtatatcctggtttacagttagtgtttcctaagtgcatttgtagattatagagctgtcaagattgaacgatacatctgtaaggtgttacaaatgctaaatgctaatcctgattttgtggctgatgctaaaaacctgtggactcttaattaccacagactgaactttccctcattttggcccaacaaatacaatagcagaggaagagtttcagttgga

SEQ ID NO: 10698 - DNA, 3908 bp, Zea Mays
cttggagactccaaattaagcaaagtgaaactgtcttacgttttttactgaacggagtagattactgatggggatgggcaagatggctggagcccactaatgtctatcgttggtgatattcaatcattgctcttgacaatcatgtgtgctgctgtcaagataatactatcgagaaaactctcatgctctggaacctcctatcaggttgaccacttggaatgttcctgtctcatagatgcagccattgcattttgcaagctccagcaccttgatcctacaatatccatcaaaactcaggttgacttaattgttgcagtccatgatttgcttgctgagtatgggctctgttgtgctggaagagatggtgaaggggaggaagggatgttcctaaagttcgcaatcaaacatctcatggctctagatgtgaaactaaaatctcaactcaattcaaatgggatggaagaagatgcagttccaaaagacgtcagagcagaagacagtgtggccgatgaaccatcggttagtgacaataagcagaactccgatgatgaggaagaatcggagttagatgagattcagtcatgtcttgatagtgccttggaccaggcttttttctgcctgtatggtttgaagatcaacccagattcttgcagtgaagatgatctcgctgtacataaaaatacaagccgcggtgattatcaaaccaaagaacagtgtgctgatgtgtttcaatatgtcctgccatatgcaaaagctctatctaaaactggcttggttaaattacggagagtgctgcgggctatacgtaaacactttccgcagccaccttatgacttatttgttaacaaccctattgataatttcttggatggacctgactcatgtgaaaaaatactctctgaaatttgtgaaagcaatgaatctagggaagctatcctgaatgtattgttcccaggtgaaagaggctatgaagcattcaaaaaactctccactgccagctctgagccttattcagatgtttatgagaacttatattatttcatagctcaagccgaagatattagtgccaccgacaagcatacaggttttgttttgaaaaaggaaggagaagaattcgttgaacagagtgccaatattttcaagtatgatttgttgtacaatccattgcggtttgaaagctggcagaagctttccaatctttatgatgaggaagttgatctgttgctcaatgatggtagtaaacatataagcatcttggattggcgaacaaacacggatttaatcagaagggttgagatgggccgtcgacatagtcgacgctgcctattgatgagttcactactggccaaaactgcccctgagcagagcgaggcacatgaactgttggctcttgtgtactacgatagccttcaaaatgtggtgcctttttatgatcaaagagctactttgccagtgaaggattcatcatgggagacattttgtaaaaattctatgaagcactttgagaaggcttttgaaatcaaggagcagtggcttcatgcgttttaccttgggaaactgtgtgagaaactggggcattctttttctaaggcattatcatactacaacaaagccatgatgctgaatccaactgcagtcgaccctgtttacaggattcatgcatcacgcttgaagttactttacactcaaggcaaacagaatcttgaagctatacaggttgttgctgactacacatataaccagtcaacaaaagaaaatgtcttgagcatgctggggtcaatgactaaggggaactcaagcatttccacaaggcgagatacaagcttgcgcaaggatattatagaagaggtgaagcaggggacctggaacgggctaaggaagagctctcgttctgtttcaaatcttctcggtcttcctttacagtaaacatgtgggagattgatggcactgttagaaaaggaaggaggaaaaatccaaatgtgggtggatccagaaagaatctggaggtcagtttgtcagaaagttcacggaaattcattacgtgcattagaaaatatatgatactctatttaaacctgctggagaagaacacggacctgtggactcttgagaaggcttatacttatctgcgaacagataagaggtttgcattgtgtttaggtgatattgttcctgttggtcttgggaagtatattctagttctaacggcagcaattcataatcctgagattcgtcgagcttctggtgatgcttctgttgagcaattacttgagaaaatgttcactgtattcatggatcatgcgaacatgtgggctgatataagcaatataccagaggtgaacagtccagaattatcagaaagcaatctttacagctatatccaccagtacatccatttgctcgagagtgatgtacgactagatgttctagaaggactaaacgagaagataagaaagcgtttcaagacaccgaagttatcaaatagtaacttcgctaagatatgcaagcatgcttctctggcatggtgccggtgtattctcatcaaactggcctcaatcactccactgcctgaatccgcagatgcaaccaatcagcctgcaccattatccaatgggcttctactctatgttgacttgcaacctgatgagcttcttatctcatcccctgatgggcctgctcaattcaaagggcttgacatgaactggtttgagacacttaacagaattaaaaacatcccggtcaagcaaacatccgaagataacttggagactgctgttacgttaatgaagagcacttataacttttatcgggagagcccttgtggaacatttccttcaggtatcaatctctacacggttacaccatcacaagctcctattgaagggctaccgccaaccgctgctgtagttgagacgctcgacttaagtattccaagaaaactccttctgtgggtatacactctggttcatggtcgttactcaaatatatcctccgttgtaaagtattgcgacgagatgaagttaagaagtaaaagaggaaccccagctgcgtctgcttcgtcacaagttgtgcagccagtgtcgcatagtaccgtttcttcccaagttgtatctaaagaaaagagctcccaagttgaacccgctgaagcagcacaaaatccttctgatctagctgccacttgcgttcctgcataccaagaagttggtggtgctagtgcctcgcaaagtgccattgaggcccagaaagctactgctgcggcatctcagctcactcgcagtggttcatcaagggcaatggaaaatgcacaggacggcggggagaggaagtaacgagatagagttcgattttttttatcctctatgctacatcgtatggatgcatatgatcctgcctgacgattctcaggtctcagctctccgtggctccgtgtgcaaatctctgccacgggcgtgttttaacgcctgattggatggttgcccgctggcgcgcccggccagcctcgtacggccacttcggacgcatctgcatcttcggaggtacccgcagatgtagatgaatggccgtaaaatggtttggtctgcgtctctttacatataaccaaataaaaactcagataaagttaactcatgtggtggtctatgttgagatgatgcgggtaaccaatcgaacggttaacaaattcaggtcgtatgtatatcctggtttacagttagtgtttcctaagtgcatttgtagattatagagctgtcaagattgaacgatacatctgtaaggtgttacaaatgctaaatgctaatcctgattttgtggctgatgctaaaaacctgtggactcttaattaccacagactgaactttccctcattttggcccaacaaatacaatagcagaggaagagtttcagttgga

SEQ ID NO: 10699 - DNA, 4001 bp, Zea Mays
cgactgcagaggaggggcggcttcaggatgggcaagatggctggagcccactaatgtctatcgttggtgatattcaatcattgctcttgacaatcatgtgtgctgctgtcaagataatactatcgagaaaactctcatgctctggaacctcctatcaggttgaccacttggaatgttcctgtctcatagatgcagccattgcattttgcaagctccagcaccttgatcctacaatatccatcaaaactcaggttgacttaattgttgcagtccatgatttgcttgctgagtatgggctctgttgtgctggaagagatggtgaaggggaggaagggatgttcctaaagttcgcaatcaaacatctcatggctctagatgtgaaactaaaatctcaactcaattcaaatgggatggaagaagatgcagttccaaaagacgtcagagcagaagacagtgtggccgatgaaccatcggttagtgacaataagcagaactccgatgatgaggaagaatcggagttagatgagattcagtcatgtcttgatagtgccttggaccaggcttttttctgcctgtatggtttgaagatcaacccagattcttgcagtgaagatgatctcgctgtacataaaaatacaagccgcggtgattatcaaaccaaagaacagtgtgctgatgtgtttcaatatgtcctgccatatgcaaaagctctatctaaaactggcttggttaaattacggagagtgctgcgggctatacgtaaacactttccgcagccaccttatgacttatttgttaacaaccctattgataatttcttggatggacctgactcatgtgaaaaaatactctctgaaatttgtgaaagcaatgaatctagggaagctatcctgaatgtattgttcccaggtgaaagaggctatgaagcattcaaaaaactctccactgccagctctgagccttattcagatgtttatgagaacttatattatttcatagctcaagccgaagatattagtgccaccgacaagcatacaggttttgttttgaaaaaggaaggagaagaattcgttgaacagagtgccaatattttcaagtatgatttgttgtacaatccattgcggtttgaaagctggcagaagctttccaatctttatgatgaggtggaagttgatctgttgctcaatgatggtagtaaacatataagcatcttggattggcgaacaaacacggatttaatcagaagggttgagatgggccgtcgacatagtcgacgctgcctattgatgagttcactactggccaaaactgcccctgagcagagcgaggcacatgaactgttggctcttgtgtactacgatagccttcaaaatgtggtgcctttttatgatcaaagagctactttgccagtgaaggattcatcatgggagacattttgtaaaaattctatgaagcactttgagaaggcttttgaaatcaaggagcagtggcttcatgcgttttaccttgggaaactgtgtgagaaactggggcattctttttctaaggcattatcatactacaacaaagccatgatgctgaatccaactgcagtcgaccctgtttacaggattcatgcatcacgcttgaagttactttacactcaaggcaaacagaatcttgaagctatacaggttgttgctgactacacatataaccagtcaacaaaagaaaatgtcttgagcatgctggggtcaatgactaaggttttgcagtcatcttctgataaaacatctttagacactaaagaggaaaataagttttttgagtccgatatactggataaagtgtggcacatcctttatgatgattgtctgtatgctcttggtacttgtgtggaaggggaactcaagcatttccacaaggcgagatacaagcttgcgcaaggatattatagaagaggtgaagcaggggacctggaacgggctaaggaagagctctcgttctgtttcaaatcttctcggtcttcctttacagtaaacatgtgggagattgatggcactgttagaaaaggaaggaggaaaaatccaaatgtgggtggatccagaaagaatctggaggtcagtttgtcagaaagttcacggaaattcattacgtgcattagaaaatatatgatactctatttaaacctgctggagaagaacacggacctgtggactcttgagaaggcttatacttatctgcgaacagataagaggtttgcattgtgtttaggtgatattgttcctgttggtcttgggaagtatattctagttctaacggcagcaattcataatcctgagattcgtcgagcttctggtgatgcttctgttgagcaattacttgagaaaatgttcactgtattcatggatcatgcgaacatgtgggctgatataagcaatataccagaggtgaacagtccagaattatcagaaagcaatctttacagctatatccaccagtacatccatttgctcgagagtgatgtacgactagatgttctagaaggactaaacgagaagataagaaagcgtttcaagacaccgaagttatcaaatagtaacttcgctaagatatgcaagcatgcttctctggcatggtgccggtgtattctcatcaaactggcctcaatcactccactgcctgaatccgcagatgcaaccaatcagcctgcaccattatccaatgggcttctactctatgttgacttgcaacctgatgagcttcttatctcatcccctgatgggcctgctcaattcaaagggcttgacatgaactggtttgagacacttaacagaattaaaaacatcccggtcaagcaaacatccgaagataacttggagactgctgttacgttaatgaagagcacttataacttttatcgggagagcccttgtggaacatttccttcaggtatcaatctctacacggttacaccatcacaagctcctattgaagggctaccgccaaccgctgctgtagttgagacgctcgacttaagtattccaagaaaactccttctgtgggtatacactctggttcatggtcgttactcaaatatatcctccgttgtaaagtattgcgacgagatgaagttaagaagtaaaagaggaaccccagctgcgtctgcttcgtcacaagttgtgcagccagtgtcgcatagtaccgtttcttcccaagttgtatctaaagaaaagagctcccaagttgaacccgctgaagcagcacaaaatccttctgatctagctgccacttgcgttcctgcataccaagaagttggtggtgctagtgcctcgcaaagtgccattgaggcccagaaagctactgctgcggcatctcagctcactcgcagtggttcatcaagggcaatggaaaatgcacaggacggcggggagaggaagtaacgagatagagttcgattttttttatcctctatgctacatcgtatggatgcatatgatcctgcctgacgattctcaggtctcagctctccgtggctccgtgtgcaaatctctgccacgggcgtgttttaacgcctgattggatggttgcccgctggcgcgcccggccagcctcgtacggccacttcggacgcatctgcatcttcggaggtacccgcagatgtagatgaatggccgtaaaatggtttggtctgcgtctctttacatataaccaaataaaaactcagataaagttaactcatgtggtggtctatgttgagatgatgcgggtaaccaatcgaacggttaacaaattcaggtcgtatgtatatcctggtttacagttagtgtttcctaagtgcatttgtagattatagagctgtcaagattgaacgatacatctgtaaggtgttacaaatgctaaatgctaatcctgattttgtggctgatgctaaaaacctgtggactcttaattaccacagactgaactttccctcattttggcccaacaaatacaatagcagaggaagagtttcagttgga

SEQ ID NO: 10700 - DNA, 6127 bp, Zea Mays
cttctctcatcctttttattaatggtttttgacattgaaaaatcttgcatctgttttccttcaacaaggttttgagttctacgataatgctcttcactgttacctacaagctgtagagcttgattcaaatgattcagttgtctggaatcatctgggaacactttcttgttcaatgggtttgctgagcgtatcaagatgggcatttgagcaagggcttgtatgcagcccaaacaactggaactgcatggagaaattgttggaggtgcttatatcaattcgtgatgaagtcgcatgcctttctgtagcaaatttaatacttaatagttggccatcacatcatcgtgctttacatgtgaagaagaccattgaatgtgctgaaccggtaccttttgcacctcgtggtattgacatacttgaacccaagcatgcaaaactcatcttttcgaataaaagaaaatccgttgatgatgaaatctgtcaagaaatagggacaaagaagagtaaacacagtgctacattgcaattgaatgaagcaaaatggttggcccttttagatggtatcctaagcttaataagtgcaaacaccgagaaggctggtgaatataattgctcaaatactgttgataggtgttcaatcagtgagggtagtgccaaggggcttgcttataacattatagacgttgtcatatctacagatacattgaaaagtgtggaaactgctggtggaaatggaaatgattctcaccatggtgagattctgccatatgattgcaaagctacagttaaagagaaagatggtaattcagatagggaacatccccatgaaagacggagcacacgccttgagaggctgcgaagtcgcaaatctggaaaagatgaaaatggatctgatggtaaagatatatcccatgctatgacccagtttctagaatcatttattctaaaaggaccaagccctgtagaaaaggcttattgttctggaaatgccgatgcttcaaatcctgatactcataactatacatccaacgaggaggcaaatgatcttaagcaatttctatgcaagatatccaagaattttggccctcatcacattggttatatgttacttgaggagatggctcatctcaaagtgccattccaagattattttgtcaagttaattgaactggacaaacttactagaggctgggctgaagacagatctgcatcgtgcaatttatttctagctgaactgtactatgatcgggctttgtgttctggaagtccaccaacatcttctgagctgtctgattcatcttaccatctttgtaagatcattgaatcagtagctctggaactgccattcaacatatctgttagagaaatacattccaccaacttggatacggaaagtagcaggacaggtgaatcttcaagtgaattaatcgagagaagtcatgaaaatggtcacatcaacatgcttaatgaccaaaagtccaaacatgattcttcttcaaacatgaattgtgcattctggattcgcttcttctggctgagtggttgcctgtccctttcatcagactgcaaagagaaagcttataaggagttcaatattgccctgtcaatactaaaaaatagcaacaaaactaaaagctatggagaggtcattcttctacctcacaccaaacttgtaaaatcacttacaactgacaggattcttcgtgaaatcaacttgatcaggcttgaatctctactttggaataatgatgagaatatcaacaaaataactcatacagagttcatgcagttgctacctccacttttgctttccaccaaagatgcctacgttggaaatgcatatggtccacaaagagaaagcgagaatgttatttcacttgagttgtctgccttggatgtcttaatatctgcatgtgaaaaagcaaaaccaatgaacatccaggtatatcttgactcccatcgaagaaaaattcaagttctaactgtggcagccggcatggttggatctgtcacacccctgaaagcgaaaggttcaagcaatgtggaatttgtggaagcaatgaacaggaaccggctagaaaatgttgtggaagcagtcaaagatgtgtctcgaaatgccagtaaagcaaaagacataatcgatcaatgcgataattccgatgggcaagatggctggagcccactaatgtctatcgttggtgatattcaatcattgctcttgacaatcatgtgtgctgctgtcaagataatactatcgagaaaactctcatgctctggaacctcctatcaggttgaccacttggaatgttcctgtctcatagatgcagccattgcattttgcaagctccagcaccttgatcctacaatatccatcaaaactcaggttgacttaattgttgcagtccatgatttgcttgctgagtatgggctctgttgtgctggaagagatggtgaaggggaggaagggatgttcctaaagttcgcaatcaaacatctcatggctctagatgtgaaactaaaatctcaactcaattcaaatgggatggaagaagatgcagttccaaaagacgtcagagcagaagacagtgtggccgatgaaccatcggttagtgacaataagcagaactccgatgatgaggaagaatcggagttagatgagattcagtcatgtcttgatagtgccttggaccaggcttttttctgcctgtatggtttgaagatcaacccagattcttgcagtgaagatgatctcgctgtacataaaaatacaagccgcggtgattatcaaaccaaagaacagtgtgctgatgtgtttcaatatgtcctgccatatgcaaaagctctatctaaaactggcttggttaaattacggagagtgctgcgggctatacgtaaacactttccgcagccaccttatgacttatttgttaacaaccctattgataatttcttggatggacctgactcatgtgaaaaaatactctctgaaatttgtgaaagcaatgaatctagggaagctatcctgaatgtattgttcccaggtgaaagaggctatgaagcattcaaaaaactctccactgccagctctgagccttattcagatgtttatgagaacttatattatttcatagctcaagccgaagatattagtgccaccgacaagcatacaggttttgttttgaaaaaggaaggagaagaattcgttgaacagagtgccaatattttcaagtatgatttgttgtacaatccattgcggtttgaaagctggcagaagctttccaatctttatgatgaggaagttgatctgttgctcaatgatggtagtaaacatataagcatcttggattggcgaacaaacacggatttaatcagaagggttgagatgggccgtcgacatagtcgacgctgcctattgatgagttcactactggccaaaactgcccctgagcagagcgaggcacatgaactgttggctcttgtgtactacgatagccttcaaaatgtggtgcctttttatgatcaaagagctactttgccagtgaaggattcatcatgggagacattttgtaaaaattctatgaagcactttgagaaggcttttgaaatcaaggagcagtggcttcatgcgttttaccttgggaaactgtgtgagaaactggggcattctttttctaaggcattatcatactacaacaaagccatgatgctgaatccaactgcagtcgaccctgtttacaggattcatgcatcacgcttgaagttactttacactcaaggcaaacagaatcttgaagctatacaggttgttgctgactacacatataaccagtcaacaaaagaaaatgtcttgagcatgctggggtcaatgactaaggttttgcagtcatcttctgataaaacatctttagacactaaagaggaaaataagttttttgagtccgatatactggataaagtgtggcacatcctttatgatgattgtctgtatgctcttggtacttgtgtggaaggggaactcaagcatttccacaaggcgagatacaagcttgcgcaaggatattatagaagaggtgaagcaggggacctggaacgggctaaggaagagctctcgttctgtttcaaatcttctcggtcttcctttacagtaaacatgtgggagattgatggcactgttagaaaaggaaggaggaaaaatccaaatgtgggtggatccagaaagaatctggaggtcagtttgtcagaaagttcacggaaattcattacgtgcattagaaaatatatgatactctatttaaacctgctggagaagaacacggacctgtggactcttgagaaggcttatacttatctgcgaacagataagaggtttgcattgtgtttaggtgatattgttcctgttggtcttgggaagtatattctagttctaacggcagcaattcataatcctgagattcgtcgagcttctggtgatgcttctgttgagcaattacttgagaaaatgttcactgtattcatggatcatgcgaacatgtgggctgatataagcaatataccagaggtgaacagtccagaattatcagaaagcaatctttacagctatatccaccagtacatccatttgctcgagagtgatgtacgactagatgttctagaaggactaaacgagaagataagaaagcgtttcaagacaccgaagttatcaaatagtaacttcgctaagatatgcaagcatgcttctctggcatggtgccggtgtattctcatcaaactggcctcaatcactccactgcctgaatccgcagatgcaaccaatcagcctgcaccattatccaatgggcttctactctatgttgacttgcaacctgatgagcttcttatctcatcccctgatgggcctgctcaattcaaagggcttgacatgaactggtttgagacacttaacagaattaaaaacatcccggtcaagcaaacatccgaagataacttggagactgctgttacgttaatgaagagcacttataacttttatcgggagagcccttgtggaacatttccttcaggtatcaatctctacacggttacaccatcacaagctcctattgaagggctaccgccaaccgctgctgtagttgagacgctcgacttaagtattccaagaaaactccttctgtgggtatacactctggttcatggtcgttactcaaatatatcctccgttgtaaagtattgcgacgagatgaagttaagaagtaaaagaggaaccccagctgcgtctgcttcgtcacaagttgtgcagccagtgtcgcatagtaccgtttcttcccaagttgtatctaaagaaaagagctcccaagttgaacccgctgaagcagcacaaaatccttctgatctagctgccacttgcgttcctgcataccaagaagttggtggtgctagtgcctcgcaaagtgccattgaggcccagaaagctactgctgcggcatctcagctcactcgcagtggttcatcaagggcaatggaaaatgcacaggacggcggggagaggaagtaacgagatagagttcgattttttttatcctctatgctacatcgtatggatgcatatgatcctgcctgacgattctcaggtctcagctctccgtggctccgtgtgcaaatctctgccacgggcgtgttttaacgcctgattggatggttgcccgctggcgcgcccggccagcctcgtacggccacttcggacgcatctgcatcttcggaggtacccgcagatgtagatgaatggccgtaaaatggtttggtctgcgtctctttacatataaccaaataaaaactcagataaagttaactcatgtggtggtctatgttgagatgatgcgggtaaccaatcgaacggttaacaaattcaggtcgtatgtatatcctggtttacagttagtgtttcctaagtgcatttgtagattatagagctgtcaagattgaacgatacatctgtaaggtgttacaaatgctaaatgctaatcctgattttgtggctgatgctaaaaacctgtggactcttaattaccacagactgaactttccctcattttggcccaacaaatacaatagcagaggaagagtttcagttgga

SEQ ID NO: 10701 - DNA, 6253 bp, Zea Mays
caggaatttgcgctctctcagaagtaccatgagggactcctcaagttgcaacaaaaagactatgcaaaagctcgtgaacttctcgaggatgttttaaaggacccactaatatcaaatgttcagtgatcagcatttgctgcagctaaggtttttgacattgaaaaatcttgcatctgttttccttcaacaaggttttgagttctacgataatgctcttcactgttacctacaagctgtagagcttgattcaaatgattcagttgtctggaatcatctgggaacactttcttgttcaatgggtttgctgagcgtatcaagatgggcatttgagcaagggcttgtatgcagcccaaacaactggaactgcatggagaaattgttggaggtgcttatatcaattcgtgatgaagtcgcatgcctttctgtagcaaatttaatacttaatagttggccatcacatcatcgtgctttacatgtgaagaagaccattgaatgtgctgaaccggtaccttttgcacctcgtggtattgacatacttgaacccaagcatgcaaaactcatcttttcgaataaaagaaaatccgttgatgatgaaatctgtcaagaaatagggacaaagaagagtaaacacagtgctacattgcaattgaatgaagcaaaatggttggcccttttagatggtatcctaagcttaataagtgcaaacaccgagaaggctggtgaatataattgctcaaatactgttgataggtgttcaatcagtgagggtagtgccaaggggcttgcttataacattatagacgttgtcatatctacagatacattgaaaagtgtggaaactgctggtggaaatggaaatgattctcaccatggtgagattctgccatatgattgcaaagctacagttaaagagaaagatggtaattcagatagggaacatccccatgaaagacggagcacacgccttgagaggctgcgaagtcgcaaatctggaaaagatgaaaatggatctgatggtaaagatatatcccatgctatgacccagtttctagaatcatttattctaaaaggaccaagccctgtagaaaaggcttattgttctggaaatgccgatgcttcaaatcctgatactcataactatacatccaacgaggaggcaaatgatcttaagcaatttctatgcaagatatccaagaattttggccctcatcacattggttatatgttacttgaggagatggctcatctcaaagtgccattccaagattattttgtcaagttaattgaactggacaaacttactagaggctgggctgaagacagatctgcatcgtgcaatttatttctagctgaactgtactatgatcgggctttgtgttctggaagtccaccaacatcttctgagctgtctgattcatcttaccatctttgtaagatcattgaatcagtagctctggaactgccattcaacatatctgttagagaaatacattccaccaacttggatacggaaagtagcaggacaggtgaatcttcaagtgaattaatcgagagaagtcatgaaaatggtcacatcaacatgcttaatgaccaaaagtccaaacatgattcttcttcaaacatgaattgtgcattctggattcgcttcttctggctgagtggttgcctgtccctttcatcagactgcaaagagaaagcttataaggagttcaatattgccctgtcaatactaaaaaatagcaacaaaactaaaagctatggagaggtcattcttctacctcacaccaaacttgtaaaatcacttacaactgacaggattcttcgtgaaatcaacttgatcaggcttgaatctctactttggaataatgatgagaatatcaacaaaataactcatacagagttcatgcagttgctacctccacttttgctttccaccaaagatgcctacgttggaaatgcatatggtccacaaagagaaagcgagaatgttatttcacttgagttgtctgccttggatgtcttaatatctgcatgtgaaaaagcaaaaccaatgaacatccaggtatatcttgactcccatcgaagaaaaattcaagttctaactgtggcagccggcatggttggatctgtcacacccctgaaagcgaaaggttcaagcaatgtggaatttgtggaagcaatgaacaggaaccggctagaaaatgttgtggaagcagtcaaagatgtgtctcgaaatgccagtaaagcaaaagacataatcgatcaatgcgataattccgatgggcaagatggctggagcccactaatgtctatcgttggtgatattcaatcattgctcttgacaatcatgtgtgctgctgtcaagataatactatcgagaaaactctcatgctctggaacctcctatcaggttgaccacttggaatgttcctgtctcatagatgcagccattgcattttgcaagctccagcaccttgatcctacaatatccatcaaaactcaggttgacttaattgttgcagtccatgatttgcttgctgagtatgggctctgttgtgctggaagagatggtgaaggggaggaagggatgttcctaaagttcgcaatcaaacatctcatggctctagatgtgaaactaaaatctcaactcaattcaaatgggatggaagaagatgcagttccaaaagacgtcagagcagaagacagtgtggccgatgaaccatcggttagtgacaataagcagaactccgatgatgaggaagaatcggagttagatgagattcagtcatgtcttgatagtgccttggaccaggcttttttctgcctgtatggtttgaagatcaacccagattcttgcagtgaagatgatctcgctgtacataaaaatacaagccgcggtgattatcaaaccaaagaacagtgtgctgatgtgtttcaatatgtcctgccatatgcaaaagctctatctaaaactggcttggttaaattacggagagtgctgcgggctatacgtaaacactttccgcagccaccttatgacttatttgttaacaaccctattgataatttcttggatggacctgactcatgtgaaaaaatactctctgaaatttgtgaaagcaatgaatctagggaagctatcctgaatgtattgttcccaggtgaaagaggctatgaagcattcaaaaaactctccactgccagctctgagccttattcagatgtttatgagaacttatattatttcatagctcaagccgaagatattagtgccaccgacaagcatacaggttttgttttgaaaaaggaaggagaagaattcgttgaacagagtgccaatattttcaagtatgatttgttgtacaatccattgcggtttgaaagctggcagaagctttccaatctttatgatgaggtggaagttgatctgttgctcaatgatggtagtaaacatataagcatcttggattggcgaacaaacacggatttaatcagaagggttgagatgggccgtcgacatagtcgacgctgcctattgatgagttcactactggccaaaactgcccctgagcagagcgaggcacatgaactgttggctcttgtgtactacgatagccttcaaaatgtggtgcctttttatgatcaaagagctactttgccagtgaaggattcatcatgggagacattttgtaaaaattctatgaagcactttgagaaggcttttgaaatcaaggagcagtggcttcatgcgttttaccttgggaaactgtgtgagaaactggggcattctttttctaaggcattatcatactacaacaaagccatgatgctgaatccaactgcagtcgaccctgtttacaggattcatgcatcacgcttgaagttactttacactcaaggcaaacagaatcttgaagctatacaggttgttgctgactacacatataaccagtcaacaaaagaaaatgtcttgagcatgctggggtcaatgactaaggttttgcagtcatcttctgataaaacatctttagacactaaagaggaaaataagttttttgagtccgatatactggataaagtgtggcacatcctttatgatgattgtctgtatgctcttggtacttgtgtggaaggggaactcaagcatttccacaaggcgagatacaagcttgcgcaaggatattatagaagaggtgaagcaggggacctggaacgggctaaggaagagctctcgttctgtttcaaatcttctcggtcttcctttacagtaaacatgtgggagattgatggcactgttagaaaaggaaggaggaaaaatccaaatgtgggtggatccagaaagaatctggaggtcagtttgtcagaaagttcacggaaattcattacgtgcattagaaaatatatgatactctatttaaacctgctggagaagaacacggacctgtggactcttgagaaggcttatacttatctgcgaacagataagaggtttgcattgtgtttaggtgatattgttcctgttggtcttgggaagtatattctagttctaacggcagcaattcataatcctgagattcgtcgagcttctggtgatgcttctgttgagcaattacttgagaaaatgttcactgtattcatggatcatgcgaacatgtgggctgatataagcaatataccagaggtgaacagtccagaattatcagaaagcaatctttacagctatatccaccagtacatccatttgctcgagagtgatgtacgactagatgttctagaaggactaaacgagaagataagaaagcgtttcaagacaccgaagttatcaaatagtaacttcgctaagatatgcaagcatgcttctctggcatggtgccggtgtattctcatcaaactggcctcaatcactccactgcctgaatccgcagatgcaaccaatcagcctgcaccattatccaatgggcttctactctatgttgacttgcaacctgatgagcttcttatctcatcccctgatgggcctgctcaattcaaagggcttgacatgaactggtttgagacacttaacagaattaaaaacatcccggtcaagcaaacatccgaagataacttggagactgctgttacgttaatgaagagcacttataacttttatcgggagagcccttgtggaacatttccttcaggtatcaatctctacacggttacaccatcacaagctcctattgaagggctaccgccaaccgctgctgtagttgagacgctcgacttaagtattccaagaaaactccttctgtgggtatacactctggttcatggtcgttactcaaatatatcctccgttgtaaagtattgcgacgagatgaagttaagaagtaaaagaggaaccccagctgcgtctgcttcgtcacaagttgtgcagccagtgtcgcatagtaccgtttcttcccaagttgtatctaaagaaaagagctcccaagttgaacccgctgaagcagcacaaaatccttctgatctagctgccacttgcgttcctgcataccaagaagttggtggtgctagtgcctcgcaaagtgccattgaggcccagaaagctactgctgcggcatctcagctcactcgcagtggttcatcaagggcaatggaaaatgcacaggacggcggggagaggaagtaacgagatagagttcgattttttttatcctctatgctacatcgtatggatgcatatgatcctgcctgacgattctcaggtctcagctctccgtggctccgtgtgcaaatctctgccacgggcgtgttttaacgcctgattggatggttgcccgctggcgcgcccggccagcctcgtacggccacttcggacgcatctgcatcttcggaggtacccgcagatgtagatgaatggccgtaaaatggtttggtctgcgtctctttacatataaccaaataaaaactcagataaagttaactcatgtggtggtctatgttgagatgatgcgggtaaccaatcgaacggttaacaaattcaggtcgtatgtatatcctggtttacagttagtgtttcctaagtgcatttgtagattatagagctgtcaagattgaacgatacatctgtaaggtgttacaaatgctaaatgctaatcctgattttgtggctgatgctaaaaacctgtggactcttaattaccacagactgaactttccctcattttggcccaacaaatacaatagcagaggaagagtttcagttgga

SEQ ID NO: 10702 - DNA, 6269 bp, Zea Mays
caggaatttgcgctctctcagaagtaccatgagggactcctcaagttgcaacaaaaagactatgcaaaagctcgtgaacttctcgaggatgttttaaaggacccactaatatcaaatgctgataacattggcagtgatcagcatttgctgcagctaaggtttttgacattgaaaaatcttgcatctgttttccttcaacaaggttttgagttctacgataatgctcttcactgttacctacaagctgtagagcttgattcaaatgattcagttgtctggaatcatctgggaacactttcttgttcaatgggtttgctgagcgtatcaagatgggcatttgagcaagggcttgtatgcagcccaaacaactggaactgcatggagaaattgttggaggtgcttatatcaattcgtgatgaagtcgcatgcctttctgtagcaaatttaatacttaatagttggccatcacatcatcgtgctttacatgtgaagaagaccattgaatgtgctgaaccggtaccttttgcacctcgtggtattgacatacttgaacccaagcatgcaaaactcatcttttcgaataaaagaaaatccgttgatgatgaaatctgtcaagaaatagggacaaagaagagtaaacacagtgctacattgcaattgaatgaagcaaaatggttggcccttttagatggtatcctaagcttaataagtgcaaacaccgagaaggctggtgaatataattgctcaaatactgttgataggtgttcaatcagtgagggtagtgccaaggggcttgcttataacattatagacgttgtcatatctacagatacattgaaaagtgtggaaactgctggtggaaatggaaatgattctcaccatggtgagattctgccatatgattgcaaagctacagttaaagagaaagatggtaattcagatagggaacatccccatgaaagacggagcacacgccttgagaggctgcgaagtcgcaaatctggaaaagatgaaaatggatctgatggtaaagatatatcccatgctatgacccagtttctagaatcatttattctaaaaggaccaagccctgtagaaaaggcttattgttctggaaatgccgatgcttcaaatcctgatactcataactatacatccaacgaggaggcaaatgatcttaagcaatttctatgcaagatatccaagaattttggccctcatcacattggttatatgttacttgaggagatggctcatctcaaagtgccattccaagattattttgtcaagttaattgaactggacaaacttactagaggctgggctgaagacagatctgcatcgtgcaatttatttctagctgaactgtactatgatcgggctttgtgttctggaagtccaccaacatcttctgagctgtctgattcatcttaccatctttgtaagatcattgaatcagtagctctggaactgccattcaacatatctgttagagaaatacattccaccaacttggatacggaaagtagcaggacaggtgaatcttcaagtgaattaatcgagagaagtcatgaaaatggtcacatcaacatgcttaatgaccaaaagtccaaacatgattcttcttcaaacatgaattgtgcattctggattcgcttcttctggctgagtggttgcctgtccctttcatcagactgcaaagagaaagcttataaggagttcaatattgccctgtcaatactaaaaaatagcaacaaaactaaaagctatggagaggtcattcttctacctcacaccaaacttgtaaaatcacttacaactgacaggattcttcgtgaaatcaacttgatcaggcttgaatctctactttggaataatgatgagaatatcaacaaaataactcatacagagttcatgcagttgctacctccacttttgctttccaccaaagatgcctacgttggaaatgcatatggtccacaaagagaaagcgagaatgttatttcacttgagttgtctgccttggatgtcttaatatctgcatgtgaaaaagcaaaaccaatgaacatccaggtatatcttgactcccatcgaagaaaaattcaagttctaactgtggcagccggcatggttggatctgtcacacccctgaaagcgaaaggttcaagcaatgtggaatttgtggaagcaatgaacaggaaccggctagaaaatgttgtggaagcagtcaaagatgtgtctcgaaatgccagtaaagcaaaagacataatcgatcaatgcgataattccgatgggcaagatggctggagcccactaatgtctatcgttggtgatattcaatcattgctcttgacaatcatgtgtgctgctgtcaagataatactatcgagaaaactctcatgctctggaacctcctatcaggttgaccacttggaatgttcctgtctcatagatgcagccattgcattttgcaagctccagcaccttgatcctacaatatccatcaaaactcaggttgacttaattgttgcagtccatgatttgcttgctgagtatgggctctgttgtgctggaagagatggtgaaggggaggaagggatgttcctaaagttcgcaatcaaacatctcatggctctagatgtgaaactaaaatctcaactcaattcaaatgggatggaagaagatgcagttccaaaagacgtcagagcagaagacagtgtggccgatgaaccatcggttagtgacaataagcagaactccgatgatgaggaagaatcggagttagatgagattcagtcatgtcttgatagtgccttggaccaggcttttttctgcctgtatggtttgaagatcaacccagattcttgcagtgaagatgatctcgctgtacataaaaatacaagccgcggtgattatcaaaccaaagaacagtgtgctgatgtgtttcaatatgtcctgccatatgcaaaagctctatctaaaactggcttggttaaattacggagagtgctgcgggctatacgtaaacactttccgcagccaccttatgacttatttgttaacaaccctattgataatttcttggatggacctgactcatgtgaaaaaatactctctgaaatttgtgaaagcaatgaatctagggaagctatcctgaatgtattgttcccaggtgaaagaggctatgaagcattcaaaaaactctccactgccagctctgagccttattcagatgtttatgagaacttatattatttcatagctcaagccgaagatattagtgccaccgacaagcatacaggttttgttttgaaaaaggaaggagaagaattcgttgaacagagtgccaatattttcaagtatgatttgttgtacaatccattgcggtttgaaagctggcagaagctttccaatctttatgatgaggtggaagttgatctgttgctcaatgatggtagtaaacatataagcatcttggattggcgaacaaacacggatttaatcagaagggttgagatgggccgtcgacatagtcgacgctgcctattgatgagttcactactggccaaaactgcccctgagcagagcgaggcacatgaactgttggctcttgtgtactacgatagccttcaaaatgtggtgcctttttatgatcaaagagctactttgccagtgaaggattcatcatgggagacattttgtaaaaattctatgaagcactttgagaaggcttttgaaatcaaggagcagtggcttcatgcgttttaccttgggaaactgttcgaccctgtttacaggattcatgcatcacgcttgaagttactttacactcaaggcaaacagaatcttgaagctatacaggttgttgctgactacacatataaccagtcaacaaaagaaaatgtcttgagcatgctggggtcaatgactaaggttttgcagtcatcttctgataaaacatctttagacactaaagaggaaaataagttttttgagtccgatatactggataaagtgtggcacatcctttatgatgattgtctgtatgctcttggtacttgtgtggaaggggaactcaagcatttccacaaggcgagatacaagcttgcgcaaggatattatagaagaggtgaagcaggggacctggaacgggctaaggaagagctctcgttctgtttcaaatcttctcggtcttcctttacagtaaacatgtgggagattgatggcactgttagaaaaggaaggaggaaaaatccaaatgtgggtggatccagaaagaatctggaggtcagtttgtcagaaagttcacggaaattcattacgtgcattagaaaatatatgatactctatttaaacctgctggagaagaacacggacctgtggactcttgagaaggcttatacttatctgcgaacagataagagggtacctcccaactacactaactatgcgaggctatactttttctgcacattaaagaattccttttcctttctcttctgtagtttgcattgtgtttaggtgatattgttcctgttggtcttgggaagtatattctagttctaacggcagcaattcataatcctgagattcgtcgagcttctggtgatgcttctgttgagcaattacttgagaaaatgttcactgtattcatggatcatgcgaacatgtgggctgatataagcaatataccagaggtgaacagtccagaattatcagaaagcaatctttacagctatatccaccagtacatccatttgctcgagagtgatgtacgactagatgttctagaaggactaaacgagaagataagaaagcgtttcaagacaccgaagttatcaaatagtaacttcgctaagatatgcaagcatgcttctctggcatggtgccggtgtattctcatcaaactggcctcaatcactccactgcctgaatccgcagatgcaaccaatcagcctgcaccattatccaatgggcttctactctatgttgacttgcaacctgatgagcttcttatctcatcccctgatgggcctgctcaattcaaagggcttgacatgaactggtttgagacacttaacagaattaaaaacatcccggtcaagcaaacatccgaagataacttggagactgctgttacgttaatgaagagcacttataacttttatcgggagagcccttgtggaacatttccttcaggtatcaatctctacacggttacaccatcacaagctcctattgaagggctaccgccaaccgctgctgtagttgagacgctcgacttaagtattccaagaaaactccttctgtgggtatacactctggttcatggtcgttactcaaatatatcctccgttgtaaagtattgcgacgagatgaagttaagaagtaaaagaggaaccccagctgcgtctgcttcgtcacaagttgtgcagccagtgtcgcatagtaccgtttcttcccaagttgtatctaaagaaaagagctcccaagttgaacccgctgaagcagcacaaaatccttctgatctagctgccacttgcgttcctgcataccaagaagttggtggtgctagtgcctcgcaaagtgccattgaggcccagaaagctactgctgcggcatctcagctcactcgcagtggttcatcaagggcaatggaaaatgcacaggacggcggggagaggaagtaacgagatagagttcgattttttttatcctctatgctacatcgtatggatgcatatgatcctgcctgacgattctcaggtctcagctctccgtggctccgtgtgcaaatctctgccacgggcgtgttttaacgcctgattggatggttgcccgctggcgcgcccggccagcctcgtacggccacttcggacgcatctgcatcttcggaggtacccgcagatgtagatgaatggccgtaaaatggtttggtctgcgtctctttacatataaccaaataaaaactcagataaagttaactcatgtggtggtctatgttgagatgatgcgggtaaccaatcgaacggttaacaaattcaggtcgtatgtatatcctggtttacagttagtgtttcctaagtgcatttgtagattatagagctgtcaagattgaacgatacatctgtaaggtgttacaaatgctaaatgctaatcctgattttgtggctgatgctaaaaacctgtggactcttaattaccacagactgaactttccctcattttggcccaacaaatacaatagcagaggaagagtttcagttgga

SEQ ID NO: 10703 - DNA, 6195 bp, Zea Mays
caggaatttgcgctctctcagaagtaccatgagggactcctcaagttgcaacaaaaagactatgcaaaagctcgtgaacttctcgaggatgttttaaaggacccactaatatcaaatgttcaggctgataacattggcagtgatcagcatttgctgcagctaaggtttttgacattgaaaaatcttgcatctgttttccttcaacaaggttttgagttctacgataatgctcttcactgttacctacaagctgtagagcttgattcaaatgattcagttgtctggaatcatctgggaacactttcttgttcaatgggtttgctgagcgtatcaagatgggcatttgagcaagggcttgtatgcagcccaaacaactggaactgcatggagaaattgttggaggtgcttatatcaattcgtgatgaagtcgcatgcctttctgtagcaaatttaatacttaatagttggccatcacatcatcgtgctttacatgtgaagaagaccattgaatgtgctgaaccggtaccttttgcacctcgtggtattgacatacttgaacccaagcatgcaaaactcatcttttcgaataaaagaaaatccgttgatgatgaaatctgtcaagaaatagggacaaagaagagtaaacacagtgctacattgcaattgaatgaagcaaaatggttggcccttttagatggtatcctaagcttaataagtgcaaacaccgagaaggctggtgaatataattgctcaaatactgttgataggtgttcaatcagtgagggtagtgccaaggggcttgcttataacattatagacgttgtcatatctacagatacattgaaaagtgtggaaactgctggtggaaatggaaatgattctcaccatggtgagattctgccatatgattgcaaagctacagttaaagagaaagatggtaattcagatagggaacatccccatgaaagacggagcacacgccttgagaggctgcgaagtcgcaaatctggaaaagatgaaaatggatctgatggtaaagatatatcccatgctatgacccagtttctagaatcatttattctaaaaggaccaagccctgtagaaaaggcttattgttctggaaatgccgatgcttcaaatcctgatactcataactatacatccaacgaggaggcaaatgatcttaagcaatttctatgcaagatatccaagaattttggccctcatcacattggttatatgttacttgaggagatggctcatctcaaagtgccattccaagattattttgtcaagttaattgaactggacaaacttactagaggctgggctgaagacagatctgcatcgtgcaatttatttctagctgaactgtactatgatcgggctttgtgttctggaagtccaccaacatcttctgagctgtctgattcatcttaccatctttgtaagatcattgaatcagtagctctggaactgccattcaacatatctgttagagaaatacattccaccaacttggatacggaaagtagcaggacaggtgaatcttcaagtgaattaatcgagagaagtcatgaaaatggtcacatcaacatgcttaatgaccaaaagtccaaacatgattcttcttcaaacatgaattgtgcattctggattcgcttcttctggctgagtggttgcctgtccctttcatcagactgcaaagagaaagcttataaggagttcaatattgccctgtcaatactaaaaaatagcaacaaaactaaaagctatggagaggtcattcttctacctcacaccaaacttgtaaaatcacttacaactgacaggattcttcgtgaaatcaacttgatcaggcttgaatctctactttggaataatgatgagaatatcaacaaaataactcatacagagttcatgcagttgctacctccacttttgctttccaccaaagatgcctacgttggaaatgcatatggtccacaaagagaaagcgagaatgttatttcacttgagttgtctgccttggatgtcttaatatctgcatgtgaaaaagcaaaaccaatgaacatccaggtatatcttgactcccatcgaagaaaaattcaagttctaactgtggcagccggcatggttggatctgtcacacccctgaaagcgaaaggttcaagcaatgtggaatttgtggaagcaatgaacaggaaccggctagaaaatgttgtggaagcagtcaaagatgtgtctcgaaatgccagtaaagcaaaagacataatcgatcaatgcgataattccgatgggcaagatggctggagcccactaatgtctatcgttggtgatattcaatcattgctcttgacaatcatgtgtgctgctgtcaagataatactatcgagaaaactctcatgctctggaacctcctatcaggttgaccacttggaatgttcctgtctcatagatgcagccattgcattttgcaagctccagcaccttgatcctacaatatccatcaaaactcaggttgacttaattgttgcagtccatgatttgcttgctgagtatgggctctgttgtgctggaagagatggtgaaggggaggaagggatgttcctaaagttcgcaatcaaacatctcatggctctagatgtgaaactaaaatctcaactcaattcaaatgggatggaagaagatgcagttccaaaagacgtcagagcagaagacagtgtggccgatgaaccatcggttagtgacaataagcagaactccgatgatgaggaagaatcggagttagatgagattcagtcatgtcttgatagtgccttggaccaggcttttttctgcctgtatggtttgaagatcaacccagattcttgcagtgaagatgatctcgctgtacataaaaatacaagccgcggtgattatcaaaccaaagaacagtgtgctgatgtgtttcaatatgtcctgccatatgcaaaagctctatctaaaactggcttggttaaattacggagagtgctgcgggctatacgtaaacactttccgcagccaccttatgacttatttgttaacaaccctattgataatttcttggatggacctgactcatgtgaaaaaatactctctgaaatttgtgaaagcaatgaatctagggaagctatcctgaatgtattgttcccaggtgaaagaggctatgaagcattcaaaaaactctccactgccagctctgagccttattcagatgtttatgagaacttatattatttcatagctcaagccgaagatattagtgccaccgacaagcatacaggttttgttttgaaaaaggaaggagaagaattcgttgaacagagtgccaatattttcaagtatgatttgttgtacaatccattgcggtttgaaagctggcagaagctttccaatctttatgatgaggtggaagttgatctgttgctcaatgatggtagtaaacatataagcatcttggattggcgaacaaacacggatttaatcagaagggttgagatgggccgtcgacatagtcgacgctgcctattgatgagttcactactggccaaaactgcccctgagcagagcgaggcacatgaactgttggctcttgtgtactacgatagccttcaaaatgtggtgcctttttatgatcaaagagctactttgccagtgaaggattcatcatgggagacattttgtaaaaattctatgaagcactttgagaaggcttttgaaatcaaggagcagtggcttcatgcgttttaccttgggaaactgttcgaccctgtttacaggattcatgcatcacgcttgaagttactttacactcaaggcaaacagaatcttgaagctatacaggttgttgctgactacacatataaccagtcaacaaaagaaaatgtcttgagcatgctggggtcaatgactaaggttttgcagtcatcttctgataaaacatctttagacactaaagaggaaaataagttttttgagtccgatatactggataaagtgtggcacatcctttatgatgattgtctgtatgctcttggtacttgtgtggaaggggaactcaagcatttccacaaggcgagatacaagcttgcgcaaggatattatagaagaggtgaagcaggggacctggaacgggctaaggaagagctctcgttctgtttcaaatcttctcggtcttcctttacagtaaacatgtgggagattgatggcactgttagaaaaggaaggaggaaaaatccaaatgtgggtggatccagaaagaatctggaggtcagtttgtcagaaagttcacggaaattcattacgtgcattagaaaatatatgatactctatttaaacctgctggagaagaacacggacctgtggactcttgagaaggcttatacttatctgcgaacagataagaggtttgcattgtgtttaggtgatattgttcctgttggtcttgggaagtatattctagttctaacggcagcaattcataatcctgagattcgtcgagcttctggtgatgcttctgttgagcaattacttgagaaaatgttcactgtattcatggatcatgcgaacatgtgggctgatataagcaatataccagaggtgaacagtccagaattatcagaaagcaatctttacagctatatccaccagtacatccatttgctcgagagtgatgtacgactagatgttctagaaggactaaacgagaagataagaaagcgtttcaagacaccgaagttatcaaatagtaacttcgctaagatatgcaagcatgcttctctggcatggtgccggtgtattctcatcaaactggcctcaatcactccactgcctgaatccgcagatgcaaccaatcagcctgcaccattatccaatgggcttctactctatgttgacttgcaacctgatgagcttcttatctcatcccctgatgggcctgctcaattcaaagggcttgacatgaactggtttgagacacttaacagaattaaaaacatcccggtcaagcaaacatccgaagataacttggagactgctgttacgttaatgaagagcacttataacttttatcgggagagcccttgtggaacatttccttcaggtatcaatctctacacggttacaccatcacaagctcctattgaagggctaccgccaaccgctgctgtagttgagacgctcgacttaagtattccaagaaaactccttctgtgggtatacactctggttcatggtcgttactcaaatatatcctccgttgtaaagtattgcgacgagatgaagttaagaagtaaaagaggaaccccagctgcgtctgcttcgtcacaagttgtgcagccagtgtcgcatagtaccgtttcttcccaagttgtatctaaagaaaagagctcccaagttgaacccgctgaagcagcacaaaatccttctgatctagctgccacttgcgttcctgcataccaagaagttggtggtgctagtgcctcgcaaagtgccattgaggcccagaaagctactgctgcggcatctcagctcactcgcagtggttcatcaagggcaatggaaaatgcacaggacggcggggagaggaagtaacgagatagagttcgattttttttatcctctatgctacatcgtatggatgcatatgatcctgcctgacgattctcaggtctcagctctccgtggctccgtgtgcaaatctctgccacgggcgtgttttaacgcctgattggatggttgcccgctggcgcgcccggccagcctcgtacggccacttcggacgcatctgcatcttcggaggtacccgcagatgtagatgaatggccgtaaaatggtttggtctgcgtctctttacatataaccaaataaaaactcagataaagttaactcatgtggtggtctatgttgagatgatgcgggtaaccaatcgaacggttaacaaattcaggtcgtatgtatatcctggtttacagttagtgtttcctaagtgcatttgtagattatagagctgtcaagattgaacgatacatctgtaaggtgttacaaatgctaaatgctaatcctgattttgtggctgatgctaaaaacctgtggactcttaattaccacagactgaactttccctcattttggcccaacaaatacaatagcagaggaagagtttcagttgga

SEQ ID NO: 10704 - DNA, 6045 bp, Zea Mays
caggaatttgcgctctctcagaagtaccatgagggactcctcaagttgcaacaaaaagactatgcaaaagctcgtgaacttctcgaggatgttttaaaggacccactaatatcaaatgttcaggctgataacattggcagtgatcagcatttgctgcagctaaggtttttgacattgaaaaatcttgcatctgttttccttcaacaaggttttgagttctacgataatgctcttcactgttacctacaagctgtagagcttgattcaaatgattcagttgtctggaatcatctgggaacactttcttgttcaatgggtttgctgagcgtatcaagatgggcatttgagcaagggcttgtatgcagcccaaacaactggaactgcatggagaaattgttggaggtgcttatatcaattcgtgatgaagtcgcatgcctttctgtagcaaatttaatacttaatagttggccatcacatcatcgtgctttacatgtgaagaagaccattgaatgtgctgaaccggtaccttttgcacctcgtggtattgacatacttgaacccaagcatgcaaaactcatcttttcgaataaaagaaaatccgttgatgatgaaatctgtcaagaaatagggacaaagaagagtaaacacagtgctacattgcaattgaatgaagcaaaatggttggcccttttagatggtatcctaagcttaataagtgcaaacaccgagaaggctggtgaatataattgctcaaatactgttgataggtgttcaatcagtgagggtagtgccaaggggcttgcttataacattatagacgttgtcatatctacagatacattgaaaagtgtggaaactgctggtggaaatggaaatgattctcaccatggtgagattctgccatatgattgcaaagctacagttaaagagaaagatggtaattcagatagggaacatccccatgaaagacggagcacacgccttgagaggctgcgaagtcgcaaatctggaaaagatgaaaatggatctgatggtaaagatatatcccatgctatgacccagtttctagaatcatttattctaaaaggaccaagccctgtagaaaaggcttattgttctggaaatgccgatgcttcaaatcctgatactcataactatacatccaacgaggaggcaaatgatcttaagcaatttctatgcaagatatccaagaattttggccctcatcacattggttatatgttacttgaggagatggctcatctcaaagtgccattccaagattattttgtcaagttaattgaactggacaaacttactagaggctgggctgaagacagatctgcatcgtgcaatttatttctagctgaactgtactatgatcgggctttgtgttctggaagtccaccaacatcttctgagctgtctgattcatcttaccatctttgtaagatcattgaatcagtagctctggaactgccattcaacatatctgttagagaaatacattccaccaacttggatacggaaagtagcaggacaggtgaatcttcaagtgaattaatcgagagaagtcatgaaaatggtcacatcaacatgcttaatgaccaaaagtccaaacatgattcttcttcaaacatgaattgtgcattctggattcgcttcttctggctgagtggttgcctgtccctttcatcagactgcaaagagaaagcttataaggagttcaatattgccctgtcaatactaaaaaatagcaacaaaactaaaagctatggagaggtcattcttctacctcacaccaaacttgtaaaatcacttacaactgacaggattcttcgtgaaatcaacttgatcaggcttgaatctctactttggaataatgatgagaatatcaacaaaataactcatacagagttcatgcagttgctacctccacttttgctttccaccaaagatgcctacgttggaaatgcatatggtccacaaagagaaagcgagaatgttatttcacttgagttgtctgccttggatgtcttaatatctgcatgtgaaaaagcaaaaccaatgaacatccaggtatatcttgactcccatcgaagaaaaattcaagttctaactgtggcagccggcatggttggatctgtcacacccctgaaagcgaaaggttcaagcaatgtggaatttgtggaagcaatgaacaggaaccggctagaaaatgttgtggaagcagtcaaagatgtgtctcgaaatgccagtaaagcaaaagacataatcgatcaatgcgataattccgttgacttaattgttgcagtccatgatttgcttgctgagtatgggctctgttgtgctggaagagatggtgaaggggaggaagggatgttcctaaagttcgcaatcaaacatctcatggctctagatgtgaaactaaaatctcaactcaattcaaatgggatggaagaagatgcagttccaaaagacgtcagagcagaagacagtgtggccgatgaaccatcggttagtgacaataagcagaactccgatgatgaggaagaatcggagttagatgagattcagtcatgtcttgatagtgccttggaccaggcttttttctgcctgtatggtttgaagatcaacccagattcttgcagtgaagatgatctcgctgtacataaaaatacaagccgcggtgattatcaaaccaaagaacagtgtgctgatgtgtttcaatatgtcctgccatatgcaaaagctctatctaaaactggcttggttaaattacggagagtgctgcgggctatacgtaaacactttccgcagccaccttatgacttatttgttaacaaccctattgataatttcttggatggacctgactcatgtgaaaaaatactctctgaaatttgtgaaagcaatgaatctagggaagctatcctgaatgtattgttcccaggtgaaagaggctatgaagcattcaaaaaactctccactgccagctctgagccttattcagatgtttatgagaacttatattatttcatagctcaagccgaagatattagtgccaccgacaagcatacaggttttgttttgaaaaaggaaggagaagaattcgttgaacagagtgccaatattttcaagtatgatttgttgtacaatccattgcggtttgaaagctggcagaagctttccaatctttatgatgaggtggaagttgatctgttgctcaatgatggtagtaaacatataagcatcttggattggcgaacaaacacggatttaatcagaagggttgagatgggccgtcgacatagtcgacgctgcctattgatgagttcactactggccaaaactgcccctgagcagagcgaggcacatgaactgttggctcttgtgtactacgatagccttcaaaatgtggtgcctttttatgatcaaagagctactttgccagtgaaggattcatcatgggagacattttgtaaaaattctatgaagcactttgagaaggcttttgaaatcaaggagcagtggcttcatgcgttttaccttgggaaactgtgtgagaaactggggcattctttttctaaggcattatcatactacaacaaagccatgatgctgaatccaactgcagtcgaccctgtttacaggattcatgcatcacgcttgaagttactttacactcaaggcaaacagaatcttgaagctatacaggttgttgctgactacacatataaccagtcaacaaaagaaaatgtcttgagcatgctggggtcaatgactaaggttttgcagtcatcttctgataaaacatctttagacactaaagaggaaaataagttttttgagtccgatatactggataaagtgtggcacatcctttatgatgattgtctgtatgctcttggtacttgtgtggaaggggaactcaagcatttccacaaggcgagatacaagcttgcgcaaggatattatagaagaggtgaagcaggggacctggaacgggctaaggaagagctctcgttctgtttcaaatcttctcggtcttcctttacagtaaacatgtgggagattgatggcactgttagaaaaggaaggaggaaaaatccaaatgtgggtggatccagaaagaatctggaggtcagtttgtcagaaagttcacggaaattcattacgtgcattagaaaatatatgatactctatttaaacctgctggagaagaacacggacctgtggactcttgagaaggcttatacttatctgcgaacagataagaggtttgcattgtgtttaggtgatattgttcctgttggtcttgggaagtatattctagttctaacggcagcaattcataatcctgagattcgtcgagcttctggtgatgcttctgttgagcaattacttgagaaaatgttcactgtattcatggatcatgcgaacatgtgggctgatataagcaatataccagaggtgaacagtccagaattatcagaaagcaatctttacagctatatccaccagtacatccatttgctcgagagtgatgtacgactagatgttctagaaggactaaacgagaagataagaaagcgtttcaagacaccgaagttatcaaatagtaacttcgctaagatatgcaagcatgcttctctggcatggtgccggtgtattctcatcaaactggcctcaatcactccactgcctgaatccgcagatgcaaccaatcagcctgcaccattatccaatgggcttctactctatgttgacttgcaacctgatgagcttcttatctcatcccctgatgggcctgctcaattcaaagggcttgacatgaactggtttgagacacttaacagaattaaaaacatcccggtcaagcaaacatccgaagataacttggagactgctgttacgttaatgaagagcacttataacttttatcgggagagcccttgtggaacatttccttcaggtatcaatctctacacggttacaccatcacaagctcctattgaagggctaccgccaaccgctgctgtagttgagacgctcgacttaagtattccaagaaaactccttctgtgggtatacactctggttcatggtcgttactcaaatatatcctccgttgtaaagtattgcgacgagatgaagttaagaagtaaaagaggaaccccagctgcgtctgcttcgtcacaagttgtgcagccagtgtcgcatagtaccgtttcttcccaagttgtatctaaagaaaagagctcccaagttgaacccgctgaagcagcacaaaatccttctgatctagctgccacttgcgttcctgcataccaagaagttggtggtgctagtgcctcgcaaagtgccattgaggcccagaaagctactgctgcggcatctcagctcactcgcagtggttcatcaagggcaatggaaaatgcacaggacggcggggagaggaagtaacgagatagagttcgattttttttatcctctatgctacatcgtatggatgcatatgatcctgcctgacgattctcaggtctcagctctccgtggctccgtgtgcaaatctctgccacgggcgtgttttaacgcctgattggatggttgcccgctggcgcgcccggccagcctcgtacggccacttcggacgcatctgcatcttcggaggtacccgcagatgtagatgaatggccgtaaaatggtttggtctgcgtctctttacatataaccaaataaaaactcagataaagttaactcatgtggtggtctatgttgagatgatgcgggtaaccaatcgaacggttaacaaattcaggtcgtatgtatatcctggtttacagttagtgtttcctaagtgcatttgtagattatagagctgtcaagattgaacgatacatctgtaaggtgttacaaatgctaaatgctaatcctgattttgtggctgatgctaaaaacctgtggactcttaattaccacagactgaactttccctcattttggcccaacaaatacaatagcagaggaagagtttcagttgga

SEQ ID NO: 10705 - DNA, 6479 bp, Zea Mays
caggaatttgcgctctctcagaagtaccatgagggactcctcaagttgcaacaaaaagactatgcaaaagctcgtgaacttctcgaggatgttttaaaggacccactaatatcaaatgttcaggctgataacattggcagtgatcagcatttgctgcagctaaggtttttgacattgaaaaatcttgcatctgttttccttcaacaaggttttgagttctacgataatgctcttcactgttacctacaagctgtagagcttgattcaaatgattcagttgtctggaatcatctgggaacactttcttgttcaatgggtttgctgagcgtatcaagatgggcatttgagcaagggcttgtatgcagcccaaacaactgtacgggaactgcatggagaaattgttggaggtgcttatatcaattcgtgatgaagtcgcatgcctttctgtagcaaatttaatacttaatagttggccatcacatcatcgtgctttacatgtgaagaagaccattgaatgtgctgaaccggtaccttttgcacctcgtggtattgacatacttgaacccaagcatgcaaaactcatcttttcgaataaaagaaaatccgttgatgatgaaatctgtcaagaaatagggacaaagaagagtaaacacagtgctacattgcaattgaatgaagcaaaatggttggcccttttagatggtatcctaagcttaataagtgcaaacaccgagaaggctggtgaatataattgctcaaatactgttgataggtgttcaatcagtgagggtagtgccaaggggcttgcttataacattatagacgttgtcatatctacagatacattgaaaagtgtggaaactgctggtggaaatggaaatgattctcaccatggtgagattctgccatatgattgcaaagctacagttaaagagaaagatggtaattcagatagggaacatccccatgaaagacggagcacacgccttgagaggctgcgaagtcgcaaatctggaaaagatgaaaatggatctgatggtaaagatatatcccatgctatgacccagtttctagaatcatttattctaaaaggaccaagccctgtagaaaaggcttattgttctggaaatgccgatgcttcaaatcctgatactcataactatacatccaacgaggaggcaaatgatcttaagcaatttctatgcaagatatccaagaattttggccctcatcacattggttatatgttacttgaggagatggctcatctcaaagtgccattccaagattattttgtcaagttaattgaactggacaaacttactagaggctgggctgaagacagatctgcatcgtgcaatttatttctagctgaactgtactatgatcgggctttgtgttctggaagtccaccaacatcttctgagctgtctgattcatcttaccatctttgtaagatcattgaatcagtagctctggaactgccattcaacatatctgttagagaaatacattccaccaacttggatacggaaagtagcaggacaggtgaatcttcaagtgaattaatcgagagaagtcatgaaaatggtcacatcaacatgcttaatgaccaaaagtccaaacatgattcttcttcaaacatgaattgtgcattctggattcgcttcttctggctgagtggttgcctgtccctttcatcagactgcaaagagaaagcttataaggagttcaatattgccctgtcaatactaaaaaatagcaacaaaactaaaagctatggagaggtcattcttctacctcacaccaaacttgtaaaatcacttacaactgacaggattcttcgtgaaatcaacttgatcaggcttgaatctctactttggaataatgatgagaatatcaacaaaataactcatacagagttcatgcagttgctacctccacttttgctttccaccaaagatgcctacgttggaaatgcatatggtccacaaagagaaagcgagaatgttatttcacttgagttgtctgccttggatgtcttaatatctgcatgtgaaaaagcaaaaccaatgaacatccaggtatatcttgactcccatcgaagaaaaattcaagttctaactgtggcagccggcatggttggatctgtcacacccctgaaagcgaaaggttcaagcaatgtggaatttgtggaagcaatgaacaggaaccggctagaaaatgttgtggaagcagtcaaagatgtgtctcgaaatgccagtaaagcaaaagacataatcgatcaatgcgataattccgtaccaagtatcactattgtgttaattcataagtatatcagtcaaggttatcaagtcgataagtcgagtcgagtcgacaaggcgtccattaagcgtcgccttagcgtcgctttagcgctaaggcgtgctcacagggcaagacgtctagctcgccttccgccgtggcgtaaggcgtccgccgcggcacaatgcgtccgctgcggcgatgggcaagatggctggagcccactaatgtctatcgttggtgatattcaatcattgctcttgacaatcatgtgtgctgctgtcaagataatactatcgagaaaactctcatgctctggaacctcctatcaggttgaccacttggaatgttcctgtctcatagatgcagccattgcattttgcaagctccagcaccttgatcctacaatatccatcaaaactcaggttgacttaattgttgcagtccatgatttgcttgctgagtatgggctctgttgtgctggaagagatggtgaaggggaggaagggatgttcctaaagttcgcaatcaaacatctcatggctctagatgtgaaactaaaatctcaactcaattcaaatgggatggaagaagatgcagttccaaaagacgtcagagcagaagacagtgtggccgatgaaccatcggttagtgacaataagcagaactccgatgatgaggaagaatcggagttagatgagattcagtcatgtcttgatagtgccttggaccaggcttttttctgcctgtatggtttgaagatcaacccagattcttgcagtgaagatgatctcgctgtacataaaaatacaagccgcggtgattatcaaaccaaagaacagtgtgctgatgtgtttcaatatgtcctgccatatgcaaaagctctatctaaaactggcttggttaaattacggagagtgctgcgggctatacgtaaacactttccgcagccaccttatgacttatttgttaacaaccctattgataatttcttggatggacctgactcatgtgaaaaaatactctctgaaatttgtgaaagcaatgaatctagggaagctatcctgaatgtattgttcccaggtgaaagaggctatgaagcattcaaaaaactctccactgccagctctgagccttattcagatgtttatgagaacttatattatttcatagctcaagccgaagatattagtgccaccgacaagcatacaggttttgttttgaaaaaggaaggagaagaattcgttgaacagagtgccaatattttcaagtatgatttgttgtacaatccattgcggtttgaaagctggcagaagctttccaatctttatgatgaggtggaagttgatctgttgctcaatgatggtagtaaacatataagcatcttggattggcgaacaaacacggatttaatcagaagggttgagatgggccgtcgacatagtcgacgctgcctattgatgagttcactactggccaaaactgcccctgagcagagcgaggcacatgaactgttggctcttgtgtactacgatagccttcaaaatgtggtgcctttttatgatcaaagagctactttgccagtgaaggattcatcatgggagacattttgtaaaaattctatgaagcactttgagaaggcttttgaaatcaaggagcagtggcttcatgcgttttaccttgggaaactgtgtgagaaactggggcattctttttctaaggcattatcatactacaacaaagccatgatgctgaatccaactgcagtcgaccctgtttacaggattcatgcatcacgcttgaagttactttacactcaaggcaaacagaatcttgaagctatacaggttgttgctgactacacatataaccagtcaacaaaagaaaatgtcttgagcatgctggggtcaatgactaaggttttgcagtcatcttctgataaaacatctttagacactaaagaggaaaataagttttttgagtccgatatactggataaagtgtggcacatcctttatgatgattgtctgtatgctcttggtacttgtgtggaaggggaactcaagcatttccacaaggcgagatacaagcttgcgcaaggatattatagaagaggtgaagcaggggacctggaacgggctaaggaagagctctcgttctgtttcaaatcttctcggtcttcctttacagtaaacatgtgggagattgatggcactgttagaaaaggaaggaggaaaaatccaaatgtgggtggatccagaaagaatctggaggtcagtttgtcagaaagttcacggaaattcattacgtgcattagaaaatatatgatactctatttaaacctgctggagaagaacacggacctgtggactcttgagaaggcttatacttatctgcgaacagataagaggtttgcattgtgtttaggtgatattgttcctgttggtcttgggaagtatattctagttctaacggcagcaattcataatcctgagattcgtcgagcttctggtgatgcttctgttgagcaattacttgagaaaatgttcactgtattcatggatcatgcgaacatgtgggctgatataagcaatataccagaggtgaacagtccagaattatcagaaagcaatctttacagctatatccaccagtacatccatttgctcgagagtgatgtacgactagatgttctagaaggactaaacgagaagataagaaagcgtttcaagacaccgaagttatcaaatagtaacttcgctaagatatgcaagcatgcttctctggcatggtgccggtgtattctcatcaaactggcctcaatcactccactgcctgaatccgcagatgcaaccaatcagcctgcaccattatccaatgggcttctactctatgttgacttgcaacctgatgagcttcttatctcatcccctgatgggcctgctcaattcaaagggcttgacatgaactggtttgagacacttaacagaattaaaaacatcccggtcaagcaaacatccgaagataacttggagactgctgttacgttaatgaagagcacttataacttttatcgggagagcccttgtggaacatttccttcaggtatcaatctctacacggttacaccatcacaagctcctattgaagggctaccgccaaccgctgctgtagttgagacgctcgacttaagtattccaagaaaactccttctgtgggtatacactctggttcatggtcgttactcaaatatatcctccgttgtaaagtattgcgacgagatgaagttaagaagtaaaagaggaaccccagctgcgtctgcttcgtcacaagttgtgcagccagtgtcgcatagtaccgtttcttcccaagttgtatctaaagaaaagagctcccaagttgaacccgctgaagcagcacaaaatccttctgatctagctgccacttgcgttcctgcataccaagaagttggtggtgctagtgcctcgcaaagtgccattgaggcccagaaagctactgctgcggcatctcagctcactcgcagtggttcatcaagggcaatggaaaatgcacaggacggcggggagaggaagtaacgagatagagttcgattttttttatcctctatgctacatcgtatggatgcatatgatcctgcctgacgattctcaggtctcagctctccgtggctccgtgtgcaaatctctgccacgggcgtgttttaacgcctgattggatggttgcccgctggcgcgcccggccagcctcgtacggccacttcggacgcatctgcatcttcggaggtacccgcagatgtagatgaatggccgtaaaatggtttggtctgcgtctctttacatataaccaaataaaaactcagataaagttaactcatgtggtggtctatgttgagatgatgcgggtaaccaatcgaacggttaacaaattcaggtcgtatgtatatcctggtttacagttagtgtttcctaagtgcatttgtagattatagagctgtcaagattgaacgatacatctgtaaggtgttacaaatgctaaatgctaatcctgattttgtggctgatgctaaaaacctgtggactcttaattaccacagactgaactttccctcattttggcccaacaaatacaatagcagaggaagagtttcagttgga

SEQ ID NO: 10706 - DNA, 4136 bp, Zea Mays
caggaatttgcgctctctcagaagtaccatgagggactcctcaagttgcaacaaaaagactatgcaaaagctcgtgaacttctcgaggatgttttaaaggacccactaatatcaaatgttcaggctgataacattggcagtgatcagcatttgctgcagctaaggatgggcaagatggctggagcccactaatgtctatcgttggtgatattcaatcattgctcttgacaatcatgtgtgctgctgtcaagataatactatcgagaaaactctcatgctctggaacctcctatcaggttgaccacttggaatgttcctgtctcatagatgcagccattgcattttgcaagctccagcaccttgatcctacaatatccatcaaaactcaggttgacttaattgttgcagtccatgatttgcttgctgagtatgggctctgttgtgctggaagagatggtgaaggggaggaagggatgttcctaaagttcgcaatcaaacatctcatggctctagatgtgaaactaaaatctcaactcaattcaaatgggatggaagaagatgcagttccaaaagacgtcagagcagaagacagtgtggccgatgaaccatcggttagtgacaataagcagaactccgatgatgaggaagaatcggagttagatgagattcagtcatgtcttgatagtgccttggaccaggcttttttctgcctgtatggtttgaagatcaacccagattcttgcagtgaagatgatctcgctgtacataaaaatacaagccgcggtgattatcaaaccaaagaacagtgtgctgatgtgtttcaatatgtcctgccatatgcaaaagctctatctaaaactggcttggttaaattacggagagtgctgcgggctatacgtaaacactttccgcagccaccttatgacttatttgttaacaaccctattgataatttcttggatggacctgactcatgtgaaaaaatactctctgaaatttgtgaaagcaatgaatctagggaagctatcctgaatgtattgttcccaggtgaaagaggctatgaagcattcaaaaaactctccactgccagctctgagccttattcagatgtttatgagaacttatattatttcatagctcaagccgaagatattagtgccaccgacaagcatacaggttttgttttgaaaaaggaaggagaagaattcgttgaacagagtgccaatattttcaagtatgatttgttgtacaatccattgcggtttgaaagctggcagaagctttccaatctttatgatgaggaagttgatctgttgctcaatgatggtagtaaacatataagcatcttggattggcgaacaaacacggatttaatcagaagggttgagatgggccgtcgacatagtcgacgctgcctattgatgagttcactactggccaaaactgcccctgagcagagcgaggcacatgaactgttggctcttgtgtactacgatagccttcaaaatgtggtgcctttttatgatcaaagagctactttgccagtgaaggattcatcatgggagacattttgtaaaaattctatgaagcactttgagaaggcttttgaaatcaaggagcagtggcttcatgcgttttaccttgggaaactgtgtgagaaactggggcattctttttctaaggcattatcatactacaacaaagccatgatgctgaatccaactgcagtcgaccctgtttacaggattcatgcatcacgcttgaagttactttacactcaaggcaaacagaatcttgaagctatacaggttgttgctgactacacatataaccagtcaacaaaagaaaatgtcttgagcatgctggggtcaatgactaaggttttgcagtcatcttctgataaaacatctttagacactaaagaggaaaataagttttttgagtccgatatactggataaagtgtggcacatcctttatgatgattgtctgtatgctcttggtacttgtgtggaaggggaactcaagcatttccacaaggcgagatacaagcttgcgcaaggatattatagaagaggtgaagcaggggacctggaacgggctaaggaagagctctcgttctgtttcaaatcttctcggtcttcctttacagtaaacatgtgggagattgatggcactgttagaaaaggaaggaggaaaaatccaaatgtgggtggatccagaaagaatctggaggtcagtttgtcagaaagttcacggaaattcattacgtgcattagaaaatatatgatactctatttaaacctgctggagaagaacacggacctgtggactcttgagaaggcttatacttatctgcgaacagataagaggtttgcattgtgtttaggtgatattgttcctgttggtcttgggaagtatattctagttctaacggcagcaattcataatcctgagattcgtcgagcttctggtgatgcttctgttgagcaattacttgagaaaatgttcactgtattcatggatcatgcgaacatgtgggctgatataagcaatataccagaggtgaacagtccagaattatcagaaagcaatctttacagctatatccaccagtacatccatttgctcgagagtgatgtacgactagatgttctagaaggactaaacgagaagataagaaagcgtttcaagacaccgaagttatcaaatagtaacttcgctaagatatgcaagcatgcttctctggcatggtgccggtgtattctcatcaaactggcctcaatcactccactgcctgaatccgcagatgcaaccaatcagcctgcaccattatccaatgggcttctactctatgttgacttgcaacctgatgagcttcttatctcatcccctgatgggcctgctcaattcaaagggcttgacatgaactggtttgagacacttaacagaattaaaaacatcccggtcaagcaaacatccgaagataacttggagactgctgttacgttaatgaagagcacttataacttttatcgggagagcccttgtggaacatttccttcaggtatcaatctctacacggttacaccatcacaagctcctattgaagggctaccgccaaccgctgctgtagttgagacgctcgacttaagtattccaagaaaactccttctgtgggtatacactctggttcatggtcgttactcaaatatatcctccgttgtaaagtattgcgacgagatgaagttaagaagtaaaagaggaaccccagctgcgtctgcttcgtcacaagttgtgcagccagtgtcgcatagtaccgtttcttcccaagttgtatctaaagaaaagagctcccaagttgaacccgctgaagcagcacaaaatccttctgatctagctgccacttgcgttcctgcataccaagaagttggtggtgctagtgcctcgcaaagtgccattgaggcccagaaagctactgctgcggcatctcagctcactcgcagtggttcatcaagggcaatggaaaatgcacaggacggcggggagaggaagtaacgagatagagttcgattttttttatcctctatgctacatcgtatggatgcatatgatcctgcctgacgattctcaggtctcagctctccgtggctccgtgtgcaaatctctgccacgggcgtgttttaacgcctgattggatggttgcccgctggcgcgcccggccagcctcgtacggccacttcggacgcatctgcatcttcggaggtacccgcagatgtagatgaatggccgtaaaatggtttggtctgcgtctctttacatataaccaaataaaaactcagataaagttaactcatgtggtggtctatgttgagatgatgcgggtaaccaatcgaacggttaacaaattcaggtcgtatgtatatcctggtttacagttagtgtttcctaagtgcatttgtagattatagagctgtcaagattgaacgatacatctgtaaggtgttacaaatgctaaatgctaatcctgattttgtggctgatgctaaaaacctgtggactcttaattaccacagactgaactttccctcattttggcccaacaaatacaatagcagaggaagagtttcagttgga

SEQ ID NO: 10707 - DNA, 6267 bp, Zea Mays
caggaatttgcgctctctcagaagtaccatgagggactcctcaagttgcaacaaaaagactatgcaaaagctcgtgaacttctcgaggatgttttaaaggacccactaatatcaaatgttcaggctgataacattggcagtgatcagcatttgctgcagctaaggtttttgacattgaaaaatcttgcatctgttttccttcaacaaggttttgagttctacgataatgctcttcactgttacctacaagctgtagagcttgattcaaatgattcagttgtctggaatcatctgggaacactttcttgttcaatgggtttgctgagcgtatcaagatgggcatttgagcaagggcttgtatgcagcccaaacaactggaactgcatggagaaattgttggaggtgcttatatcaattcgtgatgaagtcgcatgcctttctgtagcaaatttaatacttaatagttggccatcacatcatcgtgctttacatgtgaagaagaccattgaatgtgctgaaccggtaccttttgcacctcgtggtattgacatacttgaacccaagcatgcaaaactcatcttttcgaataaaagaaaatccgttgatgatgaaatctgtcaagaaatagggacaaagaagagtaaacacagtgctacattgcaattgaatgaagcaaaatggttggcccttttagatggtatcctaagcttaataagtgcaaacaccgagaaggctggtgaatataattgctcaaatactgttgataggtgttcaatcagtgagggtagtgccaaggggcttgcttataacattatagacgttgtcatatctacagatacattgaaaagtgtggaaactgctggtggaaatggaaatgattctcaccatggtgagattctgccatatgattgcaaagctacagttaaagagaaagatggtaattcagatagggaacatccccatgaaagacggagcacacgccttgagaggctgcgaagtcgcaaatctggaaaagatgaaaatggatctgatggtaaagatatatcccatgctatgacccagtttctagaatcatttattctaaaaggaccaagccctgtagaaaaggcttattgttctggaaatgccgatgcttcaaatcctgatactcataactatacatccaacgaggaggcaaatgatcttaagcaatttctatgcaagatatccaagaattttggccctcatcacattggttatatgttacttgaggagatggctcatctcaaagtgccattccaagattattttgtcaagttaattgaactggacaaacttactagaggctgggctgaagacagatctgcatcgtgcaatttatttctagctgaactgtactatgatcgggctttgtgttctggaagtccaccaacatcttctgagctgtctgattcatcttaccatctttgtaagatcattgaatcagtagctctggaactgccattcaacatatctgttagagaaatacattccaccaacttggatacggaaagtagcaggacaggtgaatcttcaagtgaattaatcgagagaagtcatgaaaatggtcacatcaacatgcttaatgaccaaaagtccaaacatgattcttcttcaaacatgaattgtgcattctggattcgcttcttctggctgagtggttgcctgtccctttcatcagactgcaaagagaaagcttataaggagttcaatattgccctgtcaatactaaaaaatagcaacaaaactaaaagctatggagaggtcattcttctacctcacaccaaacttgtaaaatcacttacaactgacaggattcttcgtgaaatcaacttgatcaggcttgaatctctactttggaataatgatgagaatatcaacaaaataactcatacagagttcatgcagttgctacctccacttttgctttccaccaaagatgcctacgttggaaatgcatatggtccacaaagagaaagcgagaatgttatttcacttgagttgtctgccttggatgtcttaatatctgcatgtgaaaaagcaaaaccaatgaacatccaggtatatcttgactcccatcgaagaaaaattcaagttctaactgtggcagccggcatggttggatctgtcacacccctgaaagcgaaaggttcaagcaatgtggaatttgtggaagcaatgaacaggaaccggctagaaaatgttgtggaagcagtcaaagatgtgtctcgaaatgccagtaaagcaaaagacataatcgatcaatgcgataattccgatgggcaagatggctggagcccactaatgtctatcgttggtgatattcaatcattgctcttgacaatcatgtgtgctgctgtcaagataatactatcgagaaaactctcatgctctggaacctcctatcaggttgaccacttggaatgttcctgtctcatagatgcagccattgcattttgcaagctccagcaccttgatcctacaatatccatcaaaactcaggttgacttaattgttgcagtccatgatttgcttgctgagtatgggctctgttgtgctggaagagatggtgaaggggaggaagggatgttcctaaagttcgcaatcaaacatctcatggctctagatgtgaaactaaaatctcaactcaattcaaatgggatggaagaagatgcagttccaaaagacgtcagagcagaagacagtgtggccgatgaaccatcggttagtgacaataagcagaactccgatgatgaggaagaatcggagttagatgagattcagtcatgtcttgatagtgccttggaccaggcttttttctgcctgtatggtttgaagatcaacccagattcttgcagtgaagatgatctcgctgtacataaaaatacaagccgcggtgattatcaaaccaaagaacagtgtgctgatgtgtttcaatatgtcctgccatatgcaaaagctctatctaaaactggcttggttaaattacggagagtgctgcgggctatacgtaaacactttccgcagccaccttatgacttatttgttaacaaccctattgataatttcttggatggacctgactcatgtgaaaaaatactctctgaaatttgtgaaagcaatgaatctagggaagctatcctgaatgtattgttcccaggtgaaagaggctatgaagcattcaaaaaactctccactgccagctctgagccttattcagatgtttatgagaacttatattatttcatagctcaagccgaagatattagtgccaccgacaagcatacaggttttgttttgaaaaaggaaggagaagaattcgttgaacagagtgccaatattttcaagtatgatttgttgtacaatccattgcggtttgaaagctggcagaagctttccaatctttatgatgaggaagttgatctgttgctcaatgatggtagtaaacatataagcatcttggattggcgaacaaacacggatttaatcagaagggttgagatgggccgtcgacatagtcgacgctgcctattgatgagttcactactggccaaaactgcccctgagcagagcgaggcacatgaactgttggctcttgtgtactacgatagccttcaaaatgtggtgcctttttatgatcaaagagctactttgccagtgaaggattcatcatgggagacattttgtaaaaattctatgaagcactttgagaaggcttttgaaatcaaggagcagtggcttcatgcgttttaccttgggaaactgtgtgagaaactggggcattctttttctaaggcattatcatactacaacaaagccatgatgctgaatccaactgcagtcgaccctgtttacaggattcatgcatcacgcttgaagttactttacactcaaggcaaacagaatcttgaagctatacaggttgttgctgactacacatataaccagtcaacaaaagaaaatgtcttgagcatgctggggtcaatgactaaggttttgcagtcatcttctgataaaacatctttagacactaaagaggaaaataagttttttgagtccgatatactggataaagtgtggcacatcctttatgatgattgtctgtatgctcttggtacttgtgtggaaggggaactcaagcatttccacaaggcgagatacaagcttgcgcaaggatattatagaagaggtgaagcaggggacctggaacgggctaaggaagagctctcgttctgtttcaaatcttctcggtcttcctttacagtaaacatgtgggagattgatggcactgttagaaaaggaaggaggaaaaatccaaatgtgggtggatccagaaagaatctggaggtcagtttgtcagaaagttcacggaaattcattacgtgcattagaaaatatatgatactctatttaaacctgctggagaagaacacggacctgtggactcttgagaaggcttatacttatctgcgaacagataagaggtttgcattgtgtttaggtgatattgttcctgttggtcttgggaagtatattctagttctaacggcagcaattcataatcctgagattcgtcgagcttctggtgatgcttctgttgagcaattacttgagaaaatgttcactgtattcatggatcatgcgaacatgtgggctgatataagcaatataccagaggtgaacagtccagaattatcagaaagcaatctttacagctatatccaccagtacatccatttgctcgagagtgatgtacgactagatgttctagaaggactaaacgagaagataagaaagcgtttcaagacaccgaagttatcaaatagtaacttcgctaagatatgcaagcatgcttctctggcatggtgccggtgtattctcatcaaactggcctcaatcactccactgcctgaatccgcagatgcaaccaatcagcctgcaccattatccaatgggcttctactctatgttgacttgcaacctgatgagcttcttatctcatcccctgatgggcctgctcaattcaaagggcttgacatgaactggtttgagacacttaacagaattaaaaacatcccggtcaagcaaacatccgaagataacttggagactgctgttacgttaatgaagagcacttataacttttatcgggagagcccttgtggaacatttccttcaggtatcaatctctacacggttacaccatcacaagctcctattgaagggctaccgccaaccgctgctgtagttgagacgctcgacttaagtattccaagaaaactccttctgtgggtatacactctggttcatggtcgttactcaaatatatcctccgttgtaaagtattgcgacgagatgaagttaagaagtaaaagaggaaccccagctgcgtctgcttcgtcacaagttgtgcagccagtgtcgcatagtaccgtttcttcccaagttgtatctaaagaaaagagctcccaagttgaacccgctgaagcagcacaaaatccttctgatctagctgccacttgcgttcctgcataccaagaagttggtggtgctagtgcctcgcaaagtgccattgaggcccagaaagctactgctgcggcatctcagctcactcgcagtggttcatcaagggcaatggaaaatgcacaggacggcggggagaggaagtaacgagatagagttcgattttttttatcctctatgctacatcgtatggatgcatatgatcctgcctgacgattctcaggtctcagctctccgtggctccgtgtgcaaatctctgccacgggcgtgttttaacgcctgattggatggttgcccgctggcgcgcccggccagcctcgtacggccacttcggacgcatctgcatcttcggaggtacccgcagatgtagatgaatggccgtaaaatggtttggtctgcgtctctttacatataaccaaataaaaactcagataaagttaactcatgtggtggtctatgttgagatgatgcgggtaaccaatcgaacggttaacaaattcaggtcgtatgtatatcctggtttacagttagtgtttcctaagtgcatttgtagattatagagctgtcaagattgaacgatacatctgtaaggtgttacaaatgctaaatgctaatcctgattttgtggctgatgctaaaaacctgtggactcttaattaccacagactgaactttccctcattttggcccaacaaatacaatagcagaggaagagtttcagttgga

SEQ ID NO: 10708 - DNA, 6341 bp, Zea Mays
atggagaactgcgagcgaacgataaaggggtttttgacattgaaaaatcttgcatctgttttccttcaacaaggttttgagttctacgataatgctcttcactgttacctacaagctgtagagcttgattcaaatgattcagttgtctggaatcatctgggaacactttcttgttcaatgggtttgctgagcgtatcaagatgggcatttgagcaagggcttgtatgcagcccaaacaactgtacgggaactgcatggagaaattgttggaggtgcttatatcaattcgtgatgaagtcgcatgcctttctgtagcaaatttaatacttaatagttggccatcacatcatcgtgctttacatgtgaagaagaccattgaatgtgctgaaccggtaccttttgcacctcgtggtattgacatacttgaacccaagcatgcaaaactcatcttttcgaataaaagaaaatccgttgatgatgaaatctgtcaagaaatagggacaaagaagagtaaacacagtgctacattgcaattgaatgaagcaaaatggttggcccttttagatggtatcctaagcttaataagtgcaaacaccgagaaggctggtgaatataattgctcaaatactgttgataggtgttcaatcagtgagggtagtgccaaggggcttgcttataacattatagacgttgtcatatctacagatacattgaaaagtgtggaaactgctggtggaaatggaaatgattctcaccatggtgagattctgccatatgattgcaaagctacagttaaagagaaagatggtaattcagatagggaacatccccatgaaagacggagcacacgccttgagaggctgcgaagtcgcaaatctggaaaagatgaaaatggatctgatggtaaagatatatcccatgctatgacccagtttctagaatcatttattctaaaaggaccaagccctgtagaaaaggcttattgttctggaaatgccgatgcttcaaatcctgatactcataactatacatccaacgaggaggcaaatgatcttaagcaatttctatgcaagatatccaagaattttggccctcatcacattggttatatgttacttgaggagatggctcatctcaaagtgccattccaagattattttgtcaagttaattgaactggacaaacttactagaggctgggctgaagacagatctgcatcgtgcaatttatttctagctgaactgtactatgatcgggctttgtgttctggaagtccaccaacatcttctgagctgtctgattcatcttaccatctttgtaagatcattgaatcagtagctctggaactgccattcaacatatctgttagagaaatacattccaccaacttggatacggaaagtagcaggacaggtgaatcttcaagtgaattaatcgagagaagtcatgaaaatggtcacatcaacatgcttaatgaccaaaagtccaaacatgattcttcttcaaacatgaattgtgcattctggattcgcttcttctggctgagtggttgcctgtccctttcatcagactgcaaagagaaagcttataaggagttcaatattgccctgtcaatactaaaaaatagcaacaaaactaaaagctatggagaggtcattcttctacctcacaccaaacttgtaaaatcacttacaactgacaggattcttcgtgaaatcaacttgatcaggcttgaatctctactttggaataatgatgagaatatcaacaaaataactcatacagagttcatgcagttgctacctccacttttgctttccaccaaagatgcctacgttggaaatgcatatggtccacaaagagaaagcgagaatgttatttcacttgagttgtctgccttggatgtcttaatatctgcatgtgaaaaagcaaaaccaatgaacatccaggtatatcttgactcccatcgaagaaaaattcaagttctaactgtggcagccggcatggttggatctgtcacacccctgaaagcgaaaggttcaagcaatgtggaatttgtggaagcaatgaacaggaaccggctagaaaatgttgtggaagcagtcaaagatgtgtctcgaaatgccagtaaagcaaaagacataatcgatcaatgcgataattccgtaccaagtatcactattgtgttaattcataagtatatcagtcaaggttatcaagtcgataagtcgagtcgagtcgacaaggcgtccattaagcgtcgccttagcgtcgctttagcgctaaggcgtgctcacagggcaagacgtctagctcgccttccgccgtggcgtaaggcgtccgccgcggcacaatgcgtccgctgcggcgatgggcaagatggctggagcccactaatgtctatcgttggtgatattcaatcattgctcttgacaatcatgtgtgctgctgtcaagataatactatcgagaaaactctcatgctctggaacctcctatcaggttgaccacttggaatgttcctgtctcatagatgcagccattgcattttgcaagctccagcaccttgatcctacaatatccatcaaaactcaggttgacttaattgttgcagtccatgatttgcttgctgagtatgggctctgttgtgctggaagagatggtgaaggggaggaagggatgttcctaaagttcgcaatcaaacatctcatggctctagatgtgaaactaaaatctcaactcaattcaaatgggatggaagaagatgcagttccaaaagacgtcagagcagaagacagtgtggccgatgaaccatcggttagtgacaataagcagaactccgatgatgaggaagaatcggagttagatgagattcagtcatgtcttgatagtgccttggaccaggcttttttctgcctgtatggtttgaagatcaacccagattcttgcagtgaagatgatctcgctgtacataaaaatacaagccgcggtgattatcaaaccaaagaacagtgtgctgatgtgtttcaatatgtcctgccatatgcaaaagctctatctaaaactggcttggttaaattacggagagtgctgcgggctatacgtaaacactttccgcagccaccttatgacttatttgttaacaaccctattgataatttcttggatggacctgactcatgtgaaaaaatactctctgaaatttgtgaaagcaatgaatctagggaagctatcctgaatgtattgttcccaggtgaaagaggctatgaagcattcaaaaaactctccactgccagctctgagccttattcagatgtttatgagaacttatattatttcatagctcaagccgaagatattagtgccaccgacaagcatacaggttttgttttgaaaaaggaaggagaagaattcgttgaacagagtgccaatattttcaagtatgatttgttgtacaatccattgcggtttgaaagctggcagaagctttccaatctttatgatgaggaagttgatctgttgctcaatgatggtagtaaacatataagcatcttggattggcgaacaaacacggatttaatcagaagggttgagatgggccgtcgacatagtcgacgctgcctattgatgagttcactactggccaaaactgcccctgagcagagcgaggcacatgaactgttggctcttgtgtactacgatagccttcaaaatgtggtgcctttttatgatcaaagagctactttgccagtgaaggattcatcatgggagacattttgtaaaaattctatgaagcactttgagaaggcttttgaaatcaaggagcagtggcttcatgcgttttaccttgggaaactgtgtgagaaactggggcattctttttctaaggcattatcatactacaacaaagccatgatgctgaatccaactgcagtcgaccctgtttacaggattcatgcatcacgcttgaagttactttacactcaaggcaaacagaatcttgaagctatacaggttgttgctgactacacatataaccagtcaacaaaagaaaatgtcttgagcatgctggggtcaatgactaaggttttgcagtcatcttctgataaaacatctttagacactaaagaggaaaataagttttttgagtccgatatactggataaagtgtggcacatcctttatgatgattgtctgtatgctcttggtacttgtgtggaaggggaactcaagcatttccacaaggcgagatacaagcttgcgcaaggatattatagaagaggtgaagcaggggacctggaacgggctaaggaagagctctcgttctgtttcaaatcttctcggtcttcctttacagtaaacatgtgggagattgatggcactgttagaaaaggaaggaggaaaaatccaaatgtgggtggatccagaaagaatctggaggtcagtttgtcagaaagttcacggaaattcattacgtgcattagaaaatatatgatactctatttaaacctgctggagaagaacacggacctgtggactcttgagaaggcttatacttatctgcgaacagataagaggtttgcattgtgtttaggtgatattgttcctgttggtcttgggaagtatattctagttctaacggcagcaattcataatcctgagattcgtcgagcttctggtgatgcttctgttgagcaattacttgagaaaatgttcactgtattcatggatcatgcgaacatgtgggctgatataagcaatataccagaggtgaacagtccagaattatcagaaagcaatctttacagctatatccaccagtacatccatttgctcgagagtgatgtacgactagatgttctagaaggactaaacgagaagataagaaagcgtttcaagacaccgaagttatcaaatagtaacttcgctaagatatgcaagcatgcttctctggcatggtgccggtgtattctcatcaaactggcctcaatcactccactgcctgaatccgcagatgcaaccaatcagcctgcaccattatccaatgggcttctactctatgttgacttgcaacctgatgagcttcttatctcatcccctgatgggcctgctcaattcaaagggcttgacatgaactggtttgagacacttaacagaattaaaaacatcccggtcaagcaaacatccgaagataacttggagactgctgttacgttaatgaagagcacttataacttttatcgggagagcccttgtggaacatttccttcaggtatcaatctctacacggttacaccatcacaagctcctattgaagggctaccgccaaccgctgctgtagttgagacgctcgacttaagtattccaagaaaactccttctgtgggtatacactctggttcatggtcgttactcaaatatatcctccgttgtaaagtattgcgacgagatgaagttaagaagtaaaagaggaaccccagctgcgtctgcttcgtcacaagttgtgcagccagtgtcgcatagtaccgtttcttcccaagttgtatctaaagaaaagagctcccaagttgaacccgctgaagcagcacaaaatccttctgatctagctgccacttgcgttcctgcataccaagaagttggtggtgctagtgcctcgcaaagtgccattgaggcccagaaagctactgctgcggcatctcagctcactcgcagtggttcatcaagggcaatggaaaatgcacaggacggcggggagaggaagtaacgagatagagttcgattttttttatcctctatgctacatcgtatggatgcatatgatcctgcctgacgattctcaggtctcagctctccgtggctccgtgtgcaaatctctgccacgggcgtgttttaacgcctgattggatggttgcccgctggcgcgcccggccagcctcgtacggccacttcggacgcatctgcatcttcggaggtacccgcagatgtagatgaatggccgtaaaatggtttggtctgcgtctctttacatataaccaaataaaaactcagataaagttaactcatgtggtggtctatgttgagatgatgcgggtaaccaatcgaacggttaacaaattcaggtcgtatgtatatcctggtttacagttagtgtttcctaagtgcatttgtagattatagagctgtcaagattgaacgatacatctgtaaggtgttacaaatgctaaatgctaatcctgattttgtggctgatgctaaaaacctgtggactcttaattaccacagactgaactttccctcattttggcccaacaaatacaatagcagaggaagagtttcagttgga

SEQ ID NO: 10709 - DNA, 6185 bp, Zea Mays
atggagaactgcgagcgaacgataaaggggtttttgacattgaaaaatcttgcatctgttttccttcaacaaggttttgagttctacgataatgctcttcactgttacctacaagctgtagagcttgattcaaatgattcagttgtctggaatcatctgggaacactttcttgttcaatgggtttgctgagcgtatcaagatgggcatttgagcaagggcttgtatgcagcccaaacaactggaactgcatggagaaattgttggaggtgcttatatcaattcgtgatgaagtcgcatgcctttctgtagcaaatttaatacttaatagttggccatcacatcatcgtgctttacatgtgaagaagaccattgaatgtgctgaaccggtaccttttgcacctcgtggtattgacatacttgaacccaagcatgcaaaactcatcttttcgaataaaagaaaatccgttgatgatgaaatctgtcaagaaatagggacaaagaagagtaaacacagtgctacattgcaattgaatgaagcaaaatggttggcccttttagatggtatcctaagcttaataagtgcaaacaccgagaaggctggtgaatataattgctcaaatactgttgataggtgttcaatcagtgagggtagtgccaaggggcttgcttataacattatagacgttgtcatatctacagatacattgaaaagtgtggaaactgctggtggaaatggaaatgattctcaccatggtgagattctgccatatgattgcaaagctacagttaaagagaaagatggtaattcagatagggaacatccccatgaaagacggagcacacgccttgagaggctgcgaagtcgcaaatctggaaaagatgaaaatggatctgatggtaaagatatatcccatgctatgacccagtttctagaatcatttattctaaaaggaccaagccctgtagaaaaggcttattgttctggaaatgccgatgcttcaaatcctgatactcataactatacatccaacgaggaggcaaatgatcttaagcaatttctatgcaagatatccaagaattttggccctcatcacattggttatatgttacttgaggagatggctcatctcaaagtgccattccaagattattttgtcaagttaattgaactggacaaacttactagaggctgggctgaagacagatctgcatcgtgcaatttatttctagctgaactgtactatgatcgggctttgtgttctggaagtccaccaacatcttctgagctgtctgattcatcttaccatctttgtaagatcattgaatcagtagctctggaactgccattcaacatatctgttagagaaatacattccaccaacttggatacggaaagtagcaggacaggtgaatcttcaagtgaattaatcgagagaagtcatgaaaatggtcacatcaacatgcttaatgaccaaaagtccaaacatgattcttcttcaaacatgaattgtgcattctggattcgcttcttctggctgagtggttgcctgtccctttcatcagactgcaaagagaaagcttataaggagttcaatattgccctgtcaatactaaaaaatagcaacaaaactaaaagctatggagaggtcattcttctacctcacaccaaacttgtaaaatcacttacaactgacaggattcttcgtgaaatcaacttgatcaggcttgaatctctactttggaataatgatgagaatatcaacaaaataactcatacagagttcatgcagttgctacctccacttttgctttccaccaaagatgcctacgttggaaatgcatatggtccacaaagagaaagcgagaatgttatttcacttgagttgtctgccttggatgtcttaatatctgcatgtgaaaaagcaaaaccaatgaacatccaggtatatcttgactcccatcgaagaaaaattcaagttctaactgtggcagccggcatggttggatctgtcacacccctgaaagcgaaaggttcaagcaatgtggaatttgtggaagcaatgaacaggaaccggctagaaaatgttgtggaagcagtcaaagatgtgtctcgaaatgccagtaaagcaaaagacataatcgatcaatgcgataattccgtaccaagtatcactattgtgttaattcataagtatatcagtcaaggttatcaagtcgataagtcgagtcgagtcgacaaggcgtccattaagcgtcgccttagcgtcgctttagcgctaaggcgtgctcacagggcaagacgtctagctcgccttccgccgtggcgtaaggcgtccgccgcggcacaatgcgtccgctgcggcgatgggcaagatggctggagcccactaatgtctatcgttggtgatattcaatcattgctcttgacaatcatgtgtgctgctgtcaagataatactatcgagaaaactctcatgctctggaacctcctatcaggttgaccacttggaatgttcctgtctcatagatgcagccattgcattttgcaagctccagcaccttgatcctacaatatccatcaaaactcaggttgacttaattgttgcagtccatgatttgcttgctgagtatgggctctgttgtgctggaagagatggtgaaggggaggaagggatgttcctaaagttcgcaatcaaacatctcatggctctagatgtgaaactaaaatctcaactcaattcaaatgggatggaagaagatgcagttccaaaagacgtcagagcagaagacagtgtggccgatgaaccatcggttagtgacaataagcagaactccgatgatgaggaagaatcggagttagatgagattcagtcatgtcttgatagtgccttggaccaggcttttttctgcctgtatggtttgaagatcaacccagattcttgcagtgaagatgatctcgctgtacataaaaatacaagccgcggtgattatcaaaccaaagaacagtgtgctgatgtgtttcaatatgtcctgccatatgcaaaagctctatctaaaactggcttggttaaattacggagagtgctgcgggctatacgtaaacactttccgcagccaccttatgacttatttgttaacaaccctattgataatttcttggatggacctgactcatgtgaaaaaatactctctgaaatttgtgaaagcaatgaatctagggaagctatcctgaatgtattgttcccaggtgaaagaggctatgaagcattcaaaaaactctccactgccagctctgagccttattcagatgtttatgagaacttatattatttcatagctcaagccgaagatattagtgccaccgacaagcatacaggttttgttttgaaaaaggaaggagaagaattcgttgaacagagtgccaatattttcaagtatgatttgttgtacaatccattgcggtttgaaagctggcagaagctttccaatctttatgatgaggtggaagttgatctgttgctcaatgatggtagtaaacatataagcatcttggattggcgaacaaacacggatttaatcagaagggttgagatgggccgtcgacatagtcgacgctgcctattgatgagttcactactggccaaaactgcccctgagcagagcgaggcacatgaactgttggctcttgtgtactacgatagccttcaaaatgtggtgcctttttatgatcaaagagctactttgccagtgaaggattcatcatgggagacattttgtaaaaattctatgaagcactttgagaaggcttttgaaatcaaggagcagtggcttcatgcgttttaccttgggaaactgtgtgagaaactggggcattctttttctaaggcattatcatactacaacaaagccatgatgctgaatccaactgcagtcgaccctgtttacaggattcatgcatcacgcttgaagttactttacactcaaggcaaacagaatcttgaagctatacaggttgttgctgactacacatataaccagtcaacaaaagaaaatgtcttgagcatgctggggtcaatgactaaggttttgcagtcatcttctgataaaacatctttagacactaaagaggaaaataagttttttgagtccgatatactggataaagtgtggcacatcctttatgatgattgtctgtatgctcttggtacttgtgtggaaggggaactcaagcatttccacaaggcgagatacaagcttgcgcaaggatattatagaagaggtgaagcaggggacctggaacgggctaaggaagagctctcgttctgtttcaaatcttctcggtcttcctttacagtaaacatgtgggagattgatggcactgttagaaaaggaaggaggaaaaatccaaatgtgggtggatccagaaagaatctggaggtgatattgttcctgttggtcttgggaagtatattctagttctaacggcagcaattcataatcctgagattcgtcgagcttctggtgatgcttctgttgagcaattacttgagaaaatgttcactgtattcatggatcatgcgaacatgtgggctgatataagcaatataccagaggtgaacagtccagaattatcagaaagcaatctttacagctatatccaccagtacatccatttgctcgagagtgatgtacgactagatgttctagaaggactaaacgagaagataagaaagcgtttcaagacaccgaagttatcaaatagtaacttcgctaagatatgcaagcatgcttctctggcatggtgccggtgtattctcatcaaactggcctcaatcactccactgcctgaatccgcagatgcaaccaatcagcctgcaccattatccaatgggcttctactctatgttgacttgcaacctgatgagcttcttatctcatcccctgatgggcctgctcaattcaaagggcttgacatgaactggtttgagacacttaacagaattaaaaacatcccggtcaagcaaacatccgaagataacttggagactgctgttacgttaatgaagagcacttataacttttatcgggagagcccttgtggaacatttccttcaggtatcaatctctacacggttacaccatcacaagctcctattgaagggctaccgccaaccgctgctgtagttgagacgctcgacttaagtattccaagaaaactccttctgtgggtatacactctggttcatggtcgttactcaaatatatcctccgttgtaaagtattgcgacgagatgaagttaagaagtaaaagaggaaccccagctgcgtctgcttcgtcacaagttgtgcagccagtgtcgcatagtaccgtttcttcccaagttgtatctaaagaaaagagctcccaagttgaacccgctgaagcagcacaaaatccttctgatctagctgccacttgcgttcctgcataccaagaagttggtggtgctagtgcctcgcaaagtgccattgaggcccagaaagctactgctgcggcatctcagctcactcgcagtggttcatcaagggcaatggaaaatgcacaggacggcggggagaggaagtaacgagatagagttcgattttttttatcctctatgctacatcgtatggatgcatatgatcctgcctgacgattctcaggtctcagctctccgtggctccgtgtgcaaatctctgccacgggcgtgttttaacgcctgattggatggttgcccgctggcgcgcccggccagcctcgtacggccacttcggacgcatctgcatcttcggaggtacccgcagatgtagatgaatggccgtaaaatggtttggtctgcgtctctttacatataaccaaataaaaactcagataaagttaactcatgtggtggtctatgttgagatgatgcgggtaaccaatcgaacggttaacaaattcaggtcgtatgtatatcctggtttacagttagtgtttcctaagtgcatttgtagattatagagctgtcaagattgaacgatacatctgtaaggtgttacaaatgctaaatgctaatcctgattttgtggctgatgctaaaaacctgtggactcttaattaccacagactgaactttccctcattttggcccaacaaatacaatagcagaggaagagtttcagttgga

SEQ ID NO: 10710 - DNA, 5994 bp, Zea Mays
atggagaactgcgagcgaacgataaaggggtttttgacattgaaaaatcttgcatctgttttccttcaacaaggttttgagttctacgataatgctcttcactgttacctacaagctgtagagcttgattcaaatgattcagttgtctggaatcatctgggaacactttcttgttcaatgggtttgctgagcgtatcaagatgggcatttgagcaagggcttgtatgcagcccaaacaactggaactgcatggagaaattgttggaggtgcttatatcaattcgtgatgaagtcgcatgcctttctgtagcaaatttaatacttaatagttggccatcacatcatcgtgctttacatgtgaagaagaccattgaatgtgctgaaccggtaccttttgcacctcgtggtattgacatacttgaacccaagcatgcaaaactcatcttttcgaataaaagaaaatccgttgatgatgaaatctgtcaagaaatagggacaaagaagagtaaacacagtgctacattgcaattgaatgaagcaaaatggttggcccttttagatggtatcctaagcttaataagtgcaaacaccgagaaggctggtgaatataattgctcaaatactgttgataggtgttcaatcagtgagggtagtgccaaggggcttgcttataacattatagacgttgtcatatctacagatacattgaaaagtgtggaaactgctggtggaaatggaaatgattctcaccatggtgagattctgccatatgattgcaaagctacagttaaagagaaagatggtaattcagatagggaacatccccatgaaagacggagcacacgccttgagaggctgcgaagtcgcaaatctggaaaagatgaaaatggatctgatggtaaagatatatcccatgctatgacccagtttctagaatcatttattctaaaaggaccaagccctgtagaaaaggcttattgttctggaaatgccgatgcttcaaatcctgatactcataactatacatccaacgaggaggcaaatgatcttaagcaatttctatgcaagatatccaagaattttggccctcatcacattggttatatgttacttgaggagatggctcatctcaaagtgccattccaagattattttgtcaagttaattgaactggacaaacttactagaggctgggctgaagacagatctgcatcgtgcaatttatttctagctgaactgtactatgatcgggctttgtgttctggaagtccaccaacatcttctgagctgtctgattcatcttaccatctttgtaagatcattgaatcagtagctctggaactgccattcaacatatctgttagagaaatacattccaccaacttggatacggaaagtagcaggacaggtgaatcttcaagtgaattaatcgagagaagtcatgaaaatggtcacatcaacatgcttaatgaccaaaagtccaaacatgattcttcttcaaacatgaattgtgcattctggattcgcttcttctggctgagtggttgcctgtccctttcatcagactgcaaagagaaagcttataaggagttcaatattgccctgtcaatactaaaaaatagcaacaaaactaaaagctatggagaggtcattcttctacctcacaccaaacttgtaaaatcacttacaactgacaggattcttcgtgaaatcaacttgatcaggcttgaatctctactttggaataatgatgagaatatcaacaaaataactcatacagagttcatgcagttgctacctccacttttgctttccaccaaagatgcctacgttggaaatgcatatggtccacaaagagaaagcgagaatgttatttcacttgagttgtctgccttggatgtcttaatatctgcatgtgaaaaagcaaaaccaatgaacatccaggtatatcttgactcccatcgaagaaaaattcaagttctaactgtggcagccggcatggttggatctgtcacacccctgaaagcgaaaggttcaagcaatgtggaatttgtggaagcaatgaacaggaaccggctagaaaatgttgtggaagcagtcaaagatgtgtctcgaaatgccagtaaagcaaaagacataatcgatcaatgcgataattccgatgggcaagatggctggagcccactaatgtctatcgttggtgatattcaatcattgctcttgacaatcatgtgtgctgctgtcaagataatactatcgagaaaactctcatgctctggaacctcctatcaggttgaccacttggaatgttcctgtctcatagatgcagccattgcattttgcaagctccagcaccttgatcctacaatatccatcaaaactcaggttgacttaattgttgcagtccatgatttgcttgctgagtatgggctctgttgtgctggaagagatggtgaaggggaggaagggatgttcctaaagttcgcaatcaaacatctcatggctctagatgtgaaactaaaatctcaactcaattcaaatgggatggaagaagatgcagttccaaaagacgtcagagcagaagacagtgtggccgatgaaccatcggttagtgacaataagcagaactccgatgatgaggaagaatcggagttagatgagattcagtcatgtcttgatagtgccttggaccaggcttttttctgcctgtatggtttgaagatcaacccagattcttgcagtgaagatgatctcgctgtacataaaaatacaagccgcggtgattatcaaaccaaagaacagtgtgctgatgtgtttcaatatgtcctgccatatgcaaaagctctatctaaaactggcttggttaaattacggagagtgctgcgggctatacgtaaacactttccgcagccaccttatgacttatttgttaacaaccctattgataatttcttggatggacctgactcatgtgaaaaaatactctctgaaatttgtgaaagcaatgaatctagggaagctatcctgaatgtattgttcccaggtgaaagaggctatgaagcattcaaaaaactctccactgccagctctgagccttattcagatgtttatgagaacttatattatttcatagctcaagccgaagatattagtgccaccgacaagcatacaggttttgttttgaaaaaggaaggagaagaattcgttgaacagagtgccaatattttcaagtatgatttgttgtacaatccattgcggtttgaaagctggcagaagctttccaatctttatgatgaggaagttgatctgttgctcaatgatggtagtaaacatataagcatcttggattggcgaacaaacacggatttaatcagaagggttgagatgggccgtcgacatagtcgacgctgcctattgatgagttcactactggccaaaactgcccctgagcagagcgaggcacatgaactgttggctcttgtgtactacgatagccttcaaaatgtggtgcctttttatgatcaaagagctactttgccagtgaaggattcatcatgggagacattttgtaaaaattctatgaagcactttgagaaggcttttgaaatcaaggagcagtggcttcatgcgttttaccttgggaaactgtgtgagaaactggggcattctttttctaaggcattatcatactacaacaaagccatgatgctgaatccaactgcagtcgaccctgtttacaggattcatgcatcacgcttgaagttactttacactcaaggcaaacagaatcttgaagctatacaggttgttgctgactacacatataaccagtcaacaaaagaaaatgtcttgagcatgctggggtcaatgactaaggttttgcagtcatcttctgataaaacatctttagacactaaagaggaaaataagttttttgagtccgatatactggataaagtgtggcacatcctttatgatgattgtctgtatgctcttggtacttgtgtggaaggggaactcaagcatttccacaaggcgagatacaagcttgcgcaaggatattatagaagaggtgaagcaggggacctggaacgggctaaggaagagctctcgttctgtttcaaatcttctcggtcttcctttacagtaaacatgtgggagattgatggcactgttagaaaaggaaggaggaaaaatccaaatgtgggtggatccagaaagaatctggagtttgcattgtgtttaggtgatattgttcctgttggtcttgggaagtatattctagttctaacggcagcaattcataatcctgagattcgtcgagcttctggtgatgcttctgttgagcaattacttgagaaaatgttcactgtattcatggatcatgcgaacatgtgggctgatataagcaatataccagaggtgaacagtccagaattatcagaaagcaatctttacagctatatccaccagtacatccatttgctcgagagtgatgtacgactagatgttctagaaggactaaacgagaagataagaaagcgtttcaagacaccgaagttatcaaatagtaacttcgctaagatatgcaagcatgcttctctggcatggtgccggtgtattctcatcaaactggcctcaatcactccactgcctgaatccgcagatgcaaccaatcagcctgcaccattatccaatgggcttctactctatgttgacttgcaacctgatgagcttcttatctcatcccctgatgggcctgctcaattcaaagggcttgacatgaactggtttgagacacttaacagaattaaaaacatcccggtcaagcaaacatccgaagataacttggagactgctgttacgttaatgaagagcacttataacttttatcgggagagcccttgtggaacatttccttcaggtatcaatctctacacggttacaccatcacaagctcctattgaagggctaccgccaaccgctgctgtagttgagacgctcgacttaagtattccaagaaaactccttctgtgggtatacactctggttcatggtcgttactcaaatatatcctccgttgtaaagtattgcgacgagatgaagttaagaagtaaaagaggaaccccagctgcgtctgcttcgtcacaagttgtgcagccagtgtcgcatagtaccgtttcttcccaagttgtatctaaagaaaagagctcccaagttgaacccgctgaagcagcacaaaatccttctgatctagctgccacttgcgttcctgcataccaagaagttggtggtgctagtgcctcgcaaagtgccattgaggcccagaaagctactgctgcggcatctcagctcactcgcagtggttcatcaagggcaatggaaaatgcacaggacggcggggagaggaagtaacgagatagagttcgattttttttatcctctatgctacatcgtatggatgcatatgatcctgcctgacgattctcaggtctcagctctccgtggctccgtgtgcaaatctctgccacgggcgtgttttaacgcctgattggatggttgcccgctggcgcgcccggccagcctcgtacggccacttcggacgcatctgcatcttcggaggtacccgcagatgtagatgaatggccgtaaaatggtttggtctgcgtctctttacatataaccaaataaaaactcagataaagttaactcatgtggtggtctatgttgagatgatgcgggtaaccaatcgaacggttaacaaattcaggtcgtatgtatatcctggtttacagttagtgtttcctaagtgcatttgtagattatagagctgtcaagattgaacgatacatctgtaaggtgttacaaatgctaaatgctaatcctgattttgtggctgatgctaaaaacctgtggactcttaattaccacagactgaactttccctcattttggcccaacaaatacaatagcagaggaagagtttcagttgga

SEQ ID NO: 10711 - DNA, 6406 bp, Zea Mays
atggagaactgcgagcgaacgataaaggggtttttgacattgaaaaatcttgcatctgttttccttcaacaaggttttgagttctacgataatgctcttcactgttacctacaagctgtagagcttgattcaaatgattcagttgtctggaatcatctgggaacactttcttgttcaatgggtttgctgagcgtatcaagatgggcatttgagcaagggcttgtatgcagcccaaacaactggaactgcatggagaaattgttggaggtgcttatatcaattcgtgatgaagtcgcatgcctttctgtagcaaatttaatacttaatagttggccatcacatcatcgtgctttacatgtgaagaagaccattgaatgtgctgaaccggtaccttttgcacctcgtggtattgacatacttgaacccaagcatgcaaaactcatcttttcgaataaaagaaaatccgttgatgatgaaatctgtcaagaaatagggacaaagaagagtaaacacagtgctacattgcaattgaatgaagcaaaatggttggcccttttagatggtatcctaagcttaataagtgcaaacaccgagaaggctggtgaatataattgctcaaatactgttgataggtgttcaatcagtgagggtagtgccaaggggcttgcttataacattatagacgttgtcatatctacagatacattgaaaagtgtggaaactgctggtggaaatggaaatgattctcaccatggtgagattctgccatatgattgcaaagctacagttaaagagaaagatggtaattcagatagggaacatccccatgaaagacggagcacacgccttgagaggctgcgaagtcgcaaatctggaaaagatgaaaatggatctgatggtaaagatatatcccatgctatgacccagtttctagaatcatttattctaaaaggaccaagccctgtagaaaaggcttattgttctggaaatgccgatgcttcaaatcctgatactcataactatacatccaacgaggaggcaaatgatcttaagcaatttctatgcaagatatccaagaattttggccctcatcacattggttatatgttacttgaggagatggctcatctcaaagtgccattccaagattattttgtcaagttaattgaactggacaaacttactagaggctgggctgaagacagatctgcatcgtgcaatttatttctagctgaactgtactatgatcgggctttgtgttctggaagtccaccaacatcttctgagctgtctgattcatcttaccatctttgtaagatcattgaatcagtagctctggaactgccattcaacatatctgttagagaaatacattccaccaacttggatacggaaagtagcaggacaggtgaatcttcaagtgaattaatcgagagaagtcatgaaaatggtcacatcaacatgcttaatgaccaaaagtccaaacatgattcttcttcaaacatgaattgtgcattctggattcgcttcttctggctgagtggttgcctgtccctttcatcagactgcaaagagaaagcttataaggagttcaatattgccctgtcaatactaaaaaatagcaacaaaactaaaagctatggagaggtcattcttctacctcacaccaaacttgtaaaatcacttacaactgacaggattcttcgtgaaatcaacttgatcaggcttgaatctctactttggaataatgatgagaatatcaacaaaataactcatacagagttcatgcagttgctacctccacttttgctttccaccaaagatgcctacgttggaaatgcatatggtccacaaagagaaagcgagaatgttatttcacttgagttgtctgccttggatgtcttaatatctgcatgtgaaaaagcaaaaccaatgaacatccaggtatatcttgactcccatcgaagaaaaattcaagttctaactgtggcagccggcatggttggatctgtcacacccctgaaagcgaaaggttcaagcaatgtggaatttgtggaagcaatgaacaggaaccggctagaaaatgttgtggaagcagtcaaagatgtgtctcgaaatgccagtaaagcaaaagacataatcgatcaatgcgataattccgtaccaagtatcactattgtgttaattcataagtatatcagtcaaggttatcaagtcgataagtcgagtcgagtcgacaaggcgtccattaagcgtcgccttagcgtcgctttagcgctaaggcgtgctcacagggcaagacgtctagctcgccttccgccgtggcgtaaggcgtccgccgcggcacaatgcgtccgctgcggcgatgggcaagatggctggagcccactaatgtctatcgttggtgatattcaatcattgctcttgacaatcatgtgtgctgctgtcaagataatactatcgagaaaactctcatgctctggaacctcctatcaggttgaccacttggaatgttcctgtctcatagatgcagccattgcattttgcaagctccagcaccttgatcctacaatatccatcaaaactcaggttgacttaattgttgcagtccatgatttgcttgctgagtatgggctctgttgtgctggaagagatggtgaaggggaggaagggatgttcctaaagttcgcaatcaaacatctcatggctctagatgtgaaactaaaatctcaactcaattcaaatgggatggaagaagatgcagttccaaaagacgtcagagcagaagacagtgtggccgatgaaccatcggttagtgacaataagcagaactccgatgatgaggaagaatcggagttagatgagattcagtcatgtcttgatagtgccttggaccaggcttttttctgcctgtatggtttgaagatcaacccagattcttgcagtgaagatgatctcgctgtacataaaaatacaagccgcggtgattatcaaaccaaagaacagtgtgctgatgtgtttcaatatgtcctgccatatgcaaaagctctatctaaaactggcttggttaaattacggagagtgctgcgggctatacgtaaacactttccgcagccaccttatgacttatttgttaacaaccctattgataatttcttggatggacctgactcatgtgaaaaaatactctctgaaatttgtgaaagcaatgaatctagggaagctatcctgaatgtattgttcccaggtgaaagaggctatgaagcattcaaaaaactctccactgccagctctgagccttattcagatgtttatgagaacttatattatttcatagctcaagccgaagatattagtgccaccgacaagcatacaggttttgttttgaaaaaggaaggagaagaattcgttgaacagagtgccaatattttcaagtatgatttgttgtacaatccattgcggtttgaaagctggcagaagctttccaatctttatgatgaggtggaagttgatctgttgctcaatgatggtagtaaacatataagcatcttggattggcgaacaaacacggatttaatcagaagggttgagatgggccgtcgacatagtcgacgctgcctattgatgagttcactactggccaaaactgcccctgagcagagcgaggcacatgaactgttggctcttgtgtactacgatagccttcaaaatgtggtgcctttttatgatcaaagagctactttgccagtgaaggattcatcatgggagacattttgtaaaaattctatgaagcactttgagaaggcttttgaaatcaaggagcagtggcttcatgcgttttaccttgggaaactgtgtgagaaactggggcattctttttctaaggcattatcatactacaacaaagccatgatgctgaatccaactgcagtcgaccctgtttacaggattcatgcatcacgcttgaagttactttacactcaaggcaaacagaatcttgaagctatacaggacttcatcttggatgcaattgtgggttgagaacaccctttacgcctttcatcaactacatcttcaggttgttgctgactacacatataaccagtcaacaaaagaaaatgtcttgagcatgctggggtcaatgactaaggttttgcagtcatcttctgataaaacatctttagacactaaagaggaaaataagttttttgagtccgatatactggataaagtgtggcacatcctttatgatgattgtctgtatgctcttggtacttgtgtggaaggggaactcaagcatttccacaaggcgagatacaagcttgcgcaaggatattatagaagaggtgaagcaggggacctggaacgggctaaggaagagctctcgttctgtttcaaatcttctcggtcttcctttacagtaaacatgtgggagattgatggcactgttagaaaaggaaggaggaaaaatccaaatgtgggtggatccagaaagaatctggaggtcagtttgtcagaaagttcacggaaattcattacgtgcattagaaaatatatgatactctatttaaacctgctggagaagaacacggacctgtggactcttgagaaggcttatacttatctgcgaacagataagaggtttgcattgtgtttaggtgatattgttcctgttggtcttgggaagtatattctagttctaacggcagcaattcataatcctgagattcgtcgagcttctggtgatgcttctgttgagcaattacttgagaaaatgttcactgtattcatggatcatgcgaacatgtgggctgatataagcaatataccagaggtgaacagtccagaattatcagaaagcaatctttacagctatatccaccagtacatccatttgctcgagagtgatgtacgactagatgttctagaaggactaaacgagaagataagaaagcgtttcaagacaccgaagttatcaaatagtaacttcgctaagatatgcaagcatgcttctctggcatggtgccggtgtattctcatcaaactggcctcaatcactccactgcctgaatccgcagatgcaaccaatcagcctgcaccattatccaatgggcttctactctatgttgacttgcaacctgatgagcttcttatctcatcccctgatgggcctgctcaattcaaagggcttgacatgaactggtttgagacacttaacagaattaaaaacatcccggtcaagcaaacatccgaagataacttggagactgctgttacgttaatgaagagcacttataacttttatcgggagagcccttgtggaacatttccttcaggtatcaatctctacacggttacaccatcacaagctcctattgaagggctaccgccaaccgctgctgtagttgagacgctcgacttaagtattccaagaaaactccttctgtgggtatacactctggttcatggtcgttactcaaatatatcctccgttgtaaagtattgcgacgagatgaagttaagaagtaaaagaggaaccccagctgcgtctgcttcgtcacaagttgtgcagccagtgtcgcatagtaccgtttcttcccaagttgtatctaaagaaaagagctcccaagttgaacccgctgaagcagcacaaaatccttctgatctagctgccacttgcgttcctgcataccaagaagttggtggtgctagtgcctcgcaaagtgccattgaggcccagaaagctactgctgcggcatctcagctcactcgcagtggttcatcaagggcaatggaaaatgcacaggacggcggggagaggaagtaacgagatagagttcgattttttttatcctctatgctacatcgtatggatgcatatgatcctgcctgacgattctcaggtctcagctctccgtggctccgtgtgcaaatctctgccacgggcgtgttttaacgcctgattggatggttgcccgctggcgcgcccggccagcctcgtacggccacttcggacgcatctgcatcttcggaggtacccgcagatgtagatgaatggccgtaaaatggtttggtctgcgtctctttacatataaccaaataaaaactcagataaagttaactcatgtggtggtctatgttgagatgatgcgggtaaccaatcgaacggttaacaaattcaggtcgtatgtatatcctggtttacagttagtgtttcctaagtgcatttgtagattatagagctgtcaagattgaacgatacatctgtaaggtgttacaaatgctaaatgctaatcctgattttgtggctgatgctaaaaacctgtggactcttaattaccacagactgaactttccctcattttggcccaacaaatacaatagcagaggaagagtttcagttgga

SEQ ID NO: 10712 - DNA, 6254 bp, Zea Mays
gggcgcaagcggctcccattggccaccggagtcgctctcgttgatggccgcgatggagaactgcgagcgaacgataaaggggtttttgacattgaaaaatcttgcatctgttttccttcaacaaggttttgagttctacgataatgctcttcactgttacctacaagctgtagagcttgattcaaatgattcagttgtctggaatcatctgggaacactttcttgttcaatgggtttgctgagcgtatcaagatgggcatttgagcaagggcttgtatgcagcccaaacaactggaactgcatggagaaattgttggaggtgcttatatcaattcgtgatgaagtcgcatgcctttctgtagcaaatttaatacttaatagttggccatcacatcatcgtgctttacatgtgaagaagaccattgaatgtgctgaaccggtaccttttgcacctcgtggtattgacatacttgaacccaagcatgcaaaactcatcttttcgaataaaagaaaatccgttgatgatgaaatctgtcaagaaatagggacaaagaagagtaaacacagtgctacattgcaattgaatgaagcaaaatggttggcccttttagatggtatcctaagcttaataagtgcaaacaccgagaaggctggtgaatataattgctcaaatactgttgataggtgttcaatcagtgagggtagtgccaaggggcttgcttataacattatagacgttgtcatatctacagatacattgaaaagtgtggaaactgctggtggaaatggaaatgattctcaccatggtgagattctgccatatgattgcaaagctacagttaaagagaaagatggtaattcagatagggaacatccccatgaaagacggagcacacgccttgagaggctgcgaagtcgcaaatctggaaaagatgaaaatggatctgatggtaaagatatatcccatgctatgacccagtttctagaatcatttattctaaaaggaccaagccctgtagaaaaggcttattgttctggaaatgccgatgcttcaaatcctgatactcataactatacatccaacgaggaggcaaatgatcttaagcaatttctatgcaagatatccaagaattttggccctcatcacattggttatatgttacttgaggagatggctcatctcaaagtgccattccaagattattttgtcaagttaattgaactggacaaacttactagaggctgggctgaagacagatctgcatcgtgcaatttatttctagctgaactgtactatgatcgggctttgtgttctggaagtccaccaacatcttctgagctgtctgattcatcttaccatctttgtaagatcattgaatcagtagctctggaactgccattcaacatatctgttagagaaatacattccaccaacttggatacggaaagtagcaggacaggtgaatcttcaagtgaattaatcgagagaagtcatgaaaatggtcacatcaacatgcttaatgaccaaaagtccaaacatgattcttcttcaaacatgaattgtgcattctggattcgcttcttctggctgagtggttgcctgtccctttcatcagactgcaaagagaaagcttataaggagttcaatattgccctgtcaatactaaaaaatagcaacaaaactaaaagctatggagaggtcattcttctacctcacaccaaacttgtaaaatcacttacaactgacaggattcttcgtgaaatcaacttgatcaggcttgaatctctactttggaataatgatgagaatatcaacaaaataactcatacagagttcatgcagttgctacctccacttttgctttccaccaaagatgcctacgttggaaatgcatatggtccacaaagagaaagcgagaatgttatttcacttgagttgtctgccttggatgtcttaatatctgcatgtgaaaaagcaaaaccaatgaacatccaggtatatcttgactcccatcgaagaaaaattcaagttctaactgtggcagccggcatggttggatctgtcacacccctgaaagcgaaaggttcaagcaatgtggaatttgtggaagcaatgaacaggaaccggctagaaaatgttgtggaagcagtcaaagatgtgtctcgaaatgccagtaaagcaaaagacataatcgatcaatgcgataattccgatgggcaagatggctggagcccactaatgtctatcgttggtgatattcaatcattgctcttgacaatcatgtgtgctgctgtcaagataatactatcgagaaaactctcatgctctggaacctcctatcaggttgaccacttggaatgttcctgtctcatagatgcagccattgcattttgcaagctccagcaccttgatcctacaatatccatcaaaactcaggttgacttaattgttgcagtccatgatttgcttgctgagtatgggctctgttgtgctggaagagatggtgaaggggaggaagggatgttcctaaagttcgcaatcaaacatctcatggctctagatgtgaaactaaaatctcaactcaattcaaatgggatggaagaagatgcagttccaaaagacgtcagagcagaagacagtgtggccgatgaaccatcggttagtgacaataagcagaactccgatgatgaggaagaatcggagttagatgagattcagtcatgtcttgatagtgccttggaccaggcttttttctgcctgtatggtttgaagatcaacccagattcttgcagtgaagatgatctcgctgtacataaaaatacaagccgcggtgattatcaaaccaaagaacagtgtgctgatgtgtttcaatatgtcctgccatatgcaaaagctctatctaaaactggcttggttaaattacggagagtgctgcgggctatacgtaaacactttccgcagccaccttatgacttatttgttaacaaccctattgataatttcttggatggacctgactcatgtgaaaaaatactctctgaaatttgtgaaagcaatgaatctagggaagctatcctgaatgtattgttcccaggtgaaagaggctatgaagcattcaaaaaactctccactgccagctctgagccttattcagatgtttatgagaacttatattatttcatagctcaagccgaagatattagtgccaccgacaagcatacaggttttgttttgaaaaaggaaggagaagaattcgttgaacagagtgccaatattttcaagtatgatttgttgtacaatccattgcggtttgaaagctggcagaagctttccaatctttatgatgaggtggaagttgatctgttgctcaatgatggtagtaaacatataagcatcttggattggcgaacaaacacggatttaatcagaagggttgagatgggccgtcgacatagtcgacgctgcctattgatgagttcactactggccaaaactgcccctgagcagagcgaggcacatgaactgttggctcttgtgtactacgatagccttcaaaatgtggtgcctttttatgatcaaagagctactttgccagtgaaggattcatcatgggagacattttgtaaaaattctatgaagcactttgagaaggcttttgaaatcaaggagcagtggcttcatgcgttttaccttgggaaactgtgtgagaaactggggcattctttttctaaggcattatcatactacaacaaagccatgatgctgaatccaactgcagtcgaccctgtttacaggattcatgcatcacgcttgaagttactttacactcaaggcaaacagaatcttgaagctatacaggacttcatcttggatgcaattgtgggttgagaacaccctttacgcctttcatcaactacatcttcaggttgttgctgactacacatataaccagtcaacaaaagaaaatgtcttgagcatgctggggtcaatgactaaggttttgcagtcatcttctgataaaacatctttagacactaaagaggaaaataagttttttgagtccgatatactggataaagtgtggcacatcctttatgatgattgtctgtatgctcttggtacttgtgtggaaggggaactcaagcatttccacaaggcgagatacaagcttgcgcaaggatattatagaagaggtgaagcaggggacctggaacgggctaaggaagagctctcgttctgtttcaaatcttctcggtcttcctttacagtaaacatgtgggagattgatggcactgttagaaaaggaaggaggaaaaatccaaatgtgggtggatccagaaagaatctggaggtcagtttgtcagaaagttcacggaaattcattacgtgcattagaaaatatatgatactctatttaaacctgctggagaagaacacggacctgtggactcttgagaaggcttatacttatctgcgaacagataagaggtttgcattgtgtttaggtgatattgttcctgttggtcttgggaagtatattctagttctaacggcagcaattcataatcctgagattcgtcgagcttctggtgatgcttctgttgagcaattacttgagaaaatgttcactgtattcatggatcatgcgaacatgtgggctgatataagcaatataccagaggtgaacagtccagaattatcagaaagcaatctttacagctatatccaccagtacatccatttgctcgagagtgatgtacgactagatgttctagaaggactaaacgagaagataagaaagcgtttcaagacaccgaagttatcaaatagtaacttcgctaagatatgcaagcatgcttctctggcatggtgccggtgtattctcatcaaactggcctcaatcactccactgcctgaatccgcagatgcaaccaatcagcctgcaccattatccaatgggcttctactctatgttgacttgcaacctgatgagcttcttatctcatcccctgatgggcctgctcaattcaaagggcttgacatgaactggtttgagacacttaacagaattaaaaacatcccggtcaagcaaacatccgaagataacttggagactgctgttacgttaatgaagagcacttataacttttatcgggagagcccttgtggaacatttccttcaggtatcaatctctacacggttacaccatcacaagctcctattgaagggctaccgccaaccgctgctgtagttgagacgctcgacttaagtattccaagaaaactccttctgtgggtatacactctggttcatggtcgttactcaaatatatcctccgttgtaaagtattgcgacgagatgaagttaagaagtaaaagaggaaccccagctgcgtctgcttcgtcacaagttgtgcagccagtgtcgcatagtaccgtttcttcccaagttgtatctaaagaaaagagctcccaagttgaacccgctgaagcagcacaaaatccttctgatctagctgccacttgcgttcctgcataccaagaagttggtggtgctagtgcctcgcaaagtgccattgaggcccagaaagctactgctgcggcatctcagctcactcgcagtggttcatcaagggcaatggaaaatgcacaggacggcggggagaggaagtaacgagatagagttcgattttttttatcctctatgctacatcgtatggatgcatatgatcctgcctgacgattctcaggtctcagctctccgtggctccgtgtgcaaatctctgccacgggcgtgttttaacgcctgattggatggttgcccgctggcgcgcccggccagcctcgtacggccacttcggacgcatctgcatcttcggaggtacccgcagatgtagatgaatggccgtaaaatggtttggtctgcgtctctttacatataaccaaataaaaactcagataaagttaactcatgtggtggtctatgttgagatgatgcgggtaaccaatcgaacggttaacaaattcaggtcgtatgtatatcctggtttacagttagtgtttcctaagtgcatttgtagattatagagctgtcaagattgaacgatacatctgtaaggtgttacaaatgctaaatgctaatcctgattttgtggctgatgctaaaaacctgtggactcttaattaccacagactgaactttccctcattttggcccaacaaatacaatagcagaggaagagtttcagttgga

SEQ ID NO: 10713 - DNA, 6122 bp, Zea Mays
cctgagcttctttggtgggcgcaagcggctcccattggccaccggagtcgctctcgttgatggccgcgatggagaactgcgagcgaacgataaaggggtttttgacattgaaaaatcttgcatctgttttccttcaacaaggttttgagttctacgataatgctcttcactgttacctacaagctgtagagcttgattcaaatgattcagttgtctggaatcatctgggaacactttcttgttcaatgggtttgctgagcgtatcaagatgggcatttgagcaagggcttgtatgcagcccaaacaactggaactgcatggagaaattgttggaggtgcttatatcaattcgtgatgaagtcgcatgcctttctgtagcaaatttaatacttaatagttggccatcacatcatcgtgctttacatgtgaagaagaccattgaatgtgctgaaccggtaccttttgcacctcgtggtattgacatacttgaacccaagcatgcaaaactcatcttttcgaataaaagaaaatccgttgatgatgaaatctgtcaagaaatagggacaaagaagagtaaacacagtgctacattgcaattgaatgaagcaaaatggttggcccttttagatggtatcctaagcttaataagtgcaaacaccgagaaggctggtgaatataattgctcaaatactgttgataggtgttcaatcagtgagggtagtgccaaggggcttgcttataacattatagacgttgtcatatctacagatacattgaaaagtgtggaaactgctggtggaaatggaaatgattctcaccatggtgagattctgccatatgattgcaaagctacagttaaagagaaagatggtaattcagatagggaacatccccatgaaagacggagcacacgccttgagaggctgcgaagtcgcaaatctggaaaagatgaaaatggatctgatggtaaagatatatcccatgctatgacccagtttctagaatcatttattctaaaaggaccaagccctgtagaaaaggcttattgttctggaaatgccgatgcttcaaatcctgatactcataactatacatccaacgaggaggcaaatgatcttaagcaatttctatgcaagatatccaagaattttggccctcatcacattggttatatgttacttgaggagatggctcatctcaaagtgccattccaagattattttgtcaagttaattgaactggacaaacttactagaggctgggctgaagacagatctgcatcgtgcaatttatttctagctgaactgtactatgatcgggctttgtgttctggaagtccaccaacatcttctgagctgtctgattcatcttaccatctttgtaagatcattgaatcagtagctctggaactgccattcaacatatctgttagagaaatacattccaccaacttggatacggaaagtagcaggacaggtgaatcttcaagtgaattaatcgagagaagtcatgaaaatggtcacatcaacatgcttaatgaccaaaagtccaaacatgattcttcttcaaacatgaattgtgcattctggattcgcttcttctggctgagtggttgcctgtccctttcatcagactgcaaagagaaagcttataaggagttcaatattgccctgtcaatactaaaaaatagcaacaaaactaaaagctatggagaggtcattcttctacctcacaccaaacttgtaaaatcacttacaactgacaggattcttcgtgaaatcaacttgatcaggcttgaatctctactttggaataatgatgagaatatcaacaaaataactcatacagagttcatgcagttgctacctccacttttgctttccaccaaagatgcctacgttggaaatgcatatggtccacaaagagaaagcgagaatgttatttcacttgagttgtctgccttggatgtcttaatatctgcatgtgaaaaagcaaaaccaatgaacatccaggtatatcttgactcccatcgaagaaaaattcaagttctaactgtggcagccggcatggttggatctgtcacacccctgaaagcgaaaggttcaagcaatgtggaatttgtggaagcaatgaacaggaaccggctagaaaatgttgtggaagcagtcaaagatgtgtctcgaaatgccagtaaagcaaaagacataatcgatcaatgcgataattccgatgggcaagatggctggagcccactaatgtctatcgttggtgatattcaatcattgctcttgacaatcatgtgtgctgctgtcaagataatactatcgagaaaactctcatgctctggaacctcctatcaggttgaccacttggaatgttcctgtctcatagatgcagccattgcattttgcaagctccagcaccttgatcctacaatatccatcaaaactcaggttgacttaattgttgcagtccatgatttgcttgctgagtatgggctctgttgtgctggaagagatggtgaaggggaggaagggatgttcctaaagttcgcaatcaaacatctcatggctctagatgtgaaactaaaatctcaactcaattcaaatgggatggaagaagatgcagttccaaaagacgtcagagcagaagacagtgtggccgatgaaccatcggttagtgacaataagcagaactccgatgatgaggaagaatcggagttagatgagattcagtcatgtcttgatagtgccttggaccaggcttttttctgcctgtatggtttgaagatcaacccagattcttgcagtgaagatgatctcgctgtacataaaaatacaagccgcggtgattatcaaaccaaagaacagtgtgctgatgtgtttcaatatgtcctgccatatgcaaaagctctatctaaaactggcttggttaaattacggagagtgctgcgggctatacgtaaacactttccgcagccaccttatgacttatttgttaacaaccctattgataatttcttggatggacctgactcatgtgaaaaaatactctctgaaatttgtgaaagcaatgaatctagggaagctatcctgaatgtattgttcccaggtgaaagaggctatgaagcattcaaaaaactctccactgccagctctgagccttattcagatgtttatgagaacttatattatttcatagctcaagccgaagatattagtgccaccgacaagcatacaggttttgttttgaaaaaggaaggagaagaattcgttgaacagagtgccaatattttcaagtatgatttgttgtacaatccattgcggtttgaaagctggcagaagctttccaatctttatgatgaggtggaagttgatctgttgctcaatgatggtagtaaacatataagcatcttggattggcgaacaaacacggatttaatcagaagggttgagatgggccgtcgacatagtcgacgctgcctattgatgagttcactactggccaaaactgcccctgagcagagcgaggcacatgaactgttggctcttgtgtactacgatagccttcaaaatgtggtgcctttttatgatcaaagagctactttgccagtgaaggattcatcatgggagacattttgtaaaaattctatgaagcactttgagaaggcttttgaaatcaaggagcagtggcttcatgcgttttaccttgggaaactgtgtgagaaactggggcattctttttctaaggcattatcatactacaacaaagccatgatgctgaatccaactgcagtcgaccctgtttacaggattcatgcatcacgcttgaagttactttacactcaaggcaaacagaatcttgaagctatacaggttgttgctgactacacatataaccagtcaacaaaagaaaatgtcttgagcatgctggggtcaatgactaaggttttgcagtcatcttctgataaaacatctttagacactaaagaggaaaataagttttttgagtccgatatactggataaagtgtggcacatcctttatgatgattgtctgtatgctcttggtacttgtgtggaaggggaactcaagcatttccacaaggcgagatacaagcttgcgcaaggatattatagaagaggtgaagcaggggacctggaacgggctaaggaagagctctcgttctgtttcaaatcttctcggtcttcctttacagtaaacatgtgggagattgatggcactgttagaaaaggaaggaggaaaaatccaaatgtgggtggatccagaaagaatctggagaacacggacctgtggactcttgagaaggcttatacttatctgcgaacagataagaggtttgcattgtgtttaggtgatattgttcctgttggtcttgggaagtatattctagttctaacggcagcaattcataatcctgagattcgtcgagcttctggtgatgcttctgttgagcaattacttgagaaaatgttcactgtattcatggatcatgcgaacatgtgggctgatataagcaatataccagaggtgaacagtccagaattatcagaaagcaatctttacagctatatccaccagtacatccatttgctcgagagtgatgtacgactagatgttctagaaggactaaacgagaagataagaaagcgtttcaagacaccgaagttatcaaatagtaacttcgctaagatatgcaagcatgcttctctggcatggtgccggtgtattctcatcaaactggcctcaatcactccactgcctgaatccgcagatgcaaccaatcagcctgcaccattatccaatgggcttctactctatgttgacttgcaacctgatgagcttcttatctcatcccctgatgggcctgctcaattcaaagggcttgacatgaactggtttgagacacttaacagaattaaaaacatcccggtcaagcaaacatccgaagataacttggagactgctgttacgttaatgaagagcacttataacttttatcgggagagcccttgtggaacatttccttcaggtatcaatctctacacggttacaccatcacaagctcctattgaagggctaccgccaaccgctgctgtagttgagacgctcgacttaagtattccaagaaaactccttctgtgggtatacactctggttcatggtcgttactcaaatatatcctccgttgtaaagtattgcgacgagatgaagttaagaagtaaaagaggaaccccagctgcgtctgcttcgtcacaagttgtgcagccagtgtcgcatagtaccgtttcttcccaagttgtatctaaagaaaagagctcccaagttgaacccgctgaagcagcacaaaatccttctgatctagctgccacttgcgttcctgcataccaagaagttggtggtgctagtgcctcgcaaagtgccattgaggcccagaaagctactgctgcggcatctcagctcactcgcagtggttcatcaagggcaatggaaaatgcacaggacggcggggagaggaagtaacgagatagagttcgattttttttatcctctatgctacatcgtatggatgcatatgatcctgcctgacgattctcaggtctcagctctccgtggctccgtgtgcaaatctctgccacgggcgtgttttaacgcctgattggatggttgcccgctggcgcgcccggccagcctcgtacggccacttcggacgcatctgcatcttcggaggtacccgcagatgtagatgaatggccgtaaaatggtttggtctgcgtctctttacatataaccaaataaaaactcagataaagttaactcatgtggtggtctatgttgagatgatgcgggtaaccaatcgaacggttaacaaattcaggtcgtatgtatatcctggtttacagttagtgtttcctaagtgcatttgtagattatagagctgtcaagattgaacgatacatctgtaaggtgttacaaatgctaaatgctaatcctgattttgtggctgatgctaaaaacctgtggactcttaattaccacagactgaactttccctcattttggcccaacaaatacaatagcagaggaagagtttcagttgga

SEQ ID NO: 10714 - DNA, 1872 bp, Zea Mays
gccggctgtagaggaggggcggccagcggcgtgctacagaggaggggcggctggctgtagaggaggggcggccagctctgtgctgcagaggaggggcggccgactgcagaggaggggcggcttcaggatgggcaagatggctggagcccactaatgtctatcgttggtgatattcaatcattgctcttgacaatcatgtgtgctgctgtcaagataatactatcgagaaaactctcatgctctggaacctcctatcaggttgaccacttggaatgttcctgtctcatagatgcagccattgcattttgcaagctccagcaccttgatcctacaatatccatcaaaactcaggttgacttaattgttgcagtccatgatttgcttgctgagtatgggctctgttgtgctggaagagatggtgaaggggaggaagggatgttcctaaagttcgcaatcaaacatctcatggctctagatgtgaaactaaaatctcaactcaattcaaatgggatggaagaagatgcagttccaaaagacgtcagagcagaagacagtgtggccgatgaaccatcggttagtgacaataagcagaactccgatgatgaggaagaatcggagttagatgagattcagtcatgtcttgatagtgccttggaccaggcttttttctgcctgtatggtttgaagatcaacccagattcttgcagtgaagatgatctcgctgtacataaaaatacaagccgcggtgattatcaaaccaaagaacagtgtgctgatgtgtttcaatatgtcctgccatatgcaaaagctctatctaaaactggcttggttaaattacggagagtgctgcgggctatacgtaaacactttccgcagccaccttatgacttatttgttaacaaccctattgataatttcttggatggacctgactcatgtgaaaaaatactctctgaaatttgtgaaagcaatgaatctagggaagctatcctgaatgtattgttcccaggtgaaagaggctatgaagcattcaaaaaactctccactgccagctctgagccttattcagatgtttatgagaacttatattatttcatagctcaagccgaagatattagtgccaccgacaagcatacaggttttgttttgaaaaaggaaggagaagaattcgttgaacagagtgccaatattttcaagtatgatttgttgtacaatccattgcggtttgaaagctggcagaagctttccaatctttatgatgaggtggaagttgatctgttgctcaatgatggtagtaaacatataagcatcttggattggcgaacaaacacggatttaatcagaagggttgagatgggccgtcgacatagtcgacgctgcctattgatgagttcactactggccaaaactgcccctgagcagagcgaggcacatgaactgttggctcttgtgtactacgatagccttcaaaatgtggtgcctttttatgatcaaagagctactttgccagtgaaggattcatcatgggagacattttgtaaaaattctatgaagcactttgagaaggcttttgaaatcaaggagcagtggcttcatgcgttttaccttgggaaactgtgtgagaaactggggcattctttttctaaggcattatcatactacaacaaagccatgatgctgaatccaactgcagtcgaccctgtttacaggattcatgcatcacgcttgaagttactttacactcaaggcaaacagaatcttgaagctatacaggaatcaggttgttgccgtgacctactgcccacaactgacctggcctggcttttcgtgaacttggcatgttatattagctgtctaacagctgtgggatga

SEQ ID NO: 10715 - DNA, 4041 bp, Zea Mays
caggaatttgcgctctctcagaagtaccatgagggactcctcaagttgcaacaaaaagactatgcaaaagctcgtgaacttctcgaggatgttttaaaggacccactaatatcaaatgttcaggctgataacattggcagtgatcagcatttgctgcagctaaggtttttgacattgaaaaatcttgcatctgttttccttcaacaaggttttgagttctacgataatgctcttcactgttacctacaagctgtagagcttgattcaaatgattcagttgtctggaatcatctgggaacactttcttgttcaatgggtttgctgagcgtatcaagatgggcatttgagcaagggcttgtatgcagcccaaacaactggaactgcatggagaaattgttggaggtgcttatatcaattcgtgatgaagtcgcatgcctttctgtagcaaatttaatacttaatagttggccatcacatcatcgtgctttacatgtgaagaagaccattgaatgtgctgaaccggtaccttttgcacctcgtggtattgacatacttgaacccaagcatgcaaaactcatcttttcgaataaaagaaaatccgttgatgatgaaatctgtcaagaaatagggacaaagaagagtaaacacagtgctacattgcaattgaatgaagcaaaatggttggcccttttagatggtatcctaagcttaataagtgcaaacaccgagaaggctggtgaatataattgctcaaatactgttgataggtgttcaatcagtgagggtagtgccaaggggcttgcttataacattatagacgttgtcatatctacagatacattgaaaagtgtggaaactgctggtggaaatggaaatgattctcaccatggtgagattctgccatatgattgcaaagctacagttaaagagaaagatggtaattcagatagggaacatccccatgaaagacggagcacacgccttgagaggctgcgaagtcgcaaatctggaaaagatgaaaatggatctgatggtaaagatatatcccatgctatgacccagtttctagaatcatttattctaaaaggaccaagccctgtagaaaaggcttattgttctggaaatgccgatgcttcaaatcctgatactcataactatacatccaacgaggaggcaaatgatcttaagcaatttctatgcaagatatccaagaattttggccctcatcacattggttatatgttacttgaggagatggctcatctcaaagtgccattccaagattattttgtcaagttaattgaactggacaaacttactagaggctgggctgaagacagatctgcatcgtgcaatttatttctagctgaactgtactatgatcgggctttgtgttctggaagtccaccaacatcttctgagctgtctgattcatcttaccatctttgtaagatcattgaatcagtagctctggaactgccattcaacatatctgttagagaaatacattccaccaacttggatacggaaagtagcaggacaggtgaatcttcaagtgaattaatcgagagaagtcatgaaaatggtcacatcaacatgcttaatgaccaaaagtccaaacatgattcttcttcaaacatgaattgtgcattctggattcgcttcttctggctgagtggttgcctgtccctttcatcagactgcaaagagaaagcttataaggagttcaatattgccctgtcaatactaaaaaatagcaacaaaactaaaagctatggagaggtcattcttctacctcacaccaaacttgtaaaatcacttacaactgacaggattcttcgtgaaatcaacttgatcaggcttgaatctctactttggaataatgatgagaatatcaacaaaataactcatacagagttcatgcagttgctacctccacttttgctttccaccaaagatgcctacgttggaaatgcatatggtccacaaagagaaagcgagaatgttatttcacttgagttgtctgccttggatgtcttaatatctgcatgtgaaaaagcaaaaccaatgaacatccaggtatatcttgactcccatcgaagaaaaattcaagttctaactgtggcagccggcatggttggatctgtcacacccctgaaagcgaaaggttcaagcaatgtggaatttgtggaagcaatgaacaggaaccggctagaaaatgttgtggaagcagtcaaagatgtgtctcgaaatgccagtaaagcaaaagacataatcgatcaatgcgataattccgatgggcaagatggctggagcccactaatgtctatcgttggtgatattcaatcattgctcttgacaatcatgtgtgctgctgtcaagataatactatcgagaaaactctcatgctctggaacctcctatcaggttgaccacttggaatgttcctgtctcatagatgcagccattgcattttgcaagctccagcaccttgatcctacaatatccatcaaaactcaggttgacttaattgttgcagtccatgatttgcttgctgagtatgggctctgttgtgctggaagagatggtgaaggggaggaagggatgttcctaaagttcgcaatcaaacatctcatggctctagatgtgaaactaaaatctcaactcaattcaaatgggatggaagaagatgcagttccaaaagacgtcagagcagaagacagtgtggccgatgaaccatcggttagtgacaataagcagaactccgatgatgaggaagaatcggagttagatgagattcagtcatgtcttgatagtgccttggaccaggcttttttctgcctgtatggtttgaagatcaacccagattcttgcagtgaagatgatctcgctgtacataaaaatacaagccgcggtgattatcaaaccaaagaacagtgtgctgatgtgtttcaatatgtcctgccatatgcaaaagctctatctaaaactggcttggttaaattacggagagtgctgcgggctatacgtaaacactttccgcagccaccttatgacttatttgttaacaaccctattgataatttcttggatggacctgactcatgtgaaaaaatactctctgaaatttgtgaaagcaatgaatctagggaagctatcctgaatgtattgttcccaggtgaaagaggctatgaagcattcaaaaaactctccactgccagctctgagccttattcagatgtttatgagaacttatattatttcatagctcaagccgaagatattagtgccaccgacaagcatacaggttttgttttgaaaaaggaaggagaagaattcgttgaacagagtgccaatattttcaagtatgatttgttgtacaatccattgcggtttgaaagctggcagaagctttccaatctttatgatgaggtggaagttgatctgttgctcaatgatggtagtaaacatataagcatcttggattggcgaacaaacacggatttaatcagaagggttgagatgggccgtcgacatagtcgacgctgcctattgatgagttcactactggccaaaactgcccctgagcagagcgaggcacatgaactgttggctcttgtgtactacgatagccttcaaaatgtggtgcctttttatgatcaaagagctactttgccagtgaaggattcatcatgggagacattttgtaaaaattctatgaagcactttgagaaggcttttgaaatcaaggagcagtggcttcatgcgttttaccttgggaaactgtgtgagaaactggggcattctttttctaaggcattatcatactacaacaaagccatgatgctgaatccaactgcagtcgaccctgtttacaggattcatgcatcacgcttgaagttactttacactcaaggcaaacagaatcttgaagctatacaggaatcaggttgttgccgtgacctactgcccacaactgacctggcctggcttttcgtgaacttggcatgttatattagctgtctaacagctgtgggatga

SEQ ID NO: 10716 - DNA, 3976 bp, Zea Mays
cacctgagcttctttggtgggcgcaagcggctcccattggccaccggagtcgctctcgttgatggccgcgatggagaactgcgagcgaacgataaaggggtttttgacattgaaaaatcttgcatctgttttccttcaacaaggttttgagttctacgataatgctcttcactgttacctacaagctgtagagcttgattcaaatgattcagttgtctggaatcatctgggaacactttcttgttcaatgggtttgctgagcgtatcaagatgggcatttgagcaagggcttgtatgcagcccaaacaactggaactgcatggagaaattgttggaggtgcttatatcaattcgtgatgaagtcgcatgcctttctgtagcaaatttaatacttaatagttggccatcacatcatcgtgctttacatgtgaagaagaccattgaatgtgctgaaccggtaccttttgcacctcgtggtattgacatacttgaacccaagcatgcaaaactcatcttttcgaataaaagaaaatccgttgatgatgaaatctgtcaagaaatagggacaaagaagagtaaacacagtgctacattgcaattgaatgaagcaaaatggttggcccttttagatggtatcctaagcttaataagtgcaaacaccgagaaggctggtgaatataattgctcaaatactgttgataggtgttcaatcagtgagggtagtgccaaggggcttgcttataacattatagacgttgtcatatctacagatacattgaaaagtgtggaaactgctggtggaaatggaaatgattctcaccatggtgagattctgccatatgattgcaaagctacagttaaagagaaagatggtaattcagatagggaacatccccatgaaagacggagcacacgccttgagaggctgcgaagtcgcaaatctggaaaagatgaaaatggatctgatggtaaagatatatcccatgctatgacccagtttctagaatcatttattctaaaaggaccaagccctgtagaaaaggcttattgttctggaaatgccgatgcttcaaatcctgatactcataactatacatccaacgaggaggcaaatgatcttaagcaatttctatgcaagatatccaagaattttggccctcatcacattggttatatgttacttgaggagatggctcatctcaaagtgccattccaagattattttgtcaagttaattgaactggacaaacttactagaggctgggctgaagacagatctgcatcgtgcaatttatttctagctgaactgtactatgatcgggctttgtgttctggaagtccaccaacatcttctgagctgtctgattcatcttaccatctttgtaagatcattgaatcagtagctctggaactgccattcaacatatctgttagagaaatacattccaccaacttggatacggaaagtagcaggacaggtgaatcttcaagtgaattaatcgagagaagtcatgaaaatggtcacatcaacatgcttaatgaccaaaagtccaaacatgattcttcttcaaacatgaattgtgcattctggattcgcttcttctggctgagtggttgcctgtccctttcatcagactgcaaagagaaagcttataaggagttcaatattgccctgtcaatactaaaaaatagcaacaaaactaaaagctatggagaggtcattcttctacctcacaccaaacttgtaaaatcacttacaactgacaggattcttcgtgaaatcaacttgatcaggcttgaatctctactttggaataatgatgagaatatcaacaaaataactcatacagagttcatgcagttgctacctccacttttgctttccaccaaagatgcctacgttggaaatgcatatggtccacaaagagaaagcgagaatgttatttcacttgagttgtctgccttggatgtcttaatatctgcatgtgaaaaagcaaaaccaatgaacatccaggtatatcttgactcccatcgaagaaaaattcaagttctaactgtggcagccggcatggttggatctgtcacacccctgaaagcgaaaggttcaagcaatgtggaatttgtggaagcaatgaacaggaaccggctagaaaatgttgtggaagcagtcaaagatgtgtctcgaaatgccagtaaagcaaaagacataatcgatcaatgcgataattccgatgggcaagatggctggagcccactaatgtctatcgttggtgatattcaatcattgctcttgacaatcatgtgtgctgctgtcaagataatactatcgagaaaactctcatgctctggaacctcctatcaggttgaccacttggaatgttcctgtctcatagatgcagccattgcattttgcaagctccagcaccttgatcctacaatatccatcaaaactcaggttgacttaattgttgcagtccatgatttgcttgctgagtatgggctctgttgtgctggaagagatggtgaaggggaggaagggatgttcctaaagttcgcaatcaaacatctcatggctctagatgtgaaactaaaatctcaactcaattcaaatgggatggaagaagatgcagttccaaaagacgtcagagcagaagacagtgtggccgatgaaccatcggttagtgacaataagcagaactccgatgatgaggaagaatcggagttagatgagattcagtcatgtcttgatagtgccttggaccaggcttttttctgcctgtatggtttgaagatcaacccagattcttgcagtgaagatgatctcgctgtacataaaaatacaagccgcggtgattatcaaaccaaagaacagtgtgctgatgtgtttcaatatgtcctgccatatgcaaaagctctatctaaaactggcttggttaaattacggagagtgctgcgggctatacgtaaacactttccgcagccaccttatgacttatttgttaacaaccctattgataatttcttggatggacctgactcatgtgaaaaaatactctctgaaatttgtgaaagcaatgaatctagggaagctatcctgaatgtattgttcccaggtgaaagaggctatgaagcattcaaaaaactctccactgccagctctgagccttattcagatgtttatgagaacttatattatttcatagctcaagccgaagatattagtgccaccgacaagcatacaggttttgttttgaaaaaggaaggagaagaattcgttgaacagagtgccaatattttcaagtatgatttgttgtacaatccattgcggtttgaaagctggcagaagctttccaatctttatgatgaggtggaagttgatctgttgctcaatgatggtagtaaacatataagcatcttggattggcgaacaaacacggatttaatcagaagggttgagatgggccgtcgacatagtcgacgctgcctattgatgagttcactactggccaaaactgcccctgagcagagcgaggcacatgaactgttggctcttgtgtactacgatagccttcaaaatgtggtgcctttttatgatcaaagagctactttgccagtgaaggattcatcatgggagacattttgtaaaaattctatgaagcactttgagaaggcttttgaaatcaaggagcagtggcttcatgcgttttaccttgggaaactgtgtgagaaactggggcattctttttctaaggcattatcatactacaacaaagccatgatgctgaatccaactgcagtcgaccctgtttacaggattcatgcatcacgcttgaagttactttacactcaaggcaaacagaatcttgaagctatacaggaatcaggttgttgccgtgacctactgcccacaactgacctggcctggcttttcgtgaacttggcatgttatattagctgtctaacagctgtgggatga

SEQ ID NO: 10717 - DNA, 2604 bp, Zea Mays
ggatggaataatttcaagagcccacgcaggccgttgagtgcaatctgttcggagcagataagatgggcgccaagcccacgagccgaagttatcaaacgcagcactcgccagtcgccaccccgatgctactggtgcgcgccccgccgtctcccgcgccgctctcggcggcggccaatttcccggctgatctggagcgcccccttcgccttcgcggtctgtcctcttcccgtgccggcgttactacggccactgccacggcgaagccggcggcttcctccctgggcgggcaaaagcgcaagcaggtgacgagcgtggcgaacccgctggtgaagcactgcgtcaagctccggctctccgccgcgtaccgacgctcctgccgccgcctcctcctcgtcggcctcgcgcctatcctggaggtgtgtagttttgagctcgaagccatcgattacttgcttctcctggacggcgtagaggccccagaggcgctgcgcgagttctctggtgatatattgtatgtcagcgccgcggtgatgaagaaggtgtccgggatgcagtcggttgattccaccgaggcggttgctgtcatgcacatgcctaaccatttccgcgatctcgggagccatcaggatggggatgctcttgatggtttgttcagttatccaaagaggattctagtccttgatgggattcaggatcctggcaaccttggaacactgataagatcagcttgtgcattcaaatgggatggagtattccttcttccggcttgttgtgatcctttcaatgaaaaggctattcgagcagctcgtggagcctctttgcagcttcctattgtctctggtacgtggcatgacctgcatgcattggtgacaaagtatcgtatgaagatgatggcagggcatccagaaagtagcagtgatgcatccaaagaaacctactcgctgtccaacgaactagctgattcactgttgaatgagtctctgtgcttagtgttaggaagtgagggcaatggtctctctgcagagaccctccaggcatgtgagcttgtaaacattccaatggaagtggccaagtgctgcaagggctgaattccattgtcagcttggaactgcaccacccatcaggtgctttcaaggagagttaatcgtaaaaggacttgaagtacaaagacactccgtaaaaaagtgctggaccaacccattctatgctggtaggttcagcggatgccacatgagttcttctgtcaaaccaaacaccctgtttgtatttcttgtttgttcctgatcttttttttgttcagttaaatttaagagaaagaaaagaaagtttatatttgcctcaactatttagtcattgtgggctgaattctataggacgatgtagcctttcaaaacttgacttctagaaagaatatatgtagtgattgtagttgcatctgtaatagttcttaattcttgagctgaccagacttagtacacgcaagcaagatcctatacaaggtggtaagacaaaatttgtcagcttccatttctcctaatgctttttgttagtgattctaatgtcattgtgcataaatccctcgtcattttttcctgtgatagtgacagcccttatttccaaattatgcttgtttggtgattagctgccactggaacatcagctacttgtttcagagctaaacttgtacagttccctgcctcctactcaagtgtagttttccctgttgaaatgatcgtgcgttttcaacttggatctcacatgtgcacaagtacaaaccgagagcagtgatgggccaatcatattcaggtacgtaaataaaatatctactaggctttggcatgtcgtcacagctacagttcattcttattaaaaaatagtaggggacctagatgcttcagatcgtgctgcttcattattcatgtctctatatgtagatgtaggcctttatttatgaaagaagttttcatgcgtatagcactcgttatcttaaccaacattatcactctgcctatgccaatataggcaagttgttgttgtcgtgtccagtggccagcgcgcgacggtgcatgttttctcgtgaaactgtgtaggtatctttgccctgtcaatgccaatgcccatggactcatacaattgcctttctgactctgaatcacgcaggtttggtgttcctgcaacgcatgccattgctttcggtccttttggtgttttgcagtgtgctggaaagggattgggtttggtggtgttgatagatctgtgatcatctatatataatagcattgggtggccactgattggtgcatcactcagctgaattaagcactgccaggctggaatctgggtaaactgtgcgtcattccaaattaaagcgaggctctagtgggaaggagaagggaactcatgtcggtggctctaagtggaaaggaaaccaatgcaacttgtctgtcatatatagagtcatagagaagattatatttactcagttgtttgtttggcccactaaactgtcagggcttccaaaagactctgggtctgtcagcctgcaaccatgtcctgacccatagaaaaaaataaatttaagttttgacaattgttctttgaatt

SEQ ID NO: 10718 - DNA, 3676 bp, Zea Mays
ggatggaataatttcaagagcccacgcaggccgttgagtgcaatctgttcggagcagataagatgggcgccaagcccacgagccgaagttatcaaacgcagcactcgccagtcgccaccccgatgctactggtgcgcgccccgccgtctcccgcgccgctctcggcggcggccaatttcccggctgatctggagcgcccccttcgccttcgcggtctgtcctcttcccgtgccggcgttactacggccactgccacggcgaagccggcggcttcctccctgggcgggcaaaagcgcaagcaggtgacgagcgtggcgaacccgctggtgaagcactgcgtcaagctccggctctccgccgcgtaccgacgctcctgccgccgcctcctcctcgtcggcctcgcgcctatcctggaggtgtgtagttttgagctcgaagccatcgattacttgcttctcctggacggcgtagaggccccagaggcgctgcgcgagttctctggtgatatattgtatgtcagcgccgcggtgatgaagaaggtgtccgggatgcagtcggttgattccaccgaggcggttgctgtcatgcacatgcctaaccatttccgcgatctcgggagccatcaggatggggatgctcttgatggtttgttcagttatccaaagaggattctagtccttgatgggattcaggatcctggcaaccttggaacactgataagatcagcttgtgcattcaaatgggatggagtattccttcttccggcttgttgtgatcctttcaatgaaaaggctattcgagcagctcgtggagcctctttgcagcttcctattgtctctggtacgtggcatgacctgcatgcattggtgacaaagtatcgtatgaagatgatggcagggcatccagaaagtagcagtgatgcatccaaagaaacctactcgctgtccaacgaactagctgattcactgttgaatgagtctctgtgcttagtgttaggaagtgagggcaatggtctctctgcagagaccctccaggcatgtgagcttgtaaacattccaatggaaggtacttttgaatctctgaatgtttcagttgcaggtggtatatttttgttcatgttacaacccaaaggtcaaatagacagaacttcaaccccttagatttgcgtctgttattctgtttcttttgctgttatcttgttaacttttctttgttttcatttctctggttgttggtttctatgtttaccgttaatgctgattcaaagtaaaggaacattttgtttaatccagtttaccttttgagtgatgagaaacataacgtaaagaaaaatgaatctgatgacctgttactcatggaacttcttactaattactatgatagcatggtgtagtttcactggctctttaataaatgaagaattctgggagtattgattgattattaacactctgatgagactgtctggcattacatagaatacagaaatggttagaggcttaaagcgtaatggttaaggtttccgagtattatatcaaggagagatcgaaacatggtgccggccaagaaaacccccgaaccctggccctcatcactaatgggccgatcaactgcccattctgcaacggtccagccagagggcggcgcacaggatatcgatccccgagaggggcggggcacagcgaggggattttttaaccaaacccgaaattcgcccctgagggggattgaatccgggacctggaggtgctactccgaagccttaaccattacgttagaggccctttcgcattcacatagctgaaaggctggcatggtatcgtagatacaccatacacgccttctcagttgggtttttgttaatgtcaaatgtatctacataacatgacctggtatcatgcctgcaccacaatgacatctttcacatgatttattacaagatcttccatgatccaccactgctgacctgatatggtgctgccctaaaataaaacacactatcaacttctattggtgtcatttcaacttactttggccttagttagttggtgctcagaaggaatgcttttaggtgaaagcttgttttgttagcaggtaaaagcatcctgactcataagcaatctggatttgctatggtaatagatgtgtgcttctacatgtctgtcgctcactgaaaatggtagtgctcctttttattcatatcttcttttggtagatcaacatctttcaagtggtcttgtttggccaattgatatagagttttttgtgcatatacaattgttattatgcccttttttttatacttgaatagttattgtttatatattttcatggtaaatagtatgaccactcagtttcaacttctccttggtctctttaatttttttgttcatttggagtttatctacacaatctgaagaaacattctttggtggttggtggcatggacaaatggcatgatcagtggccaagtgctgcaagggctgaattccattgtcaggtggatcaccatatctacattgtgctcttttgctggccactgaggagatgaaatattggagtttggcaggagctaagggaataggagatttcgtttctaactagccctttcatagatgcttaggtgtttgaggtcgaggttgtgtcctattgggttggcatatatatagttttttcttctttaattaatacagcgatatgcaattcccttgcgtgttcgagaatgcattttttttcctttttaagtatttgtttgattgcttcaatgctttctatttatacacaataagtacaacagatttgtatatggtggtggtaaactgcccatcttacacttctttcatttttgaagaaatgctattgtattgtcataatattgacaattaatgtttttaaatccctttcttgtctcgggaactatttgaatggcaatgagaactgctagtgcatttcttgtcttgtctgctgcaactggaaacaaatagccctttctcttacttgtatagaggacatgccctatgtttggtatgctgagctaccacccactagggtgtctaggtacaagtaatcaaacacatatttatacacaacatgtactgtactgaaagattatagagtctgccacatagctacatcacagcatccccatgactttgcctccaaagtactaatgggatctgtgctgacacctgacaagggcatccttatgtaagcaaagataaagcaaagtttgatccatgcgctggcttgcactgcataacatcaaagtgttggataaagcaacaaaacactacttgtggttgttatctgaacaaaccattctgggaacatgactctctactgctttactgctgtgtcggtttgctttttatctattagtatttaaacaggttgttcagattctgtcttaggtgattcaagcactagttagtaacatcctcaacaagttagccattaggaaactcattgcaaaccttacacagttccgctttctttcataataatggattcaaatggtttaggtgtttagcttatacttatatattccaatactgtttatgacttacataatctaaaagaatgactgagactttgaagatttgcttatcccaaacaaatactagttacctaaggccatttgtatgtcactctccctgttccaaagtatagatcattt

SEQ ID NO: 10719 - DNA, 1162 bp, Zea Mays
aaattaagggcaagcttattcttttgtgtaaaagctaacaccgttagtggacttaacagaatagggcaaaatctattttcgttttaaagtcgtaagaggaaaatcacaaagtaaaaaaaaggataaagtcaccatttagcttcaaaacattggtatagagactgtggtccccgtggtctacggcgcacctccaccaccgtgggtgcctccaccaccatgggtgcacacagagatcaccggcgagaagccggaggacgcaaggaacacatgattgtaacaattatgtttctctattctttcttacccccattatccttattaaaaaatgtttaagtaccttgctaagcaggccaacatggtcgccaattcacccacttagcccgtacaacccactcagttacaaccgattctaaaatgaaaacatacttcacttctcgtgctccctttccgacgccgatgcttccctcctttactagaagttgcctcatggatccacctcagtgctgacatctttactgcgcgcaagagttgattgcccccaatcaagaacatctggaaaacatgtccccaggacatcaaagtcttcccaggcagtagcatcatgtggtagacgagaccaagcaaccagaacctgattcctgaatcactggtttgttgcccctccgaaccaatcgtcgatccataatgcacaccggatgcactgccaccccagacaagtccaccaattgagaaatatcgaagaagaccggagtatacttggtataaacgtcttgatttgggagacatgaaacattgtgtggatcaacgttgtagctgggagctccaatttgtaagtgactgacccacccactacaacacagtaaagggtccaaaaaacttaaaagcaatctttagatgagcctagttcaccactgaattctgaacatagggttgcagcttcaaaagcacacggcccccacctgaaactctcgatcaagactgtttttgtcagcttggagtttcatgcggtttcgagcgggagatagtctggttttcaatatctcagagtatgccagccattcctaaaacaactcagccacaaatttatcaccttccatcgaaatagcaggagtaacagcaaaaactaggtcataaccatacagagcttggaaaagagaacacc

SEQ ID NO: 10720 - DNA, 1871 bp, Zea Mays
gaacagctgcgactctccacggcaccgaagaggtcacctcccctcatggcctcattacagcgcctcctcccacccacccaagagctcaccttccccgtcctctcgcaccttatcttactcgtttaaatacctgggtttcttctcggggggagagagctagagaaagcgtagagctagtcagagagagagagagagagagagagagagagagagagagagagaggcggggggcgggaggatggctttgctgcagagccagagcctgccaggcattggctgctgcagcagcagcatcgtcttggcacgagcgagggtgcagcagtgtctggcagcggcgtcgcactcacaggcgcccctcctgcaggccaatggcggcagggcgggcctcccctcctcctcctcgatccttaaggctggcaatgcgatcagcttcagccggcggagaaggagagacctgcgcgtcgtcgcggaggcggccacggcggggacggccaaggtcacgccggcctcgtctggcggcgtcagcctcagcgacgtgctctggccttctgccggtgagtctgaagaaacgctggtgcttctgccggtgagctggtttttttaggggccatggctggtgcttctgattccttttcctcttttggtcatttccgaggtatcctagtatatttcatctcttcgatccgatctgctcactgcttgcttttattcacgggctggctcgcccttgtctgaacctctccggtctctgctgtcgccattgccagacgatgacaactattccttgcatatatgtattccagaaaacaaagtagttgttgcacttgcatgcatgctggcaaaccagcgctgagtttttttggttttaacaaaaagtttatttatttacaaagagaaaggccacccctttgatctgttatcatgtgtaatgttgataccatgcaggagcattcctggccatggcggtactggggaaaatggaccagatggtggcgttcaagggagtatccttgacgattgcgccccttggagcagtctgctgcgtgcttttcagcgctccagactcgcctgcggccaagaaatacaatatgttcgtcgcgcagattgcttgcgcggcctttggcgtattagccctctcgttgtttgggcctggctggttagcgagaggcgccgctctttcagcctgcatagcattcatgaccatcacgggtacctcgcatcctccagctgcgagcttgcccctcttgtttatcgatggccccaagtttcacagtttgcagctttggtacgcgcttttccctggagctgcaggctgcatcgtcctttgcttgattgtaagtaaattggacctcacaaacggctttctgaaagaacatgatgcttaggtgcatagaaaatagaacattaaccctcatgccacaatattttgcagcaagaggtggtggtttacctgaagaagaacttcaagttttgactcaagcagcttgacgctatggatttttgtggaagtggtccgattaattattcaatcatgtaacataaattacattgcctgcatttgcgataaagttgtgaaaatgaaggtttactgtctcctgtcttggttaaagaagaaagaagactttccttgataccttgtgctcatcaaaatgcagttgatacaaatgtgtacataccattctcccatcgaataaagtctgacaatttattcctttttccttctggtagcatcaatcctgtaatgtaattgtgcaaagtgaaataaccaggaatactttgtgataacctctggtttatctgaagggagataagatcatttgttctagaacagagttgtagttgcatggacagaacccatagtaacagattgc

SEQ ID NO: 10721 - DNA, 383 bp, Zea Mays
atggcacgactcactcgctcctcattatcaaacagaacagtcagcgaagctaggcgtttgcgcccagctcaacactcccaggatgatgcccctgtgcacctccaccatggctgttgtagtaagagttgccaccgccggagcgaccaccccggcctctgttgtagttcctcggctggtagtatccagattcgtagtagtacccgccagcaccgccacgaccattctggtatccaccacggccattctggtacccgccacctcggccaccacgtcctccacgaccattaggatagcctctcctgctgccaccacgaccaccaccacgctggttctggtaagaccgccgctggatgaattgttggtccttttgctcctgatccttc

SEQ ID NO: 10722 - DNA, 92 bp, Zea Mays
caacaaaaaaaaacacttcgaggccaacgaacaggtcaacaatcacctccaaatgctgcaaaggtccgatagaacatactagtaagtagcag

SEQ ID NO: 10723 - DNA, 517 bp, Zea Mays
tctcgaattctccaaacgcgcggagccgctcgagaatctgctccattggagaagagaacgccttcttctccatgacacagacgccaatggtgatcctaccggcgccgccattaccctccatcaccaccattgcggcccgcccctgtcctggcctcctccgcccccgatctgtcccacagcccgcgcacgcgaatccgacgagatttcccacgattttgatgccgggaggataagaggcgtttggtcgggggagttcgggaaggggaggcggcgagaggcgtgcgtgttgcacacaactctccctctcctcttagctgcggcggcgttcgggtcagggtacgggattggcggtctcgtctcgtgcgagtgcgatgcgatgggcgggcgccgagcggcttcgagcggcgcgacggcagatgtggagcggttcttatcggctccagtgtgggctgggcgctggggctgtatgtgccgaccggggttgcagttggaagaatccacgaaacatcaagtttga

SEQ ID NO: 10724 - DNA, 813 bp, Zea Mays
aatctcgaattctccaaacgcgcggagccgctcgagaatctgctccattggagaagagaacgcctgaagaaaagaagaattgagaacttgatcagacgaggacatgttccggaggcaataacgaagctcccgcatcccgcattctttgagaaatccaggagcaagagccggccaatcgagacgtacgcgctggaaatcgagacgcacgcgctggaagagcaagaacgcgaatggatcaataatcaggaagacaagacagcatctagcatccatgtgttcgcgagaatccgtgaaccaccaaggagaagaaaacgagagaaaaaaaaactcaagaaaccagagagtcaagatcccgaccttcttctccatgacacagacgccaatggtgatcctaccggcgccgccattaccctccatcaccaccattgcggcccgcccctgtcctggcctcctccgcccccgatctgtcccacagcccgcgcacgcgaatccgacgagatttcccacgattttgatgccgggaggataagaggcgtttggtcgggggagttcgggaaggggaggcggcgagaggcgtgcgtgttgcacacaactctccctctcctcttagctgcggcggcgttcgggtcagggtacgggattggcggtctcgtctcgtgcgagtgcgatgcgatgggcgggcgccgagcggcttcgagcggcgcgacggcagatgtggagcggttcttatcggctccagtgtgggctgggcgctggggctgtatgtgccgaccggggttgcagttggaagaatccacgaaacatcaagtttga

SEQ ID NO: 10725 - DNA, 4396 bp, Zea Mays
  misc_feature (1)..(2): n is a, c, g, or t
nngaattccaagagttggtggaccaagaaggtgccatttttgaaaagtgtgtgaccgctggtggcactactgttgaagatcaagacaaggaaatggagcaatctgcaggtgacgaatcaagagaaaccgaggctgagaatgctgtggaatataacaagaaggtggatcaagaagataccattaacagacaaggtacagctaaggaagacagtggtgtggagccacaagaggagaacgttgtggatccagatcaaggtgtggatgacttttctgtactagatgagggtaatgtggtggcacagtgcaccagtgatcaattgagaacaaccatggaagataatgctgcagagatgcaagaggtggtggagcaagaaggtgccatttttgaaaagggtgtgacctcagatggcattactgttgaagatcaagacaaggaaatggaacaatctgcaggcgatgaatcaagagtgaccaagggtgagaatgctgtgaaagataaaaaggtgtatcaagaagatgccattgacaaacaaggtgcagctgaggatggcagcggtgtgaagtcacaagaggacaacatggtggttccaggtcaatgtacagatggccttcctgtactagatgagggtaatgtggtgccacagtacacaagtgatcaactgagaacaaccacagataacaatgctgcagttgatccagagttggtggagcaagaaggtgttgatagcatagtgggtgcagccaaggttggtattgctgtggaagaatcgcgagaggacatcatggtggaaaagcaagttgaaggtgttcttttacaagatcaagatgaggcagtggagcaatgcaccagtgatcaactgaggacaatcacagatgggaggtgctcatatgggtcatcgtgccacttcaatcatccacggctcaaagcaaaactagaagtttcaagtttcccttccgaacaaagaaatcatgaagctgaatttctggaactgaaccgtgttggcctccccattagagaaggagcaaggaagtgtatctattacatgcgtaatggtacatgcagatatggaaagaaatgttgttttaaccatccagagcaagttcttgatgttcaacgccacactgcaacaggatgggatgatactaacttgcaatcttcaccacactcaaagaagtcacctgaacataaaactatggatgacatatcgtctggatctgaggttcttcctccaaacatacttcggatgcttttacctccccagaatgtgccccctagtacaaaagaaaaggaaatcaggataaaaaaggatcctgattgggcttcagcttcagatgattctgatggctgctgctcggccgatagttcagatgggcctttgtgcaagcaggaacatgaggactatcctgagaggcctgaatgccctttccttcttagatttggtaattgtaagtttgcatcatcatgccaatattaccacccaaaagacaaatttccaagtacctaccatccagaagacaaattccaaagtcgataccatcaaaaagaaaaatcaagtcgacaccatccaaaaaaagagccagcactatcaggagaactgatggtttatcctgacagacctagtgaacctgactgccccttctatgtgaaaactgggtcctgtaaatttggggcaaactgtaagtttcatcacccgaaggatataactccaaacatgcagggtccagcaagtccaaaaaggtcggtcgctgcaaaagagcaccacgcagcagctagagcgacattacaagaccagatgtaccagcaacaaaaattccctgagcggcctggccaaccagattgccggtactacatgcaatttgggaaatgtaaatttcaatcagcttgtatattcaatcattcaaaagacatactttcaagtgggtggcatccagcagaatgcccattctacatgaaaactaggacatgccaatttggatcagcttgtgagttttatcacccaaaagatcggtgctcaggcagagggggagtgattgatggtactgactatggacatgattttgccacgaagtcacggaatgttctgcaggaactggcaatatatcctgaaaggcctgatgaacttgagtgttctcactacatgaagcatggctactgtaaatataagatgaactgcaaatttcatcatccaagagatcgtcttccaaagaaataggaccatttgctacaaccactgttgtaactggctgtcgttgatgagtggagcaagtactgatgatgggacagaaatgcaggaaggaagccatagtcttccttttttgaagagctcgattctactcatgtctatgtcgaatttctgccctagtgtcgttagagttctcgtaccagatgcgaactgcctggtggcttcccaactcccgttcattcatatactaccaaacattgctgtgatctagatctagcccgatgcggtgctaacctgagattgtgggttactgtagctcagtatgcagctcaggtacctgcacttgctcaagattgcgataatgatcagattaaaatagcaggccacgcatattctgcaacttgcgacttttacatcgttgttgagtctcctgggttcagcctctttattgtttttgtttgtgtgcgtgaccatgtgtgtcggactgtcggttgtctcttgggttcagcctcctttcattcagattcgggctccgtttgcatgtcacggcggctttacgacgctataggcatttgcaggtaaactgctgattacgctagggtgctaggcagcatagccccagcaagattgtgatcggcagctccaattaatcccgaagggggtcggctgcactcagccaccacgagagtcatccagggagtcatctgcaaaagggccagaccagctccaaatagcagcccatggctactctgtctagctagggatgacaatttgacacactttttttttttgaaacgaaccagacatgagagctgccgattatattaattaagaagtggtccggaccggactaaacaacaaacaacatgcggttggattgagacatcaacacgccaacaccatacaactcaactcgtcggttggattaggacatcaacacgacaccacactcaccgtcgacatagagtgcccaaacaacacaggcagcggcaaccccacacgagagcacaaaactgctaaaggtcatcgttatcaagcaaagatgcagagcatccaacaactccgactttccaaagcagccaacaggcgaaccaaacaaaaagcagatagacaacccgaagcgaaaggtctcaacaagtcatcgttgccgggctcaggcacaaagcagcttcgacttccaatcttgaccctctgccctgcctccggtttttgcccgaccttcgaaacattctggaccacgaagaagggaggttcgcctcgtgttatcgttgccgagccacatccactgatgtagcagctccgacttcacgttgcaaaacccccacctccactcgcataccaggcaccgagaagcgaagcaacagccgaaggcaaagtcctggccgagacgaacttcagaagcgacgccttcaggaagggagtgacgtcactgtgacgccaccgtcacctgtccgtgatggaccgagctttcacccaaggaagatagcactggggtgtgacgcccttaacaggggaagcgacgcccatgggcgtcaccgtcgccgagactttcgcccaagagcccccagcacaacgtctggccgaaacctcgagacacagcaagctgcctccgccgtcgccggtaccccgacgtaccacacaaatgatgaagattttgggcctgccgccaccaccaccctgcgctagcccgatcgactagccgatgctgccccagacgagaggaggtcccgccactgcaattccggccgactgcgcaggcctgccggcgcaccaacgccgacctccaccccggctcatgcgctagcccgggaccagcctgccgccgcctccgacggatggcatgcggaggccgccaacctcgcgcgccagatccagccctccgcgcatcaggtacgcgagcacacagtccaggcacacctccaacccccgagcagcagcgattgccgtcgcggcacgcaggcgccgccaccgggctagcctcgcgggcgcgcacccagccacaggcccgttgcctgagtgggcggacgccgccaccgtgggttggacgcacgacaaggcagcaagcacccgcccgacgccttcacccctagccgtgcgagcaacccaccagctagctccggcggggagttggcagccacccgagtcgcgagggggcgaagccggggccgaccacgccgacgagcaactcacggtgaccttggcggctgtgcccg

SEQ ID NO: 10726 - DNA, 2394 bp, Zea Mays
ccaagagttggtggaccaagaaggtgccatttttgaaaagggtgtgacctcagatggcattactgttgaagatcaagacaaggaaatggaacaatctgcaggcgatgaatcaagagtgaccaagggtgagaatgctgtgaaagataaaaaggtgtatcaagaagatgccattgacaaacaaggtgcagctgaggatggcagcggtgtgaagtcacaagaggacaacatggtggttccaggtcaatgtacagatggccttcctgtactagatgagggtaatgtggtgccacagtacacaagtgatcaactgagaacaaccacagataacaatgctgcagttgatccagagttggtggagcaagaaggtgttgatagcatagtgggtgcagccaaggttggtattgctgtggaagaatcgcgagaggacatcatggtggaaaagcaagttgaaggtgttcttttacaagatcaagatgaggcagtggagcaatgcaccagtgatcaactgaggacaatcacagatgggaggtgctcatatgggtcatcgtgccacttcaatcatccacggctcaaagcaaaactagaagtttcaagtttcccttccgaacaaagaaatcatgaagctgaatttctggaactgaaccgtgttggcctccccattagagaaggagcaaggaagtgtatctattacatgcgtaatggtacatgcagatatggaaagaaatgttgttttaaccatccagagcaagttcttgatgttcaacgccacactgcaacaggatgggatgatactaacttgcaatcttcaccacactcaaagaagtcacctgaacataaaactatggatgacatatcgtctggatctgaggttcttcctccaaacatacttcggatgcttttacctccccagaatgtgccccctagtacaaaagaaaaggaaatcaggataaaaaaggatcctgattgggcttcagcttcagatgattctgatggctgctgctcggccgatagttcagatgggcctttgtgcaagcaggaacatgaggactatcctgagaggcctgaatgccctttccttcttagatttggtaattgtaagtttgcatcatcatgccaatattaccacccaaaagacaaatttccaagtacctaccatccagaagacaaattccaaagtcgataccatcaaaaagaaaaatcaagtcgacaccatccaaaaaaagagccagcactatcaggagaactgatggtttatcctgacagacctagtgaacctgactgccccttctatgtgaaaactgggtcctgtaaatttggggcaaactgtaagtttcatcacccgaaggatataactccaaacatgcagggtccagcaagtccaaaaaggtcggtcgctgcaaaagagcaccacgcagcagctagagcgacattacaagaccagatgtaccagcaacaaaaattccctgagcggcctggccaaccagattgccggtactacatgcaatttgggaaatgtaaatttcaatcagcttgtatattcaatcattcaaaagacatactttcaagtgggtggcatccagcagaatgcccattctacatgaaaactaggacatgccaatttggatcagcttgtgagttttatcacccaaaagatcggtgctcaggcagagggggagtgattgatggtactgactatggacatgattttgccacgaagtcacggaatgttctgcaggaactggcaatatatcctgaaaggcctgatgaacttgagtgttctcactacatgaagcatggctactgtaaatataagatgaactgcaaatttcatcatccaagagatcgtcttccaaagaaataggaccatttgctacaaccactgttgtaactggctgtcgttgatgagtggagcaagtactgatgatgggacagaaatgcaggaaggaagccatagtcttccttttttgaagagctcgattctactcatgtctatgtcgaatttctgccctagtgtcgttagagttctcgtaccagatgcgaactgcctggtggcttcccaactcccgttcattcatatactaccaaacattgctgtgatctagatctagcccgatgcggtgctaacctgagattgtgggttactgtagctcagtatgcagctcaggtacctgcacttgctcaagattgcgataatgatcagattaaaatagcaggccacgcatattctgcaacttgcgacttttacatcgttgttgagtctcctgggttcagcctctttattgtttttgtttgtgtgcgtgaccatgtgtgtcggactgtcggttgtctcttgggttcagcctcctttcattcagattcgggctccgtttgcatgtcacggcggctttacgacgc

SEQ ID NO: 10727 - DNA, 2067 bp, Zea Mays
  misc_feature (1)..(2): n is a, c, g, or t
nngaattccaagagttggtggaccaagaaggtgccatttttgaaaagtgtgtgaccgctggtggcactactgttgaagatcaagacaaggaaatggagcaatctgcaggtgacgaatcaagagaaaccgaggctgagaatgctgtggaatataacaagaaggtggatcaagaagataccattaacagacaaggtacagctaaggaagacagtggtgtggagccacaagaggagaacgttgtggatccagatcaaggtgtggatgacttttctgtactagatgagggtaatgtggtggcacagtgcaccagtgatcaattgagaacaaccatggaagataatgctgcagagatgcaagaggtggtggagcaagaaggtgccatttttgaaaagggtgtgacctcagatggcattactgttgaagatcaagacaaggaaatggaacaatctgcaggcgatgaatcaagagtgaccaagggtgagaatgctgtgaaagataaaaaggtgtatcaagaagatgccattgacaaacaaggtgcagctgaggatggcagcggtgtgaagtcacaagaggacaacatggtggttccaggtcaatgtacagatggccttcctgtactagatgagggtaatgtggtgccacagtacacaagtgatcaactgagaacaaccacagataacaatgctgcagttgatccagagttggtggagcaagaaggtgttgatagcatagtgggtgcagccaaggttggtattgctgtggaagaatcgcgagaggacatcatggtggaaaagcaagttgaaggtgttcttttacaagatcaagatgaggcagtggagcaatgcaccagtgatcaactgaggacaatcacagatggtaatgatgtggaagatcaagaggtgcacagagagaagggaggtgctcatatgggtcatcgtgccacttcaatcatccacggctcaaagcaaaactagaagtttcaagtttcccttccgaacaaagaaatcatgaagctgaatttctggaactgaaccgtgttggcctccccattagagaaggagcaaggaagtgtatctattacatgcgtaatggtacatgcagatatggaaagaaatgttgttttaaccatccagagcaagttcttgatgttcaacgccacactgcaacaggatgggatgatactaacttgcaatcttcaccacactcaaagaagtcacctgaacataaaactatggatgacatatcgtctggatctgaggttcttcctccaaacatacttcggatgcttttacctccccagaatgtgccccctagtacaaaagaaaaggaaatcaggataaaaaagggagtgattgatggtactgactatggacatgattttgccacgaagtcacggaatgttctgcaggaactggcaatatatcctgaaaggcctgatgaacttgagtgttctcactacatgaagcatggctactgtaaatataagatgaactgcaaatttcatcatccaagagatcgtcttccaaagaaataggaccatttgctacaaccactgttgtaactggctgtcgttgatgagtggagcaagtactgatgatgggacagaaatgcaggaaggaagccatagtcttccttttttgaagagctcgattctactcatgtctatgtcgaatttctgccctagtgtcgttagagttctcgtaccagatgcgaactgcctggtggcttcccaactcccgttcattcatatactaccaaacattgctgtgatctagatctagcccgatgcggtgctaacctgagattgtgggttactgtagctcagtatgcagctcaggtacctgcacttgctcaagattgcgataatgatcagattaaaatagcaggccacgcatattctgcaacttgcgacttttacatcgttgttgagtctcctgggttcagcctctttattgtttttgtttgtgtgcgtgaccatgtgtgtcggactgtcggttgtctcttgggttcagcctcctttcattcagattcgggctccgtttgcatgtcacggcggctttacgacgc

SEQ ID NO: 10728 - DNA, 2807 bp, Zea Mays
  misc_feature (1)..(2): n is a, c, g, or t
nngaattccaagagttggtggaccaagaaggtgccatttttgaaaagtgtgtgaccgctggtggcactactgttgaagatcaagacaaggaaatggagcaatctgcaggtgacgaatcaagagaaaccgaggctgagaatgctgtggaatataacaagaaggtggatcaagaagataccattaacagacaaggtacagctaaggaagacagtggtgtggagccacaagaggagaacgttgtggatccagatcaaggtgtggatgacttttctgtactagatgagggtaatgtggtggcacagtgcaccagtgatcaattgagaacaaccatggaagataatgctgcagagatgcaagaggtggtggagcaagaaggtgccatttttgaaaagggtgtgacctcagatggcattactgttgaagatcaagacaaggaaatggaacaatctgcaggcgatgaatcaagagtgaccaagggtgagaatgctgtgaaagataaaaaggtgtatcaagaagatgccattgacaaacaaggtgcagctgaggatggcagcggtgtgaagtcacaagaggacaacatggtggttccaggtcaatgtacagatggccttcctgtactagatgagggtaatgtggtgccacagtacacaagtgatcaactgagaacaaccacagataacaatgctgcagttgatccagagttggtggagcaagaaggtgttgatagcatagtgggtgcagccaaggttggtattgctgtggaagaatcgcgagaggacatcatggtggaaaagcaagttgaaggtgttcttttacaagatcaagatgaggcagtggagcaatgcaccagtgatcaactgaggacaatcacagatggtaatgatgtggaagatcaagaggtgcacagagagaaggttggtctctctgaagggtacccacagaagcctggtaaactgaactgtcgtttttacatgtcaacagggaggtgctcatatgggtcatcgtgccacttcaatcatccacggctcaaagcaaaactagaagtttcaagtttcccttccgaacaaagaaatcatgaagctgaatttctggaactgaaccgtgttggcctccccattagagaaatatggaaagaaatgttgttttaaccatccagagcaagttcttgatgttcaacgccacactgcaacaggatgggatgatactaacttgcaatcttcaccacactcaaagaagtcacctgaacataaaactatggatgacatatcgtctggatctgaggttcttcctccaaacatacttcggatgcttttacctccccagaatgtgccccctagtacaaaagaaaaggaaatcaggataaaaaaggatcctgattgggcttcagcttcagatgattctgatggctgctgctcggccgatagttcagatgggcctttgtgcaagcaggaacatgaggactatcctgagaggcctgaatgccctttccttcttagatttggtaattgtaagtttgcatcatcatgccaatattaccacccaaaagacaaatttccaagtacctaccatccagaagacaaattccaaagtcgataccatcaaaaagaaaaatcaagtcgacaccatccaaaaaaagagccagcactatcaggagaactgatggtttatcctgacagacctagtgaacctgactgccccttctatgtgaaaactgggtcctgtaaatttggggcaaactgtaagtttcatcacccgaaggatataactccaaacatgcagggtccagcaagtccaaaaaggtcggtcgctgcaaaagagcaccacgcagcagctagagcgacattacaagaccagatgtaccagcaacaaaaattccctgagcggcctggccaaccagattgccggtactacatgcaatttgggaaatgtaaatttcaatcagcttgtatattcaatcattcaaaagacatactttcaagtgggtggcatccagcagaatgcccattctacatgaaaactaggacatgccaatttggatcagcttgtgagttttatcacccaaaagatcggtgctcaggcagagggggagtgattgatggtactgactatggacatgattttgccacgaagtcacggaatgttctgcaggaactggcaatatatcctgaaaggcctgatgaacttgagtgttctcactacatgaagcatggctactgtaaatataagatgaactgcaaatttcatcatccaagagatcgtcttccaaagaaataggaccatttgctacaaccactgttgtaactggctgtcgttgatgagtggagcaagtactgatgatgggacagaaatgcaggaaggaagccatagtcttccttttttgaagagctcgattctactcatgtctatgtcgaatttctgccctagtgtcgttagagttctcgtaccagatgcgaactgcctggtggcttcccaactcccgttcattcatatactaccaaacattgctgtgatctagatctagcccgatgcggtgctaacctgagattgtgggttactgtagctcagtatgcagctcaggtacctgcacttgctcaagattgcgataatgatcagattaaaatagcaggccacgcatattctgcaacttgcgacttttacatcgttgttgagtctcctgggttcagcctctttattgtttttgtttgtgtgcgtgaccatgtgtgtcggactgtcggttgtctcttgggttcagcctcctttcattcagattcgggctccgtttgcatgtcacggcggctttacgacgc

SEQ ID NO: 10729 - DNA, 2825 bp, Zea Mays
  misc_feature (1)..(2): n is a, c, g, or t
nngaattccaagagttggtggaccaagaaggtgccatttttgaaaagtgtgtgaccgctggtggcactactgttgaagatcaagacaaggaaatggagcaatctgcaggtgacgaatcaagagaaaccgaggctgagaatgctgtggaatataacaagaaggtggatcaagaagataccattaacagacaaggtacagctaaggaagacagtggtgtggagccacaagaggagaacgttgtggatccagatcaaggtgtggatgacttttctgtactagatgagggtaatgtggtggcacagtgcaccagtgatcaattgagaacaaccatggaagataatgctgcagagatgcaagaggtggtggagcaagaaggtgccatttttgaaaagggtgtgacctcagatggcattactgttgaagatcaagacaaggaaatggaacaatctgcaggcgatgaatcaagagtgaccaagggtgagaatgctgtgaaagataaaaaggtgtatcaagaagatgccattgacaaacaaggtgcagctgaggatggcagcggtgtgaagtcacaagaggacaacatggtggttccaggtcaatgtacagatggccttcctgtactagatgagggtaatgtggtgccacagtacacaagtgatcaactgagaacaaccacagataacaatgctgcagttgatccagagttggtggagcaagaaggtgttgatagcatagtgggtgcagccaaggttggtattgctgtggaagaatcgcgagaggacatcatggtggaaaagcaagttgaaggtgttcttttacaagatcaagatgaggcagtggagcaatgcaccagtgatcaactgaggacaatcacagatgggaggtgctcatatgggtcatcgtgccacttcaatcatccacggctcaaagcaaaactagaagtttcaagtttcccttccgaacaaagaaatcatgaagctgaatttctggaactgaaccgtgttggcctccccattagagaaggagcaaggaagtgtatctattacatgcgtaatggtacatgcagatatggaaagaaatgttgttttaaccatccagagcaagttcttgatgttcaacgccacactgcaacaggatgggatgatactaacttgcaatcttcaccacactcaaagaagtcacctgaacataaaactatggatgacatatcgtctggatctgaggttcttcctccaaacatacttcggatgcttttacctccccagaatgtgccccctagtacaaaagaaaaggaaatcaggataaaaaaggatcctgattgggcttcagcttcagatgattctgatggctgctgctcggccgatagttcagatgggcctttgtgcaagcaggaacatgaggactatcctgagaggcctgaatgccctttccttcttagatttggtaattgtaagtttgcatcatcatgccaatattaccacccaaaagacaaatttccaagtacctaccatccagaagacaaattccaaagtcgataccatcaaaaagaaaaatcaagtcgacaccatccaaaaaaagagccagcactatcaggagaactgatggtttatcctgacagacctagtgaacctgactgccccttctatgtgaaaactgggtcctgtaaatttggggcaaactgtaagtttcatcacccgaaggatataactccaaacatgcagggtccagcaagtccaaaaaggtcggtcgctgcaaaagagcaccacgcagcagctagagcgacattacaagaccagatgtaccagcaacaaaaattccctgagcggcctggccaaccagattgccggtactacatgcaatttgggaaatgtaaatttcaatcagcttgtatattcaatcattcaaaagacatactttcaagtgggtggcatccagcagaatgcccattctacatgaaaactaggacatgccaatttggatcagcttgtgagttttatcacccaaaagatcggtgctcaggcagagggggagtgattgatggtactgactatggacatgattttgccacgaagtcacggaatgttctgcaggaactggcaatatatcctgaaaggcctgatgaacttgagtgttctcactacatgaagcatggctactgtaaatataagatgaactgcaaatttcatcatccaagagatcgtcttccaaagaaatagctgacgtttgcacatcgcacaagctgctgcaactgatcactgttctgtgttgcaatttgaatcacctgaactcctgaaggaccatttgctacaaccactgttgtaactggctgtcgttgatgagtggagcaagtactgatgatgggacagaaatgcaggaaggaagccatagtcttccttttttgaagagctcgattctactcatgtctatgtcgaatttctgccctagtgtcgttagagttctcgtaccagatgcgaactgcctggtggcttcccaactcccgttcattcatatactaccaaacattgctgtgatctagatctagcccgatgcggtgctaacctgagattgtgggttactgtagctcagtatgcagctcaggtacctgcacttgctcaagattgcgataatgatcagattaaaatagcaggccacgcatattctgcaacttgcgacttttacatcgttgttgagtctcctgggttcagcctctttattgtttttgtttgtgtgcgtgaccatgtgtgtcggactgtcggttgtctcttgggttcagcctcctttcattcagattcgggctccgtttgcatgtcacggcggctttacgacgc

SEQ ID NO: 10730 - DNA, 2029 bp, Zea Mays
  misc_feature (1)..(2): n is a, c, g, or t
nngaattccaagagttggtggaccaagaaggtgccatttttgaaaagtgtgtgaccgctggtggcactactgttgaagatcaagacaaggaaatggagcaatctgcaggtgacgaatcaagagaaaccgaggctgagaatgctgtggaatataacaagaaggtggatcaagaagataccattaacagacaaggtacagctaaggaagacagtggtgtggagccacaagaggagaacgttgtggatccagatcaaggtgtggatgacttttctgtactagatgagggtaatgtggtggcacagtgcaccagtgatcaattgagaacaaccatggaagataatgctgcagagatgcaagaggtggtggagcaagaaggtgccatttttgaaaagggtgtgacctcagatggcattactgttgaagatcaagacaaggaaatggaacaatctgcaggcgatgaatcaagagtgaccaagggtgagaatgctgtgaaagataaaaaggtgtatcaagaagatgccattgacaaacaaggtgcagctgaggatggcagcggtgtgaagtcacaagaggacaacatggtggttccaggtcaatgtacagatggccttcctgtactagatgagggtaatgtggtgccacagtacacaagtgatcaactgagaacaaccacagataacaatgctgcagttgatccagagttggtggagcaagaaggtgttgatagcatagtgggtgcagccaaggttggtattgctgtggaagaatcgcgagaggacatcatggtggaaaagcaagttgaaggtgttcttttacaagatcaagatgaggcagtggagcaatgcaccagtgatcaactgaggacaatcacagatgggaggtgctcatatgggtcatcgtgccacttcaatcatccacggctcaaagcaaaactagaagtttcaagtttcccttccgaacaaagaaatcatgaagctgaatttctggaactgaaccgtgttggcctccccattagagaaggagcaaggaagtgtatctattacatgcgtaatggtacatgcagatatggaaagaaatgttgttttaaccatccagagcaagttcttgatgttcaacgccacactgcaacaggatgggatgatactaacttgcaatcttcaccacactcaaagaagtcacctgaacataaaactatggatgacatatcgtctggatctgaggttcttcctccaaacatacttcggatgcttttacctccccagaatgtgccccctagtacaaaagaaaaggaaatcaggataaaaaagggagtgattgatggtactgactatggacatgattttgccacgaagtcacggaatgttctgcaggaactggcaatatatcctgaaaggcctgatgaacttgagtgttctcactacatgaagcatggctactgtaaatataagatgaactgcaaatttcatcatccaagagatcgtcttccaaagaaataggaccatttgctacaaccactgttgtaactggctgtcgttgatgagtggagcaagtactgatgatgggacagaaatgcaggaaggaagccatagtcttccttttttgaagagctcgattctactcatgtctatgtcgaatttctgccctagtgtcgttagagttctcgtaccagatgcgaactgcctggtggcttcccaactcccgttcattcatatactaccaaacattgctgtgatctagatctagcccgatgcggtgctaacctgagattgtgggttactgtagctcagtatgcagctcaggtacctgcacttgctcaagattgcgataatgatcagattaaaatagcaggccacgcatattctgcaacttgcgacttttacatcgttgttgagtctcctgggttcagcctctttattgtttttgtttgtgtgcgtgaccatgtgtgtcggactgtcggttgtctcttgggttcagcctcctttcattcagattcgggctccgtttgcatgtcacggcggctttacgacgc

SEQ ID NO: 10731 - DNA, 2579 bp, Zea Mays
  misc_feature (1)..(2): n is a, c, g, or t
nngaattccaagagttggtggaccaagaaggtgccatttttgaaaagtgtgtgaccgctggtggcactactgttgaagatcaagacaaggaaatggagcaatctgcaggtgacgaatcaagagaaaccgaggctgagaatgctgtggaatataacaagaaggtggatcaagaagataccattaacagacaaggtacagctaaggaagacagtggtgtggagccacaagaggagaacgttgtggatccagatcaaggtgtggatgacttttctgtactagatgagggtaatgtggtggcacagtgcaccagtgatcaattgagaacaaccatggaagataatgctgcagagatgcaagaggtggtggagcaagaaggtgccatttttgaaaagggtgtgacctcagatggcattactgttgaagatcaagacaaggaaatggaacaatctgcaggcgatgaatcaagagtgaccaagggtgagaatgctgtgaaagataaaaaggtgtatcaagaagatgccattgacaaacaaggtgcagctgaggatggcagcggtgtgaagtcacaagaggacaacatggtggttccaggtcaatgtacagatggccttcctgtactagatgagggtaatgtggtgccacagtacacaagtgatcaactgagaacaaccacagataacaatgctgcagttgatccagagttggtggagcaagaaggtgttgatagcatagtgggtgcagccaaggttggtattgctgtggaagaatcgcgagaggacatcatggtggaaaagcaagttgaaggtgttcttttacaagatcaagatgaggcagtggagcaatgcaccagtgatcaactgaggacaatcacagatggtaatgatgtggaagatcaagaggtgcacagagagaaggttggtctctctgaagggtacccacagaagcctggtaaactgaactgtcgtttttacatgtcaacagggaggtgctcatatgggtcatcgtgccacttcaatcatccacggctcaaagcaaaactagaagtttcaagtttcccttccgaacaaagaaatcatgaagctgaatttctggaactgaaccgtgttggcctccccattagagaaggagcaaggaagtgtatctattacatgcgtaatggtacatgcagatatggaaagaaatgttgttttaaccatccagagcaagttcttgatgttcaacgccacactgcaacaggatgggatgatactaacttgcaatcttcaccacactcaaagaagtcacctgaacataaaactatggatgacatatcgtctggatctgaggttcttcctccaaacatacttcggatgcttttacctccccagaatgtgccccctagtacaaaagaaaaggaaatcaggataaaaaaggatcctgattgggcttcagcttcagatgattctgatggctgctgctcggccgatagttcagatgggcctttgtgcaagcaggaacatgaggactatcctgagaggcctgaatgccctttccttcttagatttggtaattggtccagcaagtccaaaaaggtcggtcgctgcaaaagagcaccacgcagcagctagagcgacattacaagaccagatgtaccagcaacaaaaattccctgagcggcctggccaaccagattgccggtactacatgcaatttgggaaatgtaaatttcaatcagcttgtatattcaatcattcaaaagacatactttcaagtgggtggcatccagcagaatgcccattctacatgaaaactaggacatgccaatttggatcagcttgtgagttttatcacccaaaagatcggtgctcaggcagagggggagtgattgatggtactgactatggacatgattttgccacgaagtcacggaatgttctgcaggaactggcaatatatcctgaaaggcctgatgaacttgagtgttctcactacatgaagcatggctactgtaaatataagatgaactgcaaatttcatcatccaagagatcgtcttccaaagaaataggaccatttgctacaaccactgttgtaactggctgtcgttgatgagtggagcaagtactgatgatgggacagaaatgcaggaaggaagccatagtcttccttttttgaagagctcgattctactcatgtctatgtcgaatttctgccctagtgtcgttagagttctcgtaccagatgcgaactgcctggtggcttcccaactcccgttcattcatatactaccaaacattgctgtgatctagatctagcccgatgcggtgctaacctgagattgtgggttactgtagctcagtatgcagctcaggtacctgcacttgctcaagattgcgataatgatcagattaaaatagcaggccacgcatattctgcaacttgcgacttttacatcgttgttgagtctcctgggttcagcctctttattgtttttgtttgtgtgcgtgaccatgtgtgtcggactgtcggttgtctcttgggttcagcctcctttcattcagattcgggctccgtttgcatgtcacggcggctttacgacgc

SEQ ID NO: 10732 - DNA, 2373 bp, Zea Mays
  misc_feature (1)..(2): n is a, c, g, or t
nngaattccaagagttggtggaccaagaaggtgccatttttgaaaagtgtgtgaccgctggtggcactactgttgaagatcaagacaaggaaatggagcaatctgcaggtgacgaatcaagagaaaccgaggctgagaatgctgtggaatataacaagaaggtggatcaagaagataccattaacagacaaggtacagctaaggaagacagtggtgtggagccacaagaggagaacgttgtggatccagatcaaggtgtggatgacttttctgtactagatgagggtaatgtggtggcacagtgcaccagtgatcaattgagaacaaccatggaagataatgctgcagagatgcaagaggtggtggagcaagaaggtgccatttttgaaaagggtgtgacctcagatggcattactgttgaagatcaagacaaggaaatggaacaatctgcaggcgatgaatcaagagtgaccaagggtgagaatgctgtgaaagataaaaaggtgtatcaagaagatgccattgacaaacaaggtgcagctgaggatggcagcggtgtgaagtcacaagaggacaacatggtggttccaggtcaatgtacagatggccttcctgtactagatgagggtaatgtggtgccacagtacacaagtgatcaactgagaacaaccacagataacaatgctgcagttgatccagagttggtggagcaagaaggtgttgatagcatagtgggtgcagccaaggttggtattgctgtggaagaatcgcgagaggacatcatggtggaaaagcaagttgaaggtgttcttttacaagatcaagatgaggcagtggagcaatgcaccagtgatcaactgaggacaatcacagatggtaatgatgtggaagatcaagaggtgcacagagagaagggaggtgctcatatgggtcatcgtgccacttcaatcatccacggctcaaagcaaaactagaagtttcaagtttcccttccgaacaaagaaatcatgaagctgaatttctggaactgaaccgtgttggcctccccattagagaaggagcaaggaagtgtatctattacatgcgtaatggtacatgcagatatggaaagaaatgttgttttaaccatccagagcaagttcttgatgttcaacgccacactgcaacaggatgggatgatactaacttgcaatcttcaccacactcaaagaagtcacctgaacataaaactatggatgacatatcgtctggatctgaggttcttcctccaaacatacttcggatgcttttacctccccagaatgtgccccctagtacaaaagaaaaggaaatcaggataaaaaagggtccagcaagtccaaaaaggtcggtcgctgcaaaagagcaccacgcagcagctagagcgacattacaagaccagatgtaccagcaacaaaaattccctgagcggcctggccaaccagattgccggtactacatgcaatttgggaaatgtaaatttcaatcagcttgtatattcaatcattcaaaagacatactttcaagtgggtggcatccagcagaatgcccattctacatgaaaactaggacatgccaatttggatcagcttgtgagttttatcacccaaaagatcggtgctcaggcagagggggagtgattgatggtactgactatggacatgattttgccacgaagtcacggaatgttctgcaggaactggcaatatatcctgaaaggcctgatgaacttgagtgttctcactacatgaagcatggctactgtaaatataagatgaactgcaaatttcatcatccaagagatcgtcttccaaagaaataggaccatttgctacaaccactgttgtaactggctgtcgttgatgagtggagcaagtactgatgatgggacagaaatgcaggaaggaagccatagtcttccttttttgaagagctcgattctactcatgtctatgtcgaatttctgccctagtgtcgttagagttctcgtaccagatgcgaactgcctggtggcttcccaactcccgttcattcatatactaccaaacattgctgtgatctagatctagcccgatgcggtgctaacctgagattgtgggttactgtagctcagtatgcagctcaggtacctgcacttgctcaagattgcgataatgatcagattaaaatagcaggccacgcatattctgcaacttgcgacttttacatcgttgttgagtctcctgggttcagcctctttattgtttttgtttgtgtgcgtgaccatgtgtgtcggactgtcggttgtctcttgggttcagcctcctttcattcagattcgggctccgtttgcatgtcacggcggctttacgacgc

SEQ ID NO: 10733 - DNA, 2940 bp, Zea Mays
  misc_feature (1)..(2): n is a, c, g, or t
nngaattccaagagttggtggaccaagaaggtgccatttttgaaaagtgtgtgaccgctggtggcactactgttgaagatcaagacaaggaaatggagcaatctgcaggtgacgaatcaagagaaaccgaggctgagaatgctgtggaatataacaagaaggtggatcaagaagataccattaacagacaaggtacagctaaggaagacagtggtgtggagccacaagaggagaacgttgtggatccagatcaaggtgtggatgacttttctgtactagatgagggtaatgtggtggcacagtgcaccagtgatcaattgagaacaaccatggaagataatgctgcagagatgcaagaggtggtggagcaagaaggtgccatttttgaaaagggtgtgacctcagatggcattactgttgaagatcaagacaaggaaatggaacaatctgcaggcgatgaatcaagagtgaccaagggtgagaatgctgtgaaagataaaaaggtgtatcaagaagatgccattgacaaacaaggtgcagctgaggatggcagcggtgtgaagtcacaagaggacaacatggtggttccaggtcaatgtacagatggccttcctgtactagatgagggtaatgtggtgccacagtacacaagtgatcaactgagaacaaccacagataacaatgctgcagttgatccagagttggtggagcaagaaggtgttgatagcatagtgggtgcagccaaggttggtattgctgtggaagaatcgcgagaggacatcatggtggaaaagcaagttgaaggtgttcttttacaagatcaagatgaggcagtggagcaatgcaccagtgatcaactgaggacaatcacagatgggaggtgctcatatgggtcatcgtgccacttcaatcatccacggctcaaagcaaaactagaagtttcaagtttcccttccgaacaaagaaatcatgaagctgaatttctggaactgaaccgtgttggcctccccattagagaaggagcaaggaagtgtatctattacatgcgtaatggtacatgcagatatggaaagaaatgttgttttaaccatccagagcaagttcttgatgttcaacgccacactgcaacaggatgggatgatactaacttgcaatcttcaccacactcaaagaagtcacctgaacataaaactatggatgacatatcgtctggatctgaggttcttcctccaaacatacttcggatgcttttacctccccagaatgtgccccctagtacaaaagaaaaggaaatcaggataaaaaaggatcctgattgggcttcagcttcagatgattctgatggctgctgctcggccgatagttcagatgggcctttgtgcaagcaggaacatgaggactatcctgagaggcctgaatgccctttccttcttagatttggtaattgtaagtttgcatcatcatgccaatattaccacccaaaagacaaatttccaagtacctaccatccagaagacaaattccaaagtcgataccatcaaaaagaaaaatcaagtcgacaccatccaaaaaaagagccagcactatcaggagaactgatggtttatcctgacagacctagtgaacctgactgccccttctatgtgaaaactgggtcctgtaaatttggggcaaactgtaagtttcatcacccgaaggatataactccaaacatgcagggtccagcaagtccaaaaaggtcggtcgctgcaaaagagcaccacgcagcagctagagcgacattacaagaccagatgtaccagcaacaaaaattccctgagcggcctggccaaccagattgccggtactacatgcaatttgggaaatgtaaatttcaatcagcttgtatattcaatcattcaaaagacatactttcaagtgggtggcatccagcagaatgcccattctacatgaaaactaggacatgccaatttggatcagcttgtgagttttatcacccaaaagatcggtgctcaggcagagggggagtgattgatggtactgactatggacatgattttgccacgaagtcacggaatgttctgcaggaactggcaatatatcctgaaaggcctgatgaacttgagtgttctcactacatgaagcatggctactgtaaatataagatgaactgcaaatttcatcatccaagagatcgtcttccaaagaaatagtctacagtgcaaaacaatattttaggtggccatatgagtgaacggttggacacaatcttaaggaaaaagaagaaaaaggcatctagcactcagtttattactctcttagtgtccttttcttggtataggtactgcatttcctgtttaccaggtacacgagaatcacactaggagatacctttttgcaattgctggaccatttgctacaaccactgttgtaactggctgtcgttgatgagtggagcaagtactgatgatgggacagaaatgcaggaaggaagccatagtcttccttttttgaagagctcgattctactcatgtctatgtcgaatttctgccctagtgtcgttagagttctcgtaccagatgcgaactgcctggtggcttcccaactcccgttcattcatatactaccaaacattgctgtgatctagatctagcccgatgcggtgctaacctgagattgtgggttactgtagctcagtatgcagctcaggtacctgcacttgctcaagattgcgataatgatcagattaaaatagcaggccacgcatattctgcaacttgcgacttttacatcgttgttgagtctcctgggttcagcctctttattgtttttgtttgtgtgcgtgaccatgtgtgtcggactgtcggttgtctcttgggttcagcctcctttcattcagattcgggctccgtttgcatgtcacggcggctttacgacgc

SEQ ID NO: 10734 - DNA, 2897 bp, Zea Mays
  misc_feature (1)..(2): n is a, c, g, or t
nngaattccaagagttggtggaccaagaaggtgccatttttgaaaagtgtgtgaccgctggtggcactactgttgaagatcaagacaaggaaatggagcaatctgcaggtgacgaatcaagagaaaccgaggctgagaatgctgtggaatataacaagaaggtggatcaagaagataccattaacagacaaggtacagctaaggaagacagtggtgtggagccacaagaggagaacgttgtggatccagatcaaggtgtggatgacttttctgtactagatgagggtaatgtggtggcacagtgcaccagtgatcaattgagaacaaccatggaagataatgctgcagagatgcaagaggtggtggagcaagaaggtgccatttttgaaaagggtgtgacctcagatggcattactgttgaagatcaagacaaggaaatggaacaatctgcaggcgatgaatcaagagtgaccaagggtgagaatgctgtgaaagataaaaaggtgtatcaagaagatgccattgacaaacaaggtgcagctgaggatggcagcggtgtgaagtcacaagaggacaacatggtggttccaggtcaatgtacagatggccttcctgtactagatgagggtaatgtggtgccacagtacacaagtgatcaactgagaacaaccacagataacaatgctgcagttgatccagagttggtggagcaagaaggtgttgatagcatagtgggtgcagccaaggttggtattgctgtggaagaatcgcgagaggacatcatggtggaaaagcaagttgaaggtgttcttttacaagatcaagatgaggcagtggagcaatgcaccagtgatcaactgaggacaatcacagatgggaggtgctcatatgggtcatcgtgccacttcaatcatccacggctcaaagcaaaactagaagtttcaagtttcccttccgaacaaagaaatcatgaagctgaatttctggaactgaaccgtgttggcctccccattagagaaggagcaaggaagtgtatctattacatgcgtaatggtacatgcagatatggaaagaaatgttgttttaaccatccagagcaagttcttgatgttcaacgccacactgcaacaggatgggatgatactaacttgcaatcttcaccacactcaaagaagtcacctgaacataaaactatggatgacatatcgtctggatctgaggttcttcctccaaacatacttcggatgcttttacctccccagaatgtgccccctagtacaaaagaaaaggaaatcaggataaaaaaggatcctgattgggcttcagcttcagatgattctgatggctgctgctcggccgatagttcagatgggcctttgtgcaagcaggaacatgaggactatcctgagaggcctgaatgccctttccttcttagatttggtaattgtaagtttgcatcatcatgccaatattaccacccaaaagacaaatttccaagtacctaccatccagaagacaaattccaaagtcgataccatcaaaaagaaaaatcaagtcgacaccatccaaaaaaagagccagcactatcaggagaactgatggtttatcctgacagacctagtgaacctgactgccccttctatgtgaaaactgggtcctgtaaatttggggcaaactgtaagtttcatcacccgaaggatataactccaaacatgcagggtccagcaagtccaaaaaggtcggtcgctgcaaaagagcaccacgcagcagctagagcgacattacaagaccagatgtaccagcaacaaaaattccctgagcggcctggccaaccagattgccggtactacatgcaatttgggaaatgtaaatttcaatcagcttgtatattcaatcattcaaaagacatactttcaagtgggtggcatccagcagaatgcccattctacatgaaaactaggacatgccaatttggatcagcttgtgagttttatcacccaaaagatcggtgctcaggcagagggggagtgattgatggtactgactatggacatgattttgccacgaagtcacggaatgttctgcaggaactggcaatatatcctgaaaggcctgatgaacttgagtgttctcactacatgaagcatggctactgtaaatataagatgaactgcaaatttcatcatccaagagatcgtcttccaaagaaatagtctacagtgcaaaacaatattttaggtggccatatgagtgaacggttggacacaatcttaaggaaaaagaagaaaaaggcatctagcactcagtttattactctcttagtgtccttttcttggtataggtactgcatttcctgtttaccaggaccatttgctacaaccactgttgtaactggctgtcgttgatgagtggagcaagtactgatgatgggacagaaatgcaggaaggaagccatagtcttccttttttgaagagctcgattctactcatgtctatgtcgaatttctgccctagtgtcgttagagttctcgtaccagatgcgaactgcctggtggcttcccaactcccgttcattcatatactaccaaacattgctgtgatctagatctagcccgatgcggtgctaacctgagattgtgggttactgtagctcagtatgcagctcaggtacctgcacttgctcaagattgcgataatgatcagattaaaatagcaggccacgcatattctgcaacttgcgacttttacatcgttgttgagtctcctgggttcagcctctttattgtttttgtttgtgtgcgtgaccatgtgtgtcggactgtcggttgtctcttgggttcagcctcctttcattcagattcgggctccgtttgcatgtcacggcggctttacgacgc

SEQ ID NO: 10735 - DNA, 2979 bp, Zea Mays
  misc_feature (1)..(2): n is a, c, g, or t
nngaattccaagagttggtggaccaagaaggtgccatttttgaaaagtgtgtgaccgctggtggcactactgttgaagatcaagacaaggaaatggagcaatctgcaggtgacgaatcaagagaaaccgaggctgagaatgctgtggaatataacaagaaggtggatcaagaagataccattaacagacaaggtacagctaaggaagacagtggtgtggagccacaagaggagaacgttgtggatccagatcaaggtgtggatgacttttctgtactagatgagggtaatgtggtggcacagtgcaccagtgatcaattgagaacaaccatggaagataatgctgcagagatgcaagaggtggtggagcaagaaggtgccatttttgaaaagggtgtgacctcagatggcattactgttgaagatcaagacaaggaaatggaacaatctgcaggcgatgaatcaagagtgaccaagggtgagaatgctgtgaaagataaaaaggtgtatcaagaagatgccattgacaaacaaggtgcagctgaggatggcagcggtgtgaagtcacaagaggacaacatggtggttccaggtcaatgtacagatggccttcctgtactagatgagggtaatgtggtgccacagtacacaagtgatcaactgagaacaaccacagataacaatgctgcagttgatccagagttggtggagcaagaaggtgttgatagcatagtgggtgcagccaaggttggtattgctgtggaagaatcgcgagaggacatcatggtggaaaagcaagttgaaggtgttcttttacaagatcaagatgaggcagtggagcaatgcaccagtgatcaactgaggacaatcacagatggtaatgatgtggaagatcaagaggtgcacagagagaaggttggtctctctgaagggtacccacagaagcctggtaaactgaactgtcgtttttacatgtcaacagggaggtgctcatatgggtcatcgtgccacttcaatcatccacggctcaaagcaaaactagaagtttcaagtttcccttccgaacaaagaaatcatgaagctgaatttctggaactgaaccgtgttggcctccccattagagaaggagcaaggaagtgtatctattacatgcgtaatggtacatgcagatatggaaagaaatgttgttttaaccatccagagcaagttcttgatgttcaacgccacactgcaacaggatgggatgatactaacttgcaatcttcaccacactcaaagaagtcacctgaacataaaactatggatgacatatcgtctggatctgaggttcttcctccaaacatacttcggatgcttttacctccccagaatgtgccccctagtacaaaagaaaaggaaatcaggataaaaaaggatcctgattgggcttcagcttcagatgattctgatggctgctgctcggccgatagttcagatgggcctttgtgcaagcaggaacatgaggactatcctgagaggcctgaatgccctttccttcttagatttggtaattgtaagtttgcatcatcatgccaatattaccacccaaaagacaaatttccaagtacctaccatccagaagacaaattccaaagtcgataccatcaaaaagaaaaatcaagtcgacaccatccaaaaaaagagccagcactatcaggagaactgatggtttatcctgacagacctagtgaacctgactgccccttctatgtgaaaactgggtcctgtaaatttggggcaaactgtaagtttcatcacccgaaggatataactccaaacatgcagggtccagcaagtccaaaaaggtcggtcgctgcaaaagagcaccacgcagcagctagagcgacattacaagaccagatgtaccagcaacaaaaattccctgagcggcctggccaaccagattgccggtactacatgcaatttgggaaatgtaaatttcaatcagcttgtatattcaatcattcaaaagacatactttcaagtgggtggcatccagcagaatgcccattctacatgaaaactaggacatgccaatttggatcagcttgtgagttttatcacccaaaagatcggtgctcaggcagagggggagtgattgatggtactgactatggacatgattttgccacgaagtcacggaatgttctgcaggaactggcaatatatcctgaaaggcctgatgaacttgagtgttctcactacatgaagcatggctactgtaaatataagatgaactgcaaatttcatcatccaagagatcgtcttccaaagaaatagtctacagtgcaaaacaatattttaggtggccatatgagtgaacggttggacacaatcttaaggaaaaagaagaaaaaggcatctagcactcagtttattactctcttagtgtccttttcttggtataggaccatttgctacaaccactgttgtaactggctgtcgttgatgagtggagcaagtactgatgatgggacagaaatgcaggaaggaagccatagtcttccttttttgaagagctcgattctactcatgtctatgtcgaatttctgccctagtgtcgttagagttctcgtaccagatgcgaactgcctggtggcttcccaactcccgttcattcatatactaccaaacattgctgtgatctagatctagcccgatgcggtgctaacctgagattgtgggttactgtagctcagtatgcagctcaggtacctgcacttgctcaagattgcgataatgatcagattaaaatagcaggccacgcatattctgcaacttgcgacttttacatcgttgttgagtctcctgggttcagcctctttattgtttttgtttgtgtgcgtgaccatgtgtgtcggactgtcggttgtctcttgggttcagcctcctttcattcagattcgggctccgtttgcatgtcacggcggctttacgacgc

SEQ ID NO: 10736 - DNA, 2784 bp, Zea Mays
  misc_feature (1)..(2): n is a, c, g, or t
nngaattccaagagttggtggaccaagaaggtgccatttttgaaaagtgtgtgaccgctggtggcactactgttgaagatcaagacaaggaaatggagcaatctgcaggtgacgaatcaagagaaaccgaggctgagaatgctgtggaatataacaagaaggtggatcaagaagataccattaacagacaaggtacagctaaggaagacagtggtgtggagccacaagaggagaacgttgtggatccagatcaaggtgtggatgacttttctgtactagatgagggtaatgtggtggcacagtgcaccagtgatcaattgagaacaaccatggaagataatgctgcagagatgcaagaggtggtggagcaagaaggtgccatttttgaaaagggtgtgacctcagatggcattactgttgaagatcaagacaaggaaatggaacaatctgcaggcgatgaatcaagagtgaccaagggtgagaatgctgtgaaagataaaaaggtgtatcaagaagatgccattgacaaacaaggtgcagctgaggatggcagcggtgtgaagtcacaagaggacaacatggtggttccaggtcaatgtacagatggccttcctgtactagatgagggtaatgtggtgccacagtacacaagtgatcaactgagaacaaccacagataacaatgctgcagttgatccagagttggtggagcaagaaggtgttgatagcatagtgggtgcagccaaggttggtattgctgtggaagaatcgcgagaggacatcatggtggaaaagcaagttgaaggtgttcttttacaagatcaagatgaggcagtggagcaatgcaccagtgatcaactgaggacaatcacagatggtaatgatgtggaagatcaagaggtgcacagagagaagggaggtgctcatatgggtcatcgtgccacttcaatcatccacggctcaaagcaaaactagaagtttcaagtttcccttccgaacaaagaaatcatgaagctgaatttctggaactgaaccgtgttggcctccccattagagaaggagcaaggaagtgtatctattacatgcgtaatggtacatgcagatatggaaagaaatgttgttttaaccatccagagcaagttcttgatgttcaacgccacactgcaacaggatgggatgatactaacttgcaatcttcaccacactcaaagaagtcacctgaacataaaactatggatgacatatcgtctggatctgaggttcttcctccaaacatacttcggatgcttttacctccccagaatgtgccccctagtacaaaagaaaaggaaatcaggataaaaaaggatcctgattgggcttcagcttcagatgattctgatggctgctgctcggccgatagttcagatgggcctttgtgcaagcaggaacatgaggactatcctgagaggcctgaatgccctttccttcttagatttggtaattgtaagtttgcatcatcatgccaatattaccacccaaaagacaaatttccaagtacctaccatccagaagacaaattccaaagtcgataccatcaaaaagaaaaatcaagtcgacaccatccaaaaaaagagccagcactatcaggagaactgatggtttatcctgacagacctagtgaacctgactgccccttctatgtgaaaactgggtcctgtaaatttggggcaaactgtaagtttcatcacccgaaggatataactccaaacatgcagggtccagcaagtccaaaaaggtcggtcgctgcaaaagagcaccacgcagcagctagagcgacattacaagaccagatgtaccagcaacaaaaattccctgagcggcctggccaaccagattgccggtactacatgcaatttgggaaatgtaaatttcaatcagcttgtatattcaatcattcaaaagacatactttcaagtgggtggcatccagcagaatgcccattctacatgaaaactaggacatgccaatttggatcagcttgtgagttttatcacccaaaagatcggtgctcaggcagagggggagtgattgatggtactgactatggacatgattttgccacgaagtcacggaatgttctgcaggaactggcaatatatcctgaaaggcctgatgaacttgagtgttctcactacatgaagcatggctactgtaaatataagatgaactgcaaatttcatcatccaagagatcgtcttccaaagaaataggaccatttgctacaaccactgttgtaactggctgtcgttgatgagtggagcaagtactgatgatgggacagaaatgcaggaaggaagccatagtcttccttttttgaagagctcgattctactcatgtctatgtcgaatttctgccctagtgtcgttagagttctcgtaccagatgcgaactgcctggtggcttcccaactcccgttcattcatatactaccaaacattgctgtgatctagatctagcccgatgcggtgctaacctgagattgtgggttactgtagctcagtatgcagctcaggtacctgcacttgctcaagattgcgataatgatcagattaaaatagcaggccacgcatattctgcaacttgcgacttttacatcgttgttgagtctcctgggttcagcctctttattgtttttgtttgtgtgcgtgaccatgtgtgtcggactgtcggttgtctcttgggttcagcctcctttcattcagattcgggctccgtttgcatgtcacggcggctttacgacgc

SEQ ID NO: 10737 - DNA, 1855 bp, Zea Mays
  misc_feature (1)..(2): n is a, c, g, or t
nngaattccaagagttggtggaccaagaaggtgccatttttgaaaagtgtgtgaccgctggtggcactactgttgaagatcaagacaaggaaatggagcaatctgcaggtgacgaatcaagagaaaccgaggctgagaatgctgtggaatataacaagaaggtggatcaagaagataccattaacagacaaggtacagctaaggaagacagtggtgtggagccacaagaggagaacgttgtggatccagatcaaggtgtggatgacttttctgtactagatgagggtaatgtggtggcacagtgcaccagtgatcaattgagaacaaccatggaagataatgctgcagagatgcaagaggtggtggagcaagaaggtgccatttttgaaaagggtgtgacctcagatggcattactgttgaagatcaagacaaggaaatggaacaatctgcaggcgatgaatcaagagtgaccaagggtgagaatgctgtgaaagataaaaaggtgtatcaagaagatgccattgacaaacaaggtgcagctgaggatggcagcggtgtgaagtcacaagaggacaacatggtggttccaggtcaatgtacagatggccttcctgtactagatgagggtaatgtggtgccacagtacacaagtgatcaactgagaacaaccacagataacaatgctgcagttgatccagagttggtggagcaagaaggtgttgatagcatagtgggtgcagccaaggttggtattgctgtggaagaatcgcgagaggacatcatggtggaaaagcaagttgaaggtgttcttttacaagatcaagatgaggcagtggagcaatgcaccagtgatcaactgaggacaatcacagatggtaatgatgtggaagatcaagaggtgcacagagagaagggaggtgctcatatgggtcatcgtgccacttcaatcatccacggctcaaagcaaaactagaagtttcaagtttcccttccgaacaaagaaatcatgaagctgaatttctggaactgaaccgtgttggcctccccattagagaaggagcaaggaagtgtatctattacatgcgtaatggtacatgcagatatggaaagaaatgttgttttaaccatccagagcaagttcttgatgttcaacgccacactgcaacaggatgggatgatactaacttgcaatcttcaccacactcaaagaagtcacctgaacataaaactatggatgacatatcgtctggatctgaggttcttcctccaaacatacttcggatgcttttacctccccagaatgtgccccctagtacaaaagaaaaggaaatcaggataaaaaagggtccagcaagtccaaaaaggtcggtcgctgcaaaagagcaccacgcagcagctagagcgacattacaagaccagatgtaccagcaacaaaaattccctgagcggcctggccaaccagattgccggtactacatgcaatttgggaaatgtaaatttcaatcagcttgtatattcaatcattcaaaagacatactttcaagtgggtggcatccagcagaatgcccattctacatgaaaactaggacatgccaatttggatcagcttgtgagttttatcacccaaaagatcggtgctcaggcagagggggagtgattgatggtactgactatggacatgattttgccacgaagtcacggaatgttctgcaggaactggcaatatatcctgaaaggcctgatgaacttgagtgttctcactacatgaagcatggctactgtaaatataagatgaactgcaaatttcatcatccaagagatcgtcttccaaagaaatagtctacagtgcaaaac

SEQ ID NO: 10738 - DNA, 3098 bp, Zea Mays
gagcctcgcttgcacctatggcatgcttgtacaatagtcgttgccgtccacttataccactgagagtttttttccctaatttatcaaataacacttaaaattgaatactaccttacattcttagatgcgggaactttatttctgaagtgaatagatgagttttttttctgtaattcttgatattccagttagtttctctgaccttgttctgtatgaatggtaggccttttttggtgaatgaattggagccacaatacctcctccatgaccgcagaaaagtgtacgaggttcacatccagttgcccactagttttgtccttgaactacgcagaagagctgcgtgtcatttcattaagacagatgaagaagcacaaaagactgaacagaggcccagcccgattacaagagagcaaagacaagtactgtgtttgaagcccttactgagatgagatggatctctgatatagagagagtagttacagtggctgccttgactgaatacctcggcctatggaacctcctttcagattctgtactgcagccagaggtagaggactcacatacttgccatttgccaattatcagcttcaggaaaatactctgcaaaatctgcatatgaagggctgttcattggtgcagttcaattcaggccatgggaaagaatatgaaagcgctgggcacctggtaagtgtaaattcttcatgcggttcgtttcccataaggccataacaaatgttggaccgccgatcgcctcgccaaaagggggctgccacaccctgaatgctgtccactttgcgaccaagttgaggagacaattgaccactttccagtttcatgttttttcactcggcaactgtggttcaacatcctgcataagtttggtgtgcagtccctatgtcctcagcccaacgacatctcctttaatgatcggtgggcaagattagtttctagaatggatggttagataaaaaacttctcaactccataatgttgggggcctgatcaatctaaaatgaccgtagttgctactcattagagaggagtttctattttggagtctggatgggctagaggaatttttgatctctttgcttactgccaagtgcagactagggctcttttttggttgatgtcaagtctttcactgtaataggctagcagtgtgtcggtgaaaagatccccgggcccttgagacccactagtgagtggaaggacaagggaaaggaaagctccggaagcacccactcccggatagtcctgaggcatcgagcccgagatcgggcgagctagagctagaaggggggtcgggcgaatcgaggggaagccactcgagtggattccgcgcctgacccaagatcgacccatcggaactgaccgaccacattaacggctcctagcaccgagccgccgtggtagagtcggtcctccttccactcatgacctacgggcccctaggcttgcggcccactcatgttctatcaaccctaggcctgagtgcactggccgtcaacaggacccgcaacatgataagccatgacgagacgcaggctacggaggcttggggccagcgtggcgcacatgcggtaataatggtgtcggagctcttcgccacccacgtcgctagtcttaaagagcgcgtctagagaagcccagccgaccgaagtgcatgccgacaggcacgactttaccgtggtagaacacctcattttagcacagtgcaatagctccttgagaagctatcggtaaccgacccacaccttgtactttaaaaggggaacgatcggcctagcacgggtggcctccaatccctctgcccacaaccgggagacctttcttttgagaattggtggagaaggtgtaactaggctatcactactctagtaagaaaaggattgaactcaaccatcatcttgggaacctagtgtttgtggagacatcacaatagatttgtttttgatgggacctctcctaatgctagtcttttaactatggcagaggatgatttgaagctctggagtttagtaggcgcaaagggtctttccctcttgcgtggtctgttagggggaaatggagtccgagcctctagtcttttagtcctttgtgtttttggcgcggttttgtcgcgttgtaattagtggttgttgtaggatttcttaaccccttgtttctccttaatataaatgatatgcaactctcctgcgtatttgagaaaaaatgatacgcgaccagcacaaaacacgcgtagacggacggaggaccacactagagcgcgcagaagactatagaggccaaagccaaggagtacgacacccaagacttagctaggtcgagagcaccaaattcgtagtccttaggccactccacgcataagagacttgggagcctcctccctctcttgcccgcttgtaacccctactacgagcattgagcaacaaaggtgttggtaacgcgagccatcgaagactggatgtagagacgttctgtccgaaccagtataaatctcgcgcccactgagcacacaatccggacccccggaacgcgcacaaacaaatttatttgttggagctggttcaaaacacagacagttggcgcactaggaaggggacttgcatgttctcgacgacttctccaggctccggatggccgaccacgtcatagtctgggccccggaacgatcatccgttttgggagcctcgatgtcagggcccaagagggcccgctatagtgccggtacagtaatagcatcgctgtagcacgccccttaggttatttagcctgtccccaacaagggctgctataacgttctgtactctaaatatagcgctcgcagttgaactctacgcgcccaacaatagactgtaaacgatactctaaaatttagaggacgccgcacgcacgctagatgtggagacttctgagcgtccgctatccgagcgagggatcgggctcccgcgggggtgaaatttccgcactctcggttctcccgtccctggcgacttcgatccctattggcgagggggcctcgcggcgtgggtcggcggaggaggcggccaagctcatgtttctgaaccatatttttgttgttattcctagttgtt

SEQ ID NO: 10739 - DNA, 1578 bp, Zea Mays
gtttcttctccctcccttcctccactccacccctcggccctcgcccccgtccctggccccgtcgccgctgccgacgctgccatggctggggtggaggatgaggacgagttcaaggacgcctcggtggccgccgatccgccaccttgctcgccgaagcccgcctccaagtccatgaccgctaccggcagcggcggtggcctcgggaggaggctgttcgcttccattcctctccccgccaccctctccgccgccatcggccgcttctccggccccaacccgctggctaccaatgtgggcctcgggctcctactcgacgcggggcccgctgcctcctctgacggcccccttgcctccgacgcggcctcgggcggcagcagcctccacctgccctcgttgcctgctctccagcggcagcacggggatgatcaggttgctgggcgtggcgcgggtgagtgggaggaggagctagggttgttaccggccgaggaagggtgggatacagctgaagacagtcgggagaaggagggtcttgctgttgatgggcgctctgcgaacagaaattgtttcccgacgcgtggtcaggaggagggggcacagagacagagacctggtgatgagttgggggcagccgtggcccaagaccaggaggtggtggtgaagcaacaaggggccactgaggattgtgctgctgtggtggaagatgagagtaactactctgcggtagagcaatgtgctggtgatgaaacaagggcagtcaaggctagtaatgctgtggaaataaataagagggtgatcgagcaagaatgggacactgagtgttacactgctgtggaagctgtagaacaatgcaccaatcatggatcaagagcagacaaggatggcaatgttgtgaagagaaaggagaaggcggtggagcaagaagtttctgttggtgtacgtgatgcagctaaggattgtgttactgtggaaccacaagaggagaatgtggtggtggtggagcatggtgaggatggcatttctgtgcaagatcaacataaggcggtggagcaatgtactagtggtcaacttagaacaaccatggatgatactgctgcagaaggtcaaagggtggtggagcagggaggtgccattttctatttggatgcaacagcatatgatattgctgttgaagatcaagagaaggaaatgaaggaatctgatggtgacgaatcaagatcaaccagggatagaaatcctgcggaagtcaaagataaggaggtgaaccaagaagatgtcgtagacagacacaatgtgatcaaggatggaagtggtgtggagttactagagaataacatagtggctatagagcaaggtgaggatggcatctctctatcagatgaggataatatggtggaactatatacaagtgatcaactgagagcaaccctggatgatcatgctgcagcaaatcgaaaggtggtggagcaagaaggtgacattgttgaaagggttgtgaccacagatggtatttctattgaagactatgagaaggaagtagagcaatctactggtttttctcaaggtcaaccaagggtgtga

SEQ ID NO: 10740 - DNA, 867 bp, Zea Mays
agtcaatagcctcagccctcagaagcaaaagcaaccaactttcttctccgtcacctgactcacacctccactcacctccggtccaccaacctctgccggccatggcggctgcggcggcgcagaagctcctcgaggcgagcacgaagatcatcggcgtcgggcgcaactacatcgcccacgccgaggagctcggcaacccgatccccaaggagcccgtactattcctgaagccgacctcgtcgttcctccacgctggcgtggccaccgccgccgtcgagatcccggagccgctcgaatcgctacaccacgaagtcgagctcgccgtcgtcatctcccggcgtgggcgtgacattcctgaagcgtccgccatggacttcgtcggaggctatgcacttgctttggacatgacagcaaggggccttcaatctgttgctaagtctgcaggccttccatggactttggctaaagggcaagacaccttcactccaattagtgcagtagttccaaaatcatctgtcactaatcccgacgatctcgagctatggctaaaggtagatgatgaactaaggcagaaaggatcgacaagtgacatgatattcaagattccttttctgatcagctatatcagctccatcatgacattaatggagggtgatgtgatactaacaggtactcctgagggtgtgggtcctgtgcgagtaggtcagaagatcaaagctggtataactgacctaattgatgtcgagttcgatgttcagaggcgcaaccggtcattttccacatgattcaataagcaagaaagtaacgaatggagttcattccctctgtccagttgtatggtcaaaatataggagatggttgatgatg

SEQ ID NO: 10741 - DNA, 1436 bp, Zea Mays
tcagccctcagaagcaaaagcaaccaactttcttctccgtcacctgactcacacctccactcacctccggtccaccaacctctgccggccatggcggctgcggcggcgcagaagctcctcgaggcgagcacgaagatcatcggcgtcgggcgcaactacatcgcccacgccgaggagctcggcaacccgatccccaaggagcccgtactattcctgaagccgacctcgtcgttcctccacgctggcgtggccaccgccgccgtcgagatcccggagccgctcgaatcgctacaccacgaagtcgagctcgccgtcgtcatctcccggcgtgggcgtgacattcctgaagcgtccgccatggacttcgtcggaggctatgcacttgctttggacatgacagcaaggggccttcaatctgttgctaagtctgcaggccttccatggactttggctaaagggcaagacaccttcactccaattagtgcagtagtaagcaatgggttttcttcatgtgcttggagttggttggtgtctcaggacagtatgttttatttatttgtgttcgctttttataattacacctcaataaatcaataccatattgaagttagtcagggcagaagtactagtcagtgcggaagggttgttagataatagacacctcatctttgctgccttccgtgttatctgcagcaatccagtgacatgaaatgtgtaatctcatcagcatgacacactaatcccgatgataattttgacttccattaatgataatttttctattaatcaggttccaaaatcatctgtcactaatcccgacgatctcgagctatggctaaaggtagatgatgaactaaggcagaaaggatcgacaagtgacatgatattcaagattccttttctgatcagctatatcagctccatcatgacattaatggagggtgatgtgatactaacaggtactcctgagggtgtgggtcctgtgcgagtaggtcagaagatcaaagctggtataactgacctaattgatgtcgagttcgatgttcagaggcgcaaccggtcattttccacatgattcaataagcaagaaagtaacgcttcaaaatcaagtccgacttccaagaagagcaaggatgacgatgattctgatgaggacgagacagatgaaaccaatttccttttaatggtctatgttatcgttcaaaattgccttatgttgacactatgtatatatgctattcaaaataacagagccattcatgttgttgggcgccttggatgaactatcttttcttcaacaaagatggagctcatgcagattgatttagtccctttcttgcaacgtaacatatatatttcatacaaattttttactcccgtcgcatcgcacgggcactcacctagtctctactaactattaagagagcagtgtagac

SEQ ID NO: 10742 - DNA, 1633 bp, Zea Mays
ctcagccctcagaagcaaaagcaaccaactttcttctccgtcacctgactcacacctccactcacctccggtccaccaacctctgccggccatggcggctgcggcggcgcagaagctcctcgaggcgagcacgaagatcatcggcgtcgggcgcaactacatcgcccacgccgaggagctcggcaacccgatccccaaggagcccgtactattcctgaagccgacctcgtcgttcctccacgctggcgtggccaccgccgccgtcgagatcccggagccgctcgaatcgctacaccacgaagtcgagctcgccgtcgtcatctcccggcgtgggcgtgacattcctgaagcgtccgccatggacttcgtcggaggctatgcacttgctttggacatgacagcaaggggccttcaatctgttgctaagtctgcaggccttccatggactttggctaaagggcaagacaccttcactccaattagtgcagtagtaagcaatgggttttcttcatgtgcttggagttggttggtgtctcaggacagtatgttttatttatttgtgttcgctttttataattacacctcaataaatcaataccatattgaagttagtcagggcagaagtactagtcagtgcggaagggttgttagataatagacacctcatctttgctgccttccgtgttatctgcagcaatccagtgacatgaaatgtgtaatctcatcagcatgacacactaatcccgatgataattttgacttccattaatgataatttttctattaatcaggttccaaaatcatctgtcactaatcccgacgatctcgagctatggctaaaggtagatgatgaactaaggcagaaaggatcgacaagtgacatgatattcaagattccttttctgatcagctatatcagctccatcatgacattaatggagggtgatgtgatactaacaggtagtgacattttctcaagaccagcttgtttttgcgcatctgaggtctttctgcgggcaatccattatttattttcgtctacaggtactcctgagggtgtgggtcctgtgcgagtaggtcagaagatcaaagctggtataactgacctaattgatgtcgagttcgatgttcagaggcgcaaccggtcattttccacatgattcaataagcaagaaagtaacggtaagcaacaagtattccgaacatatgagctggagctgatttttccaatacaacacataaggccaaccgcttgaagattgctgctcgtgtcacgctcacgcgttcctcttggcttcaaaatcaagtccgacttccaagaagagcaaggatgacgatgattctgatgaggacgagacagatgaaaccaatttccttttaatggtctatgttatcgttcaaaattgccttatgttgacactatgtatatatgctattcaaaataacagagccattcatgttgttgggcgccttggatgaactatcttttcttcaacaaagatggagctcatgcagattgatttagtccctttcttgcaacgtaacatatatatttcatacaaattttttactcccgtcgcatcgcacgggcactcacctagtctctactaactattaagagagcagtgtagac

SEQ ID NO: 10743 - DNA, 1145 bp, Zea Mays
gtcaatagcctcagccctcagaagcaaaagcaaccaactttcttctccgtcacctgactcacacctccactcacctccggtccaccaacctctgccggccatggcggctgcggcggcgcagaagctcctcgaggcgagcacgaagatcatcggcgtcgggcgcaactacatcgcccacgccgaggagctcggcaacccgatccccaaggagcccgtactattcctgaagccgacctcgtcgttcctccacgctggcgtggccaccgccgccgtcgagatcccggagccgctcgaatcgctacaccacgaagtcgagctcgccgtcgtcatctcccggcgtgggcgtgacattcctgaagcgtccgccatggacttcgtcggaggctatgcacttgctttggacatgacagcaaggggccttcaatctgttgctaagtctgcaggccttccatggactttggctaaagggcaagacaccttcactccaattagtgcagtagttccaaaatcatctgtcactaatcccgacgatctcgagctatggctaaaggtagatgatgaactaaggcagaaaggatcgacaagtgacatgatattcaagattccttttctgatcagctatatcagctccatcatgacattaatggagggtgatgtgatactaacaggtactcctgagggtgtgggtcctgtgcgagtaggtcagaagatcaaagctggtataactgacctaattgatgtcgagttcgatgttcagaggcgcaaccggtcattttccacatgattcaataagcaagaaagtaacgcttcaaaatcaagtccgacttccaagaagagcaaggatgacgatgattctgatgaggacgagacagatgaaaccaatttccttttaatggtctatgttatcgttcaaaattgccttatgttgacactatgtatatatgctattcaaaataacagagccattcatgttgttgggcgccttggatgaactatcttttcttcaacaaagatggagctcatgcagattgatttagtccctttcttgcaacgtaacatatatatttcatacaaattttttactcccgtcgcatcgcacgggcactcacctagtctctactaactattaagagagcagtgtagac

SEQ ID NO: 10744 - DNA, 553 bp, Zea Mays
acagtaacagcacacacgggatcaacgccagagctaccgctaccgccgccaccgacctccctagccgtgtcgcggcgggagcgcccgacgacggcccgcctggacctggcgcggtgccgttgtcggtcgccggtctctccgcggggcaggtgtagccgcagaggctgggcctgacgacgcggtacacgcccttgctcgccaggacgaagacgtccttgcggctgtcctccccgaacgagaagacgtacccgagcagcgggtccgtgctcccggcgacggactcgcagccgatcggggaggccttggagcagctcaccggcttcacggccgacgtgtagttcccgctcccctctggggcctccgtgcccgtccacatcagcgatgagtacagcagaatggtcgtagcccatgacggggaagattgcgtttatggactcaggcgaagtattccctccaggcgacttttgcgggtgaaagatgtatggcccctcgtatacacgccatccgtagtttccacccttggtgactaaatctacctcttcgtatgcgtcct

SEQ ID NO: 10745 - DNA, 2153 bp, Zea Mays
gccggtgatccgtggtgatcgttccggagtaaaattgagtcgagagtgcctggatcctaacatttggtattcggagctagttcttccacactgtcgcgaatcaatttcaggcgagaattggaaccatggcgtggccgatcctcgaagatccgatggcgcagctgatggcgaaaattgaggaaggaaatcgagagattcatcgttgtatggactcgatgcagtctgctatggagaggatggagatcgcggtcaagggtttgctgacggatccaagtgattgccagaggtggagaccaggaaccggagcgaaggaggacaaggtgacccagaagacgatcgaagattcgtcttctgcttcgacgagtgtggcggatgcgaccaactcgatgctctcagaaatcactgcggatggatcgacgacgcgggagcgaaccctagattcaaagtcgcggtggaaccccaggccggagcagatccgaattcgggaggaacaacaccaccgtggcgagcaacaatgcgtcaagggaggtggcacacgaagacaccacgaagctggggttgctgcagtacgatttcggagctatcatggccatggaggcagctcctgtgatggcgcctcttgctgtatcaccgagaagtgtcgctattaccgtgacgagtgggtctgctactaccgttggacttacaggtattgctaaccctgccaaccatacctactggtcctgtgttctagattctttaggtcaatctacgctgatgaaacaatctcaaggattgggaattgacatgcctcatagaagttttcctgcatttggtgattctaaaccaatagtatggagagatcgttgtgaaacagactttgagttatttactatttcgggtgaaatgtggatccggtttgccgtcatgcacttggaaggatcagccctctactggcttcagttgatgaagtccaggactaaggagatgagttggattaagttgtggttggctctgaatacccgcgttagtagtgaccaacacaactcactgaccatgttacaagcggaggtgatgttgaacacgggacaaatggaggacagaatgtgggatcctggagtatctgcccaagtttcacctaggccaggacttatgcccttacctccatctcctttgtctggtggcaaggccacgggactgaatgaggaacaccaaactctagggacattcagtaccaaggatgaggatggaaggatggccgctctcaaatcttatagaaaagccaaggggctctgtttgtttattttgcagttagaagctacaattcgtcctgatgcagtggaacaactcctagctgttcagtctatctctgtactgactgttactactgtccttgaggtgttggtatataattttaatctgaaatatcttgtgcagcacttggagacagtctttcaattactctgtcaacagcaacaacatcttaaattgcctaagtgtttgttggagtttttgggccataaagtgagtgcttctggaatttctacagatcgaccatatcagacagtgcatgagtcagatgaaagtatgtcagccattatgtttgctgttgatcagtggttgaagggtctccacttttggatcgtatacaggacatgggtggacaaccgagttgcccatattctaccacgacgacctgatctacatcaagatgacagctctgtgtgtttgaatgttgtctccagttcctcagtaattcccaggttggtggaagtgacaaaaaggtatgaaagtgatgcatcggctcaaaagataatggctatcttctcaaccggtggacagttggaacccttcaccttagtgcatggagtgatcagacacaagaacaaaatctggctggtttcgagccatgaagtgcagcaacggaccatgaaaactttgcacgatagcactctgtgtgggcagtcaggctttctggttacataccggtgcatcaaggcagtgttgagctggccaggaatgaagccctcagtgcgtgactttgttcgatcttgtgttaactgtcaacaagcgacgaccaggcatccgtttgggtttaacttgtttacagataaaataggtcttcacgaattttcgaacttgtcatttcctgccgggcaaagtgaaggtagctt

SEQ ID NO: 10746 - DNA, 1540 bp, Zea Mays
gtttgttggcggccggtgatccgtggtgatcgttccggagtaaaattgagtcgagagtgcctggatcctaacatttggtattcggagctagttcttccacactgtcgcgaatcaatttcaggcgagaattggaaccatggcgtggccgatcctcgaagatccgatggcgcagctgatggcgaaaattgaggaaggaaatcgagagattcatcgttgtatggactcgatgcagtctgctatggagaggatggagatcgcggtcaagggtttgctgacggatccaagtgattgccagaggtggagaccaggaaccggagcgaaggaggacaaggtgacccagaagacgatcgaagattcgtcttctgcttcgacgagtgtggcggatgcgaccaactcgatgctctcagaaatcactgcggatggatcgacgacgcgggagcgaaccctagattcaaagtcgcggtggaaccccaggccggagcagatccgaattcgggaggtcatcttcaactccaaacttcttgtgctcgtgcaacagcagccaccgtcggggcttgggcagttctggtctggtggcggcgctgaccattatcagttcggcaggaacaacaccaccgtggcgagcaacaatgcgtcaagggaggtggcacacgaagacaccacgaagctggggttgctgcagtacgatttcggagctatcatggccatggaggcagctcctgtgatggcgcctcttgctgtatcaccgagaagtgtcgctattaccgtgacgagtgggtctgctactaccgttggacttacagcacttggagacagtctttcaattactctgtcaacagcaacaacatcttaaattgcctaagtgtttgttggagtttttgggccataaagtgagtgcttctggaatttctacagatcgaccatatcagacagtgcatgagtcagatgaaagtatgtcagccattatgtttgctgttgatcagtggttgaagggtctccacttttggatcgtatacaggacatgggtggacaaccgagttgcccatattctaccacgacgacctgatctacatcaagatgacagctctgtgtgtttgaatgttgtctccagttcctcagtaattcccaggttggtggaagtgacaaaaaggtatgaaagtgatgcatcggctcaaaagataatggctatcttctcaaccggtggacagttggaacccttcaccttagtgcatggagtgatcagacacaagaacaaaatctggctggtttcgagccatgaagtgcagcaacggaccatgaaaactttgcacgatagcactctgtgtgggcagtcaggctttctggttacataccggtgcatcaaggcagtgttgagctggccaggaatgaagccctcagtgcgtgactttgttcgatcttgtgttaactgtcaacaagcgacgaccaggcatccgtttgggtttaacttgtttacagataaaataggtcttcacgaattttcgaacttgtcatttcctgccgggcaaagtgaaggtagctt

SEQ ID NO: 10747 - DNA, 1817 bp, Zea Mays
agggcatggccgcgatgtactcgtggtcctgcaagaggagctacaagaacgggttcgtgtggcacgacctttcggaggacgacctcgtcctcccggcaaccgacggcgagtacgtgctcaagggctccgagctcgtggaccaatccccttcggcaggtccattttaccctgtcactgtcagcaacggcaaccagaagcaacagagcaggccgaaagagggcgcgcggcagccactgccaagagaccaatccgacccatcctccccgcctagcgtgacagtcagagaagccaaggcccggcggtcaccgtccgtgccttcgcaagacgaggaggatgacaccccgtctccgtgcagggatcgctccatgtcacagccacaggagctggagccccagcggaacgagaggaggacgcaaccgccagcgagcgggtctgcgagcccagtggagctcagagctcacaggcccaccaccggctgcacggacgccgcaacccagaccgacgatctcggcagaaggccggcgggccgcagggcgctcgagctgccgcgcaagaagagtctgagcacggaccacgacgccgtcgtccgtgagatcgcagagtaccggcagagccaccctcgccggtcggcagacctccacgggatctcccgggagctcctgcgccagtgcatcactactccgctgaccgtaccctcgacctgcgccaagtccgagagcctagagtcgctgatacgcgcggacaacgtgatgacggacagcttcaggatcctcgaagaggaggacgtcgtcgcgcgcacctgccccaagctgaggccggcgagcgtgctgatgcagctcgtcacctgtggctcgctctcggtgaagggtcacggggacgctggggtcgttcggacgtgcaagccgaggttccccaacctcaggttcctcccctcgccgctgatctcgcgcaccatgatgatgggcgagctcgactacctgtcggaaaaccccaggttgatggggatgaagctggaggagaaggagtacttcagcgggagccttgttgagaccaagaagacgcaaagagatggtccggctgagaggtattcggcgcttaaacggtcttcttcctacaatgcagaaagggccggcgaggctctggactgcacaagacgcgaagaggataaagccgacgacgtgtcgtcgcgcacgaggtgcctcccgcggacgccgatcctgtcatccttcctgcacccgaagggcgactcgctcaggtctcccgtctcggactgccggcggagctcctcggcccggcgggactacgacgcggcctccggggacgggagcaggaggttcgccgacgcctccgtcgcgtccgcgaccacaggggccgagtcgttcaggaaggaggagaaactcgtcaagatcgaggaaagttaagtgccgcccgtggcctttctttacctgaacctactgtgaactctttgtcagtgctcggctgtcgtccggagcccgtgtcgtgatccactacaccgtcccttgcaacgacagcgacgaaggctctgaacgctcggaggagtgacactgctgttcagctagacgacccattttttcttcccgttttttttttcactttctcccttagaaacattaggcccccttatcattgtataagtgcctgttataatgtatcattcatgtgtttcacttaaaaagatgtctcatgagactgcatggtagagtgtgtaaaatagaggacaagaaacggtttgtagaaacaagtttgaaatatgggatgaaatagaagatctggccatatgtgcagcccataggtcc

SEQ ID NO: 10748 - DNA, 2791 bp, Zea Mays
gcagccattgccttgttgagctcgtctcgtcccgctgctttccctctcgtcgtgctcctccccacgcggccacgccacgcctcgctgtaaaccgaccctgttgaggcttggacgcacccgcgtgtccgcgcctgcctcccatcccacgccccctcccctccactccactccactcccgcgccgtcaccggccggggggaaagctccaaccgaggggtttttgtttgtacgcgcccgtttggcccttgctgtggtcacatcgcccgctcccccgctgcagcagcgccaaagatatgagaggaaagtttgggatcagttccccggtgccccgccccctcatgtgcccgcgccagtgacctcgaaaaggaccgcgcgccgcgccttgccccgtgcccagccgactctctctctctcttctcgtcccgattctgatctggttgccggcaccagcgaggtccagtctcggcgccgccggcgaatgcagggtctggaggcgcccgcccgctaatctcgacttggagctcgaggtacccctccctcactccgctgcagactcgtcccctgtccttgtcttgtttatattatttaattactcgatgggaaattgggaagttgccaggcttgcattttgtgccgccgtcgtctgatgtgatgtaactgaagggcagcaggggcagccacaagccagccagccagccgcgggttttccggattctctcctgctgctgacgcgacttcagtttcttcctaggagggggaggagcgtgtgaaactcaggttgggcgaggatggagagccgggggcggcggccgcggagccccgagcgccggaggccggcggcgcggaaggtgccggtggtgtactacctcacccggagccgccacctcgagcacccgcacttcgtcgaggtgccgctggcctcgccggaggggctctatctcagagatgtgattaatcacctgaacatggtgcgcggcaagggcatggccgcgatgtactcgtggtcctgcaagaggagctacaagaacgggttcgtgtggcacgacctttcggaggacgacctcgtcctcccggcaaccgacggcgagtacgtgctcaagggctccgagctcgtggaccaatccccttcgggtccattttaccctgtcactgtcagcaacggcaaccagaagcaacagagcaggccgaaagagggcgcgcggcagccactgccaagagaccaatccgacccatcctccccgcctagcgtgacagtcagagaagccaaggcccggcggtcaccgtccgtgccttcgcaagacgaggaggatgacaccccgtctccgtgcagggatcgctccatgtcacagccacaggagctggagccccagcggaacgagaggaggacgcaaccgccagcgagcgggtctgcgagcccagtggagctcagagctcacaggcccaccaccggctgcacggacgccgcaacccagaccgacgatctcggcagaaggccggcgggccgcagggcgctcgagctgccgcgcaagaagagtctgagcacggaccacgacgccgtcgtccgtgagatcgcagagtaccggcagagccaccctcgccggtcggcagacctccacgggatctcccgggagctcctgcgccagtgcatcactactccgctgaccgtaccctcgacctgcgccaagtccgagagcctagagtcgctgatacgcgcggacaacgtgatgacggacagcttcaggatcctcgaagaggaggacgtcgtcgcgcgcacctgccccaagctgaggccggcgagcgtgctgatgcagctcgtcacctgtggctcgctctcggtgaagggtcacggggacgctggggtcgttcggacgtgcaagccgaggttccccaacctcaggttcctcccctcgccgctgatctcgcgcaccatgatgatgggcgagctcgactacctgtcggaaaaccccaggttgatggggatgaagctggaggagaaggagtacttcagcgggagccttgttgagaccaagaagacgcaaagagatggtccggctgagaggtattcggcgcttaaacggtcttcttcctacaatgcagaaagggccggcgaggctctggactgcacaagacgcgaagaggataaagccgacgacgtgtcgtcgcgcacgaggtgcctcccgcggacgccgatcctgtcatccttcctgcacccgaagggcgactcgctcaggtctcccgtctcggactgccggcggagctcctcggcccggcgggactacgacgcggcctccggggacgggagcaggaggttcgccgacgcctccgtcgcgtccgcgaccacaggggccgagtcgttcaggaaggaggagaaactcgtcaagatcgaggaaagttaagtgccgcccgtggcctttctttacctgaacctactgtgaactctttgtcagtgctcggctgtcgtccggagcccgtgtcgtgatccactacaccgtcccttgcaacgacagcgacgaaggctctgaacgctcggaggagtgacactgctgttcagctagacgacccattttttcttcccgttttttttttcactttctcccttagaaacattaggcccccttatcattgtataagtgcctgttataatgtatcattcatgtgtttcacttaaaaagatgtctcatgagactgcatggtagagtgtgtaaaatagaggacaagaaacggtttgtagaaacaagtttgaaatatgggatgaaatagaagatctggccatatgtgcagcccataggtcc

SEQ ID NO: 10749 - DNA, 2599 bp, Zea Mays
cgttctgcaggcccgccccgccccgattcaatgcagccattgccttgttgagctcgtctcgtcccgctgctttccctctcgtcgtgctcctccccacgcggccacgccacgcctcgctgtaaaccgaccctgttgaggcttggacgcacccgcgtgtccgcgcctgcctcccatcccacgccccctcccctccactccactccactcccgcgccgtcaccggccggggggaaagctccaaccgaggggtttttgtttgtacgcgcccgtttggcccttgctgtggtcacatcgcccgctcccccgctgcagcagcgccaaagatatgagaggaaagtttgggatcagttccccggtgccccgccccctcatgtgcccgcgccagtgacctcgaaaaggaccgcgcgccgcgccttgccccgtgcccagccgactctctctctctcttctcgtcccgattctgatctggttgccggcaccagcgaggtccagtctcggcgccgccggcgaatgcagggtctggaggcgcccgcccgctaatctcgacttggagctcgaggagggggaggagcgtgtgaaactcaggttgggcgaggatggagagccgggggcggcggccgcggagccccgagcgccggaggccggcggcgcggaaggtgccggtggtgtactacctcacccggagccgccacctcgagcacccgcacttcgtcgaggtgccgctggcctcgccggaggggctctatctcagagatgtgattaatcacctgaacatggtgcgcggcaagggcatggccgcgatgtactcgtggtcctgcaagaggagctacaagaacgggttcgtgtggcacgacctttcggaggacgacctcgtcctcccggcaaccgacggcgagtacgtgctcaagggctccgagctcgtggaccaatccccttcgggtccattttaccctgtcactgtcagcaacggcaaccagaagcaacagagcaggccgaaagagggcgcgcggcagccactgccaagagaccaatccgacccatcctccccgcctagcgtgacagtcagagaagccaaggcccggcggtcaccgtccgtgccttcgcaagacgaggaggatgacaccccgtctccgtgcagggatcgctccatgtcacagccacaggagctggagccccagcggaacgagaggaggacgcaaccgccagcgagcgggtctgcgagcccagtggagctcagagctcacaggcccaccaccggctgcacggacgccgcaacccagaccgacgatctcggcagaaggccggcgggccgcagggcgctcgagctgccgcgcaagaagagtctgagcacggaccacgacgccgtcgtccgtgagatcgcagagtaccggcagagccaccctcgccggtcggcagacctccacgggatctcccgggagctcctgcgccagtgcatcactactccgctgaccgtaccctcgacctgcgccaagtccgagagcctagagtcgctgatacgcgcggacaacgtgatgacggacagcttcaggatcctcgaagaggaggacgtcgtcgcgcgcacctgccccaagctgaggccggcgagcgtgctgatgcagctcgtcacctgtggctcgctctcggtgaagggtcacggggacgctggggtcgttcggacgtgcaagccgaggttccccaacctcaggttcctcccctcgccgctgatctcgcgcaccatgatgatgggcgagctcgactacctgtcggaaaaccccaggttgatggggatgaagctggaggagaaggagtacttcagcgggagccttgttgagaccaagaagacgcaaagagatggtccggctgagaggtattcggcgcttaaacggtcttcttcctacaatgcagaaagggccggcgaggctctggactgcacaagacgcgaagaggataaagccgacgacgtgtcgtcgcgcacgaggtgcctcccgcggacgccgatcctgtcatccttcctgcacccgaagggcgactcgctcaggtctcccgtctcggactgccggcggagctcctcggcccggcgggactacgacgcggcctccggggacgggagcaggaggttcgccgacgcctccgtcgcgtccgcgaccacaggggccgagtcgttcaggaaggaggagaaactcgtcaagatcgaggaaagttaagtgccgcccgtggcctttctttacctgaacctactgtgaactctttgtcagtgctcggctgtcgtccggagcccgtgtcgtgatccactacaccgtcccttgcaacgacagcgacgaaggctctgaacgctcggaggagtgacactgctgttcagctagacgacccattttttcttcccgttttttttttcactttctcccttagaaacattaggcccccttatcattgtataagtgcctgttataatgtatcattcatgtgtttcacttaaaaagatgtctcatgagactgcatggtagagtgtgtaaaatagaggacaagaaacggtttgtagaaacaagtttgaaatatgggatgaaatagaagatctggccatatgtgcagcccataggtcc

SEQ ID NO: 10750 - DNA, 2537 bp, Zea Mays
cgttctgcaggcccgccccgccccgattcaatgcagccattgccttgttgagctcgtctcgtcccgctgctttccctctcgtcgtgctcctccccacgcggccacgccacgcctcgctgtaaaccgaccctgttgaggcttggacgcacccgcgtgtccgcgcctgcctcccatcccacgccccctcccctccactccactccactcccgcgccgtcaccggccggggggaaagctccaaccgaggggtttttgtttgtacgcgcccgtttggcccttgctgtggtcacatcgcccgctcccccgctgcagcagcgccaaagatatgagaggaaagtttgggatcagttccccggtgccccgccccctcatgtgcccgcgccagtgacctcgaaaaggaccgcgcgccgcgccttgccccgtgcccagccgactctctctctctcttctcgtcccgattctgatctggttgccggcaccagcgaggtccagtctcggcgccgccggcgaatgcagggtctggaggcgcccgcccgctaatctcgacttggagctcgaggagggggaggagcgtgtgaaactcaggttgggcgaggatggagagccgggggcggcggccgcggagccccgagcgccggaggccggcggcgcggaaggtgccggtggtgtactacctcacccggagccgccacctcgagcacccgcacttcgtcgaggtgccgctggcctcgccggaggggctctatctcagagatgtgattaatcacctgaacatggtgcgcggcaagggcatggccgcgatgtactcgtggtcctgcaagaggagctacaagaacgggttcgtgtggcacgacctttcggaggacgacctcgtcctcccggcaaccgacggcgagtacgtgctcaagggctccgagctcgtggaccaatccccttcgggtccattttaccctgtcactgtcagcaacggcaaccagaagcaacagagcaggccgaaagagggcgcgcggcagccactgccaagagaccaatccgacccatcctccccgcctagcgtgacagtcagagaagccaaggcccggcggtcaccgtccgtgccttcgcaagacgaggaggatgacaccccgtctccgtgcagggatcgctccatgtcacagccacaggagctggagccccagcggaacgagaggaggacgcaaccgccagcgagcgggtctgcgagcccagtggagctcagagctcacaggcccaccaccggctgcacggacgccgcaacccagaccgacgatctcggcagaaggccggcgggccgcagggcgctcgagctgccgcgcaagaagagtctgagcacggaccacgacgccgtcgtccgtgagatcgcagagtaccggcagagccaccctcgccggtcggcagacctccacgggatctcccgggagctcctgcgccagtgcatcactactccgctgaccgtaccctcgacctgcgccaagtccgagagcctagagtcgctgatacgcgcggacaacgtgatgacggacagcttcaggatcctcgaagaggaggacgtcgtcgcgcgcacctgccccaagctgaggccggcgagcgtgctgatgcagctcgtcacctgtggctcgctctcggtgaagggtcacggggacgctggggtcgttcggacgtgcaagccgaggttccccaacctcaggttcctcccctcgccgctgatctcgcgcaccatgatgatgggcgagctcgactacctgtcggaaaaccccaggttgatggggatgaagctggaggagaaggagtacttcagcgggagccttgttgagaccaagaagacgcaaagagatggtccggctgagaggtattcggcgcttaaacggtcttcttcctacaatgcagaaagggccggcgaggctctggactgcacaagacgcgaagaggataaagccgacgacgtgtcgtcgcgcacgaggtgcctcccgcggacgccgatcctgtcatccttcctgcacccgaagggcgactcgctcaggtctcccgtctcggactgccggcggagctcctcggcccggcgggactacgacgcggcctccggggacgggagcaggaggttcgccgacgcctccgtcgcgtccgcgaccacaggggccgagtcgttcaggaaggaggagaaactcgtcaagatcgaggaaagctgtcgtccggagcccgtgtcgtgatccactacaccgtcccttgcaacgacagcgacgaaggctctgaacgctcggaggagtgacactgctgttcagctagacgacccattttttcttcccgttttttttttcactttctcccttagaaacattaggcccccttatcattgtataagtgcctgttataatgtatcattcatgtgtttcacttaaaaagatgtctcatgagactgcatggtagagtgtgtaaaatagaggacaagaaacggtttgtagaaacaagtttgaaatatgggatgaaatagaagatctggccatatgtgcagcccataggtcc

SEQ ID NO: 10751 - DNA, 1122 bp, Zea Mays
gcaggtgacacaatcacacaaccatagtggaggatatttgttgcagggaaatgattattttgttagaggctggttgatgatcatgtagagaagataaaagcattcccaatggaaacaactataccattccgagagcggctgaagatacttggccgggtggctaatctggaggatcttcctttgagtgcagcggagaggaagctaatgcatgcctataatgagaagcctgtcctttctagaccacagcatgagttttacctgagtgataactacttcgagatcgacattgacatgcacagatttagctacatctcaaggaaaggttttgaaacatttttggacaggctaaaagcatgcgttttagatgttgggctgacaattcagggaaataaagctgaagagctgcccgagcagatcttatgctgtgttaggttaaatgggatagattacaccaaatatcagcctcttttgactcacggtgcctgaaatcaaggcttacaggaatcacctaacctttaatttggatgctgtgaggtaaccataactggaccagactcctggaaatttcagaccagagccgctgtcgactatcacagcttctgccgaaacgccatcgtccgagcttagttcacacaagtaacattaacagagggtcaatcactcagtgaccattggctaatatagttgaatccgtggtgctgtgctagtatagccgtttctttctgcaaacgtggagaaaaaaaggtgggagactgcggtacatgtaaatgtgtaaatcattgctggatagcttcggttgcctccggcggcagattcagggaaaaaattaggagctgaacaaaaacagtacagcgtgattgatcgctttgctcggctgcgatgtggagccaggacacattgatttggtacaagcatatgtgattgactgattggtttggccgtatgcaatgagccagactgacagggaacgatgtgatgtttggttgactggattaataagatgaaaaaaataaaaaaatgttatatagcaagtgtactctagttttgttcctaaaatatcaggaacacgaaggtgcaattgatttattattaattagatgtatagactaatacaaaaaaaat

SEQ ID NO: 10752 - DNA, 1236 bp, Zea Mays
gtgaaaatgaactgtatgtcaacttgcttcaaacatattcagttttctcaggtcccattatatccggcttcattatttcagaatgaaacagatggggaagggatgagctttgttttgtactttaggctttctgatggttactcgaaagagcttccacattcattcattgaaagtatcagaaggctggttgatgatcatgtagagaagataaaagcattcccaatggaaacaactataccattccgagagcggctgaagatacttggccgggtggctaatctggaggatcttcctttgagtgcagcggagaggaagctaatgcatgcctataatgagaagcctgtcctttctagaccacagcatgagttttacctgagtgataactacttcgagatcgacattgacatgcacagatttagctacatctcaaggaaaggttttgaaacatttttggacaggctaaaagcatgcgttttagatgttgggctgacaattcagggaaataaagctgaagagctgcccgagcagatcttatgctgtgttaggttaaatgggatagattacaccaaatatcagcctcttttgactcacggtgcctgaaatcaaggcttacaggaatcacctaacctttaatttggatgctgtgaggtaaccataactggaccagactcctggaaatttcagaccagagccgctgtcgactatcacagcttctgccgaaacgccatcgtccgagcttagttcacacaagtaacattaacagagggtcaatcactcagtgaccattggctaatatagttgaatccgtggtgctgtgctagtatagccgtttctttctgcaaacgtggagaaaaaaaggtgggagactgcggtacatgtaaatgtgtaaatcattgctggatagcttcggttgcctccggcggcagattcagggaaaaaattaggagctgaacaaaaacagtacagcgtgattgatcgctttgctcggctgcgatgtggagccaggacacattgatttggtacaagcatatgtgattgactgattggtttggccgtatgcaatgagccagactgacagggaacgatgtgatgtttggttgactggattaataagatgaaaaaaataaaaaaatgttatatagcaagtgtactctagttttgttcctaaaatatcaggaacacgaaggtgcaattgatttattattaattagatgtatagactaatacaaaaaaaat

SEQ ID NO: 10753 - DNA, 1507 bp, Zea Mays
gtcaaacacatcaagtgctggagtatcaacgaaggatttcctggaaaggcctctagcaggttctcaagtacagttatgcttgctggaaacaaatacgctcaacagttggtctcgtattgatcctggtacattccgggtccgtggagcaaactattttagggataagaagaaagagcttgctccaaattatgctgcatattatccatttggagtcgatgtgtacttatcaccacagaaactcaatcatatatctcgatttgtccaacttcctgacattcaactctccagcaagctcccacctcttttggtggtcaatgtacaggtcccattatatccggcttcattatttcagaatgaaacagatggggaagggatgagctttgttttgtactttaggctttctgatggttactcgaaagagcttccacattcattcattgaaagtatcagaaggctggttgatgatcatgtagagaagataaaagcattcccaatggaaacaactataccattccgagagcggctgaagatacttggccgggtggctaatctggaggatcttcctttgagtgcagcggagaggaagctaatgcatgcctataatgagaagcctgtcctttctagaccacagcatgagttttacctgagtgataactacttcgagatcgacattgacatgcacagatttagctacatctcaaggaaaggttttgaaacatttttggacaggctaaaagcatgcgttttagatgttgggctgacaattcagggaaataaagctgaagagctgcccgagcagatcttatgctgtgttaggttaaatgggatagattacaccaaatatcagcctcttttgactcacggtgcctgaaatcaaggcttacaggaatcacctaacctttaatttggatgctgtgaggtaaccataactggaccagactcctggaaatttcagaccagagccgctgtcgactatcacagcttctgccgaaacgccatcgtccgagcttagttcacacaagtaacattaacagagggtcaatcactcagtgaccattggctaatatagttgaatccgtggtgctgtgctagtatagccgtttctttctgcaaacgtggagaaaaaaaggtgggagactgcggtacatgtaaatgtgtaaatcattgctggatagcttcggttgcctccggcggcagattcagggaaaaaattaggagctgaacaaaaacagtacagcgtgattgatcgctttgctcggctgcgatgtggagccaggacacattgatttggtacaagcatatgtgattgactgattggtttggccgtatgcaatgagccagactgacagggaacgatgtgatgtttggttgactggattaataagatgaaaaaaataaaaaaatgttatatagcaagtgtactctagttttgttcctaaaatatcaggaacacgaaggtgcaattgatttattattaattagatgtatagactaatacaaaaaaaat

SEQ ID NO: 10754 - DNA, 2016 bp, Zea Mays
ctattctgtagagtggggttgcagctagtatctgggggctggggcatgtccgggagcattgaggaggactggtacgattccttggcgatgagcgagtcggatgccgaagacgatttccacagcgtgcaagatgatgctttctcattgaatggcttcgagaatgaagctgcattgagcatgaaagatggcaacggtgggagcttcaatggagctgcgcaatcaggcgagcagcaccataaaaagccaaagtccagcgaactgtcgaaggggagctcggagaatggtgtaaggacgtccattagccatgaagatgcggtgagtgtttctggtgcggataccacgcacggtggaggtaggatactggacaattgcgggcttctgccgaataattgtctgccatgcattgcctctgctgttggggtgaacgagaagaagagaactccctcgagccctactcattcaatgaagatgccttctttgaagctttccttcaagaagaagtcaggggaagctcatccatcttccacactactatcaacgaaggatttcctggaaaggcctctagcaggttctcaagtacagttatgcttgctggaaacaaatacgctcaacagttggtctcgtattgatcctggtacattccgggtccgtggagcaaactattttagggataagaagaaagagcttgctccaaattatgctgcatattatccatttggagtcgatgtgtacttatcaccacagaaactcaatcatatatctcgatttgtccaacttcctgacattcaactctccagcaagctcccacctcttttggtggtcaatgtacaggtcccattatatccggcttcattatttcagaatgaaacagatggggaagggatgagctttgttttgtactttaggctttctgatggttactcgaaagagcttccacattcattcattgaaagtatcagaaggctggttgatgatcatgtagagaagataaaagcattcccaatggaaacaactataccattccgagagcggctgaagatacttggccgggtggctaatctggaggatcttcctttgagtgcagcggagaggaagctaatgcatgcctataatgagaagcctgtcctttctagaccacagcatgagttttacctgagtgataactacttcgagatcgacattgacatgcacagatttagctacatctcaaggaaaggttttgaaacatttttggacaggctaaaagcatgcgttttagatgttgggctgacaattcagggaaataaagctgaagagctgcccgagcagatcttatgctgtgttaggttaaatgggatagattacaccaaatatcagcctcttttgactcacggtgcctgaaatcaaggcttacaggaatcacctaacctttaatttggatgctgtgaggtaaccataactggaccagactcctggaaatttcagaccagagccgctgtcgactatcacagcttctgccgaaacgccatcgtccgagcttagttcacacaagtaacattaacagagggtcaatcactcagtgaccattggctaatatagttgaatccgtggtgctgtgctagtatagccgtttctttctgcaaacgtggagaaaaaaaggtgggagactgcggtacatgtaaatgtgtaaatcattgctggatagcttcggttgcctccggcggcagattcagggaaaaaattaggagctgaacaaaaacagtacagcgtgattgatcgctttgctcggctgcgatgtggagccaggacacattgatttggtacaagcatatgtgattgactgattggtttggccgtatgcaatgagccagactgacagggaacgatgtgatgtttggttgactggattaataagatgaaaaaaataaaaaaatgttatatagcaagtgtactctagttttgttcctaaaatatcaggaacacgaaggtgcaattgatttattattaattagatgtatagactaatacaaaaaaaat

SEQ ID NO: 10755 - DNA, 2816 bp, Zea Mays
gcaagccgcagtcccaccgccgcgctcctccccggaccgccccactcgtgtggaaggccaaaccggcaagtgaaggcgaacttgcgaaagccagaagtaggacgaaacggaggcgcaccgcaccgcagctagcccacgccaccacctcctccagacctccacctcattctctcccaccaccacctccaccacaaagttcgcgttgcgccgcgcccggccccgcccagccgcgcggctcgtctcgtctcgtccctcttcgaaatcctcccacgcaatcgcctccccgcacccctgcccgtgtgacgcggcctcgcactgccaccgccccccaccccggtcccccggggcgccgatctcgtgtcgcgtcgcccgggcgaggaggaggtgggaggatgggggcgtgcgtgtcgcggcccagcgcgtgcgtgggcaagccccactcgccgcggtccggcgatgccagcggccgctcgggcggcgggggtgggacgcggcggaggcgcagccgccgcgtagggaaggggcggaggacggcgccgtcgcgcgccgcgtcgatggaaaccattcaggaggccgaggtgcccggctcgccgtccgccgccgccgccgccgccgatcaccggacgtacagcaaccccgcgttccaagtgtccgggagcattgaggaggactggtacgattccttggcgatgagcgagtcggatgccgaagacgatttccacagcgtgcaagatgatgctttctcattgaatggcttcgagaatgaagctgcattgagcatgaaagatggcaacggtgggagcttcaatggagctgcgcaatcaggcgagcagcaccataaaaagccaaagtccagcgaactgtcgaaggggagctcggagaatggtgtaaggacgtccattagccatgaagatgcggtgagtgtttctggtgcggataccacgcacggtggaggtaggatactggacaattgcgggcttctgccgaataattgtctgccatgcattgcctctgctgttggggtgaacgagaagaagagaactccctcgagccctactcattcaatgaagatgccttctttgaagctttccttcaagaagaagtcaggggaagctcatccatcttccacactactatcaacgaaggatttcctggaaaggcctctagcaggttctcaagtacagttatgcttgctggaaacaaatacgctcaacagttggtctcgtattgatcctggtacattccgggtccgtggagcaaactattttagggataagaagaaagagcttgctccaaattatgctgcatattatccatttggagtcgatgtgtacttatcaccacagaaactcaatcatatatctcgatttgtccaacttcctgacattcaactctccagcaagctcccacctcttttggtggtcaatgtacagacgcttgtctaaatggatgttagtggtgaaaatgaactgtatgtcaacttgcttcaaacatattcagatatgtaccaaccatagccgatgcctatttttagtaccaaaccagttcaacatagttaactagtacaaagggctggactgaagcaaccggtgaactctgtgtaacatgttatttatgtttgcctgcctgaagtcccattatatccggcttcattatttcagaatgaaacagatggggaagggatgagctttgttttgtactttaggctttctgatggttactcgaaagagcttccacattcattcattgaaagtatcagaaggctggttgatgatcatgtagagaagataaaagcattcccaatggaaacaactataccattccgagagcggctgaagatacttggccgggtggctaatctggaggatcttcctttgagtgcagcggagaggaagctaatgcatgcctataatgagaagcctgtcctttctagaccacagcatgagttttacctgagtgataactacttcgagatcgacattgacatgcacagatttagctacatctcaaggaaaggttttgaaacatttttggacaggctaaaagcatgcgttttagatgttgggctgacaattcagggaaataaagctgaagagctgcccgagcagatcttatgctgtgttaggttaaatgggatagattacaccaaatatcagcctcttttgactcacggtgcctgaaatcaaggcttacaggaatcacctaacctttaatttggatgctgtgaggtaaccataactggaccagactcctggaaatttcagaccagagccgctgtcgactatcacagcttctgccgaaacgccatcgtccgagcttagttcacacaagtaacattaacagagggtcaatcactcagtgaccattggctaatatagttgaatccgtggtgctgtgctagtatagccgtttctttctgcaaacgtggagaaaaaaaggtgggagactgcggtacatgtaaatgtgtaaatcattgctggatagcttcggttgcctccggcggcagattcagggaaaaaattaggagctgaacaaaaacagtacagcgtgattgatcgctttgctcggctgcgatgtggagccaggacacattgatttggtacaagcatatgtgattgactgattggtttggccgtatgcaatgagccagactgacagggaacgatgtgatgtttggttgactggattaataagatgaaaaaaataaaaaaatgttatatagcaagtgtactctagttttgttcctaaaatatcaggaacacgaaggtgcaattgatttattattaattagatgtatagactaatacaaaaaaaat

SEQ ID NO: 10756 - DNA, 2691 bp, Zea Mays
accaaggaccgcgtccatgcgcgtcgcgacgacgcctaccgcccccgcaagccgcagtcccaccgccgcgctcctccccggaccgccccactcgtgtggaaggccaaaccggcaagtgaaggcgaacttgcgaaagccagaagtaggacgaaacggaggcgcaccgcaccgcagctagcccacgccaccacctcctccagacctccacctcattctctcccaccaccacctccaccacaaagttcgcgttgcgccgcgcccggccccgcccagccgcgcggctcgtctcgtctcgtccctcttcgaaatcctcccacgcaatcgcctccccgcacccctgcccgtgtgacgcggcctcgcactgccaccgccccccaccccggtcccccggggcgccgatctcgtgtcgcgtcgcccgggcgaggaggaggtgggaggatgggggcgtgcgtgtcgcggcccagcgcgtgcgtgggcaagccccactcgccgcggtccggcgatgccagcggccgctcgggcggcgggggtgggacgcggcggaggcgcagccgccgcgtagggaaggggcggaggacggcgccgtcgcgcgccgcgtcgatggaaaccattcaggaggccgaggtgcccggctcgccgtccgccgccgccgccgccgccgatcaccggacgtacagcaaccccgcgttccaagtgtccgggagcattgaggaggactggtacgattccttggcgatgagcgagtcggatgccgaagacgatttccacagcgtgcaagatgatgctttctcattgaatggcttcgagaatgaagctgcattgagcatgaaagatggcaacggtgggagcttcaatggagctgcgcaatcaggcgagcagcaccataaaaagccaaagtccagcgaactgtcgaaggggagctcggagaatggtgtaaggacgtccattagccatgaagatgcggtgagtgtttctggtgcggataccacgcacggtggaggtaggatactggacaattgcgggcttctgccgaataattgtctgccatgcattgcctctgctgttggggtgaacgagaagaagagaactccctcgagccctactcattcaatgaagatgccttctttgaagctttccttcaagaagaagtcaggggaagctcatccatcttccacactacgtaagcatttcttcataagtcatttggtatcaacgaaggatttcctggaaaggcctctagcaggttctcaagtacagttatgcttgctggaaacaaatacgctcaacagttggtctcgtattgatcctggtacattccgggtccgtggagcaaactattttagggataagaagaaagagcttgctccaaattatgctgcatattatccatttggagtcgatgtgtacttatcaccacagaaactcaatcatatatctcgatttgtccaacttcctgacattcaactctccagcaagctcccacctcttttggtggtcaatgtacaggtcccattatatccggcttcattatttcagaatgaaacagatggggaagggatgagctttgttttgtactttaggctttctgatggttactcgaaagagcttccacattcattcattgaaagtatcagaaggctggttgatgatcatgtagagaagataaaagcattcccaatggaaacaactataccattccgagagcggctgaagatacttggccgggtggctaatctggaggatcttcctttgagtgcagcggagaggaagctaatgcatgcctataatgagaagcctgtcctttctagaccacagcatgagttttacctgagtgataactacttcgagatcgacattgacatgcacagatttagctacatctcaaggaaaggttttgaaacatttttggacaggctaaaagcatgcgttttagatgttgggctgacaattcagggaaataaagctgaagagctgcccgagcagatcttatgctgtgttaggttaaatgggatagattacaccaaatatcagcctcttttgactcacggtgcctgaaatcaaggcttacaggaatcacctaacctttaatttggatgctgtgaggtaaccataactggaccagactcctggaaatttcagaccagagccgctgtcgactatcacagcttctgccgaaacgccatcgtccgagcttagttcacacaagtaacattaacagagggtcaatcactcagtgaccattggctaatatagttgaatccgtggtgctgtgctagtatagccgtttctttctgcaaacgtggagaaaaaaaggtgggagactgcggtacatgtaaatgtgtaaatcattgctggatagcttcggttgcctccggcggcagattcagggaaaaaattaggagctgaacaaaaacagtacagcgtgattgatcgctttgctcggctgcgatgtggagccaggacacattgatttggtacaagcatatgtgattgactgattggtttggccgtatgcaatgagccagactgacagggaacgatgtgatgtttggttgactggattaataagatgaaaaaaataaaaaaatgttatatagcaagtgtactctagttttgttcctaaaatatcaggaacacgaaggtgcaattgatttattattaattagatgtatagactaatacaaaaaaaat

SEQ ID NO: 10757 - DNA, 1117 bp, Zea Mays
agcacggcggggtcccgttgatagtgaagcaaacaaaatgatcatgacctgactctgaaacctcgtggaggtggaattggaacccaggcccgcacagcaagcccatttgccggcacctacccaggctccccgcctacccatacttatacacgttatgacgccccaccgaagcggagaaaaaaaaacgtgctgtcttcccgtctcttcccaatgcggcgtctcgctctcctcttcctcctgcctctcctcctcgccaccggcgtcaccacggcgtcagcggagcccgcgacccctcccgcctctcctcctcctcctcctcctcctcctcctcctcctcctcctccaccgcctccgccgaccctcgccgagctcctcccgaagtacggcctgcccccgggcatcttcccctcgaccgtcaccgccttctcgctcgccagcaacggcagcctcaccgtcgacctcgcggggccctgctacgtacacttcgagtatctcacctacttcgagccccacatcacgggggtgctccgctacggctccctctccgacctccagggcatccaggtccgccgcttcctcatctggttcaacgtcatccgcatcaaggtcgacctacccccgcctccgcgctacgtctacctcgacatcgggtggatcacgcgcaagctccctgctgcggacttccagtcgctccacgcctgcgaggactccaggaggtgccgcctcacctccgcgcttgccgtcgccgccaaatggttccaggacttctttgcccaattttaggggatggggaaggcctacgatttgacaacagcagtggatgagttccctgccttcgagtcttcgacggccgaaaaggaattgtgtgaaccttgaacgagctggaacaccgccattgttactctctctacacgcgatgtagctaatcaagctgttatctcatttctacatctgtcgacgtttcatcttgtgggttgtgcataaacatgttgagaacatgtagcaaatatgatgaagttgcttgtttcatcatttggtcggaagcttaaagcagtaccgcagaaaaatgaaacaatctttttcagcagtaaataaagatgggaaaagggaagtttgc

SEQ ID NO: 10758 - DNA, 1373 bp, Zea Mays
ccccgaccgcttcttcgcaaacctccccctctcccatcgacttcctccgtcgtccgtcgcactgccacggatcaccctcttccttcgtcttcctccacaaaacctacagcgctggtgcgccgaggagctagctagctagcccggccggccggccggcgccatgcctcccgtgaaggccgaggacctggttgtgcacgccgtcaaggagcagttcgccggcctcgactactgcatcaccagccccccgccatggatcacgacggtgctcgttggcttccagcactacctggtcatgctcggcaccaccgtcctcatcgccaccatcatcgtcccgctcatgggcggcggccatgccgagaaggcgatcgtgatccagaccatcctgttcctctccgggatcaacacgctgctgcaggtccacttcggcacgcggctccccgccgtgatgagcggctcctacacctacatctacccggccgtggccatcatcctgagcccgcgatacgcgctcctcatcgaccctctcgagagattcgtgttcacgatgaggtcgctccagggcgcgctcatcatcgccggcgtcttccaggccgtcgtcggcttcttcggcatatggagagtctttattaggttcctgagccccctcgcggcggtccccttcgtcacgctcacgggcctgggactcttcttcttcgcgttccccggggtcaccaagtgcatcgaagtgggtctccccgcccttgtcctcctggtgatcttcgcagagtacgcctcccacgtgttcgctaaggggagcttcgtgttcagccggtgcgccgtgctggtgaccgtcgtgatcatctggatctacgccgagatcctgacggcggccggcgcctacaacgagaggggccctgtgacgcagttcagctgccgcgccgaccgctccgggatcatccagggctcaccttgggtgaggtttccttatccgttccagtggggataccccattttctgcttccaggattgcttcgccatgctggcggcttcttttgcgtcgcttattgagtctaccggcaccttaatcgcagtgtcaagatactcaggcgcgacgttctgcccaccctccgtcttctcacgtggaattggctgggagggtatatctatcatactggacgggatgtgcggtacactgacaggaacagcggcttcagttgagaatgcaggtctactggcagtgacgcgagttggaagccggcgagtcattaagatctcagccttgttcatgattttcttctccttgtttgttatcccgacttgaaacggtccgtagtgacctcgcccacgccattgcaaagatgcaggtaactgggaaggaattggccggagacgag

SEQ ID NO: 10759 - DNA, 3354 bp, Zea Mays
ccccgaccgcttcttcgcaaacctccccctctcccatcgacttcctccgtcgtccgtcgcactgccacggatcaccctcttccttcgtcttcctccacaaaacctacagcgctggtgcgccgaggagctagctagctagcccggccggccggccggcgccatgcctcccgtgaaggccgaggacctggttgtgcacgccgtcaaggagcagttcgccggcctcgactactgcatcaccagccccccgccatggatcacgacggtgctcgttggcttccagcactacctggtcatgctcggcaccaccgtcctcatcgccaccatcatcgtcccgctcatgggcggcggccatgccgagaaggcgatcgtgatccagaccatcctgttcctctccgggatcaacacgctgctgcaggtccacttcggcacgcggctccccgccgtgatgagcggctcctacacctacatctacccggccgtggccatcatcctgagcccgcgatacgcgctcctcatcgaccctctcgagagattcgtgttcacgatgaggtcgctccagggcgcgctcatcatcgccggcgtcttccaggccgtcgtcggcttcttcggcatatggagagtctttattaggttcctgagccccctcgcggcggtccccttcgtcacgctcacgggcctgggactcttcttcttcgcgttccccggggtcaccaagtgcatcgaagtgggtctccccgcccttgtcctcctggtgatcttcgcagagtacgcctcccacgtgttcgctaaggggagcttcgtgttcagccggtgcgccgtgctggtgaccgtcgtgatcatctggatctacgccgagatcctgacggcggccggcgcctacaacgagaggggccctgtgacgcagttcagctgccgcgccgaccgctccgggatcatccagggctcaccttgggtgaggtttccttatccgttccagtggggataccccattttctgcttccaggattgcttcgccatgctggcggcttcttttgcgtcgcttattgagtctaccggcaccttaatcgcagtgtcaagatactcaggcgcgacgttctgcccaccctccgtcttctcacgtggaattggctgggagggtatatctatcatactggacgggatgtgcggtacactgacaggaacagcggcttcagttgagaatgcaggtctactggcagtgacgcgagttggaagccggcgagtcattaagatctcagccttgttcatgattttcttctccttgtttgtaattgcacctgactggtacgaactgcaactcaacagccaaatttggggcggttcttgcatccattccattgcctattttcgctgcactgtactgcgtcctcttcgcttattcagctggtgcaggcttcagcttactccagtactgcaacctcaactccttgaggacaaagttcatactcagcatctcgttgttcctggggctgtccatcccacagtacttccgggtctacgagatgttcttcggcttcggaccagttcacacccattcagtagcgttcaacgtgatggtcaatgtcatcttctcatcgccggcgacggtggccgccatactggcctaccttctggactgcacccacctgtactgggaggctagtgtgaagaaggacaggggctggttctggtgggagaagttcaagtcctacaagtatgatggcaggagcgaggagttctaccgtcttccttatggcttgagcaggtacttcccctcgctctaggacgccgggaggaagacgacggacccaagttctatgtagctgctcgagcgtagaagctgaacatcagttgaaggcaacagaaccatatgttattttcatatatcaagcagttgggagggagcttgatgttttgatttaccttgtaaaacattttggatgataaacttttgcaattactgggagagtaggatcaaccaggggagaattctgcaacaattcagtcaccgtttttgcttcagattcgaaacagaacacagatgccttcacaggcttcgattattttcccacatcatccatgcacaagtcaagcgtgagttcgctaaagcaaaagcatagtcaagttactacccgagtggagtggcaatccgattatttgtcctcgccgctggaggatggtccagccaccgctgccttgggcacccacacaagcccgtgcggctgtgcagccctaatgccgcgggggcgccagggttgagccgacctcctcgcaatccgtggattcggcccggtcacggcctggacctccaccaccggttgccggcgctgcccttcgactaggccctctggcttcgcctccatggtcttgcggagcatgccaccgctcttcgatttgctcctgccatcggcgggcgaggtggaagggttcagagccggggccggggccggggacggggccggagccttcccatcaggagaatcgctgcctgtcccggcgtctgcgagcctgggcgctgcaggtttcggtttccccgcgttgcccgacttgacgcctcgcggcagcgacggaccggccgtcttcaccttcaccggaccatcgccccggctcgtctctgcgctccggttacccgcgcctttccccttcctccccttgcaggtcaggtggcccggggatgatgccacggccgccttggccggatcgagtggcgcaaccgaggccttccccatcgccttgagttcgctcttgatgtccaccttgccgccgttcgatgttggaggagctgcctcggccagattacctggctcgcccttcttattccccttcctcttccccttccgcgggtacttgcgtccgccacggggatggggtgcactgtccgcgacatcgtccagccccttcttgccacggctacctcctaccatccattccctcttccctgccgcaacttccccgcacgtcggcggcgctcgatgcaccacggccacccaccggtggccctgccccccatgctgcctatccttggccccacagaaggcctcgcgcgagaccgatcgtcccttagtctctgccttcagcgccgcctcccgcttaaccgcggcggccatggcctcctcctccgcccttagcgccgcctcccgcttaaccgcggcggccatggctgcggcggcctcctcctcccgctgccgcttctcctcctcctcctccttctctttgaggcgaagctcaaggagctgctggaggctgacgtagttgggagggatggaaggcggctcccgcctcgacttggcgatcggcgccgccttcatcgcttctcccctctcggtgatgggccttggacaggaaggaaaaagagta

SEQ ID NO: 10760 - DNA, 3736 bp, Zea Mays
ccccgaccgcttcttcgcaaacctccccctctcccatcgacttcctccgtcgtccgtcgcactgccacggatcaccctcttccttcgtcttcctccacaaaacctacagcgctggtgcgccgaggagctagctagctagcccggccggccggccggcgccatgcctcccgtgaaggccgaggacctggttgtgcacgccgtcaaggagcagttcgccggcctcgactactgcatcaccagccccccgccatggatcacgacggtgctcgttggcttccagcactacctggtcatgctcggcaccaccgtcctcatcgccaccatcatcgtcccgctcatgggcggcggccatgccgagaaggcgatcgtgatccagaccatcctgttcctctccgggatcaacacgctgctgcaggtccacttcggcacgcggctccccgccgtgatgagcggctcctacacctacatctacccggccgtggccatcatcctgagcccgcgatacgcgctcctcatcgaccctctcgagagattcgtgttcacgatgaggtcgctccagggcgcgctcatcatcgccggcgtcttccaggccgtcgtcggcttcttcggcatatggagagtctttattaggttcctgagccccctcgcggcggtccccttcgtcacgctcacgggcctgggactcttcttcttcgcgttccccggggtcaccaagtgcatcgaagtgggtctccccgcccttgtcctcctggtgatcttcgcagagtacgcctcccacgtgttcgctaaggggagcttcgtgttcagccggtgcgccgtgctggtgaccgtcgtgatcatctggatctacgccgagatcctgacggcggccggcgcctacaacgagaggggccctgtgacgcagttcagctgccgcgccgaccgctccgggatcatccagggctcaccttgggtgaggtttccttatccgttccagtggggataccccattttctgcttccaggattgcttcgccatgctggcggcttcttttgcgtcgcttattgagtctaccggcaccttaatcgcagtgtcaagatactcaggcgcgacgttctgcccaccctccgtcttctcacgtggaattggctgggaggtaaccaaataatcaaaacgttcagttcttctaactgcccctttacaatacaatgattttcgctaggggctgttcgggtcttaaatctgtaggatgaaacctcaaatattaccgtgctacatttctaatctgcaacttatgtcatactcttcagcttgctcccgtacattagaaatacagctcacaagtatgaccaacaataatatataaatacatttctactctgtgcacaaactatgataactagaatgtattttaattccaaagatctaaaccaggcctaactagaaagcaacttccaaaatatcatcagggtatatctatcatactggacgggatgtgcggtacactgacaggaacagcggcttcagtgtaatgcactctacttttaactcagttgataacctcatcagttagcaagccatttcaaagcgaaagaaagcttcgaagtaacctgctctctttgttgctttcaaagtgagaatgcaggtctactggcagtgacgcgagttggaagccggcgagtcattaagatctcagccttgttcatgattttcttctccttgtttgccaaatttggggcggttcttgcatccattccattgcctattttcgctgcactgtactgcgtcctcttcgcttattcagctggtgcaggcttcagcttactccagtactgcaacctcaactccttgaggacaaagttcatactcagcatctcgttgttcctggggctgtccatcccacagtacttccgggtctacgagatgttcttcggcttcggaccagttcacacccattcagtagcgttcaacgtgatggtcaatgtcatcttctcatcgccggcgacggtggccgccatactggcctaccttctggactgcacccacctgtactgggaggctagtgtgaagaaggacaggggctggttctggtgggagaagttcaagtcctacaagtatgatggcaggagcgaggagttctaccgtcttccttatggcttgagcaggtacttcccctcgctctaggacgccgggaggaagacgacggacccaagttctatgtagctgctcgagcgtagaagctgaacatcagttgaaggcaacagaaccatatgttattttcatatatcaagcagttgggagggagcttgatgttttgatttaccttgtaaaacattttggatgataaacttttgcaattactgggagagtaggatcaaccaggggagaattctgcaacaattcagtcaccgtttttgcttcagattcgaaacagaacacagatgccttcacaggcttcgattattttcccacatcatccatgcacaagtcaagcgtgagttcgctaaagcaaaagcatagtcaagttactacccgagtggagtggcaatccgattatttgtcctcgccgctggaggatggtccagccaccgctgccttgggcacccacacaagcccgtgcggctgtgcagccctaatgccgcgggggcgccagggttgagccgacctcctcgcaatccgtggattcggcccggtcacggcctggacctccaccaccggttgccggcgctgcccttcgactaggccctctggcttcgcctccatggtcttgcggagcatgccaccgctcttcgatttgctcctgccatcggcgggcgaggtggaagggttcagagccggggccggggccggggacggggccggagccttcccatcaggagaatcgctgcctgtcccggcgtctgcgagcctgggcgctgcaggtttcggtttccccgcgttgcccgacttgacgcctcgcggcagcgacggaccggccgtcttcaccttcaccggaccatcgccccggctcgtctctgcgctccggttacccgcgcctttccccttcctccccttgcaggtcaggtggcccggggatgatgccacggccgccttggccggatcgagtggcgcaaccgaggccttccccatcgccttgagttcgctcttgatgtccaccttgccgccgttcgatgttggaggagctgcctcggccagattacctggctcgcccttcttattccccttcctcttccccttccgcgggtacttgcgtccgccacggggatggggtgcactgtccgcgacatcgtccagccccttcttgccacggctacctcctaccatccattccctcttccctgccgcaacttccccgcacgtcggcggcgctcgatgcaccacggccacccaccggtggccctgccccccatgctgcctatccttggccccacagaaggcctcgcgcgagaccgatcgtcccttagtctctgccttcagcgccgcctcccgcttaaccgcggcggccatggcctcctcctccgcccttagcgccgcctcccgcttaaccgcggcggccatggctgcggcggcctcctcctcccgctgccgcttctcctcctcctcctccttctctttgaggcgaagctcaaggagctgctggaggctgacgtagttgggagggatggaaggcggctcccgcctcgacttggcgatcggcgccgccttcatcgcttctcccctctcggtgatgggccttggacaggaaggaaaaagagta

SEQ ID NO: 10761 - DNA, 1810 bp, Zea Mays
tggactgaaaaagattggatgagtttcaatccattccaagtcaaaatctttcatattttcttttccaatccatgatgtataggaacaaccgaacaaggacttacatggttcaagatattgttcagcagcacccataagaaaattcagtcacgaaactaatggaccgccaagcagcttcggaggtaaacatgaggccccaacataacctctcataaaacagtcagttttccctacagcaatttcacaccaacacctcttagagaatctatcacggccttgaccttgccatggtacttctggtctcttgacatggagacagatactgcagggatacccttgaacagcaagcgctctccaagcaacttcccaatctttgcagccgcagcaacatcccgtgtcgactccatgcttggcctcaggagtttctcctgagagcttgcagagcatgcgaccgtggctgtcggtgtgtggatgacctgagcgctcacaaaactgtttgtgaaatgcatcttcaaaatatacggcttgaggaacttggtgattgcaggagccctagctggtggagggataaccatattgcctaatcaagctgacctgaacaagcccagaaataagacaaaataattaatcaataacgctgacatagcatgcaaaaacttaaacatggacaaggataatcttgtgaaatagaaatccaggaccggatgcaaatatcatatggtgatatagcatgaagggactgaaaggtgaagagataattgtattatagtgtagtgtcttcacagggttacaaagcctaaccccgatggtcctcttgggctgagctctatgcccaagtcaacccaaatcacataacaatctaacaccccgcgatcaaaactctagcgatcaaaactctagctacgacaaatgttgggactggatcaaaactccaaaaacatagagcgtaggcccttggtgaagatgtcgacgagttgagtcgccaaaacatggactcgaacatcccttatggtgacacgcccacgaataaagtggagatcatgcttcgtgccctggtgctggacaaggttgatagagaggtagacaaggtactcttggtcaggggactatggagctccttcaagagctggtggaaccagaacgcctcaaccacaccattcgccagcgcccaacatttcagcctcagcgctcgagtgagagaccacatgttgccgcttcgacaaccaagagacgtgattgctccaaagaacgctgtagccagaggtggccctacatgtgttcgtgttacggctgcgttgtggtggaaggggtagaggtgagggtgcatgacccctactgcgcaggagtagcgatcgccgacgagttgccgtcgatcaatggtgtcaagcaggagggagactagacagaggaggtagggaataatagattgatttctgttggagtgggaaaccctaaccctaactaggttgggagtgcatatatataagatgagtaattggaccaagcccattacactgagggtatgcaagtaattacacagggactagccctgaaaccaaaacaatactctaacaccccccgcagtctcaactcgacggtagccccttggtgaagatatcggcgaactacagcgtggtgggacgctgagaacccgaacgtcaccagcgatgagccgcttgcggacaaagtgcaggtcgatctccatgtgcttcgtgcgctgatgctacacgggattggtggagaggtagaccacgcttgtaagtagagggactctaactctcatcagaggatgacactatgagttggggca

SEQ ID NO: 10762 - DNA, 1495 bp, Zea Mays
ttcaaccgccttaactcgtagtcgaagcatcaaacagtagtcatgctacacacctctccagttgcaagaatcgtgcgacacttcgagcattgtgcccaacaattgtgacagagggacgcctttaaatacgggtgtgtggttccatattttcctccattacttcgcacaatcaaccgcactcgtcaacgagtgttctctctcccgccgccatccccaacgaattttggctgtcccgtcgctccagtcgaacgcgccatggccactaccaccgcattgaagtcgttgttgagcacgtggatcttgaaccaggaggggatgaacgagtggtggtgttcacactatttgggggctgccatcgaggccacaattggtgtccttgtagcgatagtaggcgcgggcttgaggtctgctggtgatgagacgaatgtcgaggagtcgtcgaaaacagtcctggttggcgctaccggggatgcatctgcgagagctgacagacccgcaaatgaggaccctccctatccaaacgctgaaacgcatcagcgccataggagatatgaagggggcttgcatagagtaaaaaacactcgttcaaatgtgacgtctaatgtgggagaccctttcagtgggagaccctcgttcaaatgtgggagtaattggagccaggcgtccaggagtcccacatggtatcgacgagtatgagagtccacgtggttgagtacgacgtagttggtagtcattgaagctgcacgcactgcacaatgcttgcggatacgcctatggactcacacgtggctataatgacgccccacatcgtcaagcccgttgtagccgcgcagactgcatagtgctcacgtttacgccttaagcgtggctatagtgatgtcttctgaccaacatcgccccagtaataaatacgaaggacgagagtcttatctcttatctcaaccactcagcgtcgcacgaccgacccagttgaaggcgcacatggtgccgaggccattgccgctcgagggcattctgatgagagtcgggggctcctgcgcagagcctctagcttgtagggtactgggatctgatcggtatgatgcttggcccccgaggcgtaggaccccgaagattataggctagcaccaaaccgggctcattgtgtgtctgactatgttgctggagccttgaaggacgttttactaagagaggcatgccttccttggacgctgacactactaataatgaaatgaatataagcatgccttatttttgtacatctaggtacattgcgtaaatatcatgatttaaaaaggcaataatagcaagcagcgattacttcgttaagctcaagtatataaatatatcctacaaataaaatatccgtgcaacgaattcgctattcacatccagtcactaatatggattgtaggcaacgtatctgttatctggtgtactaaccataagaccaagatcagttgcaatgctatttaagcaatggcttaaaccaagc

SEQ ID NO: 10763 - DNA, 970 bp, Zea Mays
ttcaaaggccggcctatcgattccacggtgcaatttacggagttcatacagaagaacctccacctgtaccagttccggaacaccatcccgctctcaaccgccgccgccgccaacttcacacgcggcgaactcgccacagcccttcgcaagaatccatatatggtcaatattattcttggtggttatgataaggatgttggtgcttccctctactacatcgactacattgcaaccttgcacaaaattgacaaagtagatcttgttgacaagtgcatcaaggagattcggctgcgattggttgtcgcgcctcagaactttgttatcaagattgttgacaaggacggggcgagggagtacgccaggcgtgaactcgtcggtgacaatgcacctgctgaagctgcaaccgcagttgttgctgcctgaggcatgaactcgtttgaggttggaatgtgttagttgtttctcagcgatgctacttatgcgatcacaggatactggtggggggcccacaactgttttatcaattttagcccagtcgtgtaattctgtttctgcactattcatgtctgctgagtacaagtagtgtttcacgcttgaacaaatacaatactgttgctgtgcaccttttctgatcactgaaatggccggcgacccaggccgttacaagcaggccatggcccgttactaggtagtctattttctttgccaaactcgcttatctttatctgtctgctcatataatcaacgtttttgcgctttttcttcattgttatttgactattaccttctgcttttaaacttcctgttggagttccactaggcgtcgggcgtccaacgcgtggagatgaaacaaaacgctctcaacgaagtttcactggcattcattggaaacgatgtgcgctaggtttcgtcagataaaataaaacctacatcccctctctaaccattcttatgccatgttatttttttt

SEQ ID NO: 10764 - DNA, 1292 bp, Zea Mays
caaaagaaggcccaaccagcacgtcacactgctgcgaaggacaccaggcccgccgaaaattgtgtgaacgcccctttcttctaccccaagacgaactcggtgaactctttccggttcgttcccctacgcccgtttctctctcgtcgcgcaacatcagagcacaagcgaggaacccagtccagtcccgggaatggagtgcgtattgggcgtggttggccgcgacttcgcgctggtggcggccgacacctccgccgtgcagagtattctcgtccacaagaccgacgaggacaaggtgatggtgctcgactcgcaaaagctgatgggcgcttcaggggagcctggtgatcgggtgcaatttacggagttcatacagaagaacctccacctgtaccagttccggaacaccatcccgctctcaaccgccgccgccgccaacttcacacgcggcgaactcgccacagcccttcgcaagaatccatatatggtcaatattattcttggtggttatgataaggatgttggtgcttccctctactacatcgactacattgcaaccttgcacaaaattgacaaagtagatcttgttgacaagtgcatcaaggagattcggctgcgattggttgtcgcgcctcagaactttgttatcaagattgttgacaaggacggggcgagggagtacgccaggcgtgaactcgtcggtgacaatgcacctgctgaagctgcaaccgcagttgttgctgcctgaggcatgaactcgtttgaggttggaatgtgttagttgtttctcagcgatgctacttatgcgatcacaggatactggtggggggcccacaactgttttatcaattttagcccagtcgtgtaattctgtttctgcactattcatgtctgctgagtacaagtagtgtttcacgcttgaacaaatacaatactgttgctgtgcaccttttctgatcactgaaatggccggcgacccaggccgttacaagcaggccatggcccgttactaggtagtctattttctttgccaaactcgcttatctttatctgtctgctcatataatcaacgtttttgcgctttttcttcattgttatttgactattaccttctgcttttaaacttcctgttggagttccactaggcgtcgggcgtccaacgcgtggagatgaaacaaaacgctctcaacgaagtttcactggcattcattggaaacgatgtgcgctaggtttcgtcagataaaataaaacctacatcccctctctaaccattcttatgccatgttatttttttt

SEQ ID NO: 10765 - DNA, 2591 bp, Zea Mays
atgtggtctcctcaagcaagctttgaggaggtggatgtggcatggcggcactatgagcaggccggtactggattagctgctatattcataaacctggctgttgagaacttctctggatggaaatatactgcgacatttgctataataaagcactcgtattttgtgggattctttgtgtacacagttttcaatttagccctggtcttctcttctgtatatatagtcacaaactttgctccagcagctgctggatctggtattccagagatcaaaggttacttaaatggagtggatacacatggaatcctccttttcaggacattagttgggaagatctttgggagcattggatcagttggaggtggattggctctagggaaagaagggcctcttgttcatactggggcctgcattgcttcgcttcttggacaaggtggatctgcaaagtaccacttgagttctaggtgggtacggatttttgaaagcgatcgtgataggcgagaccttctggagttgctgctgccttcagagctcctgttggtggggtactatttgccttggaggaagttacttcctggtggagaagtcatcttatgtggagagtattcttcacatctgccgtggtggccgttgtggtgcgttcagccatgaattggtgcaacagtggaaaatgcggtcattttggagctggaggttttataatatgggacatatctggaggtcaagaagattactcataccaggaattgtttcctatggcaattattggtgttatcggtggacttcttggggcattatttaatcaactcaccctctatataactaaatggcggcgaacgtgtcttcataagaaagggaaacgagtccaaatctttgaagcctgtcttatatctttggtaacatccacgatttcctttgtgttgccactactgaggaaatgcagcccatgccctaagttagaaactaattctggcatagaatgccctcatccacctggcacagatgggaattttgttaacttctattgttcacaagatagagagtacaatgatttagcaaccattttcttcaatactcaggatgatgcaatacgtaatcttttcagtgcaaaaacatttcatgaatacagtgcacaaagcctgatcactttcctggtcatgttttatttcttggctgttgtgacatttggaactgcagttccggctggccagttcgttcccggaataatgattggatctacatatggaaggcttgttggaatgtttgttgtcaagttctataagaaactaaacattgaggagggcacgtatgcactccttggtgctgcatcgtttcttggaggttcaatgagaatgactgtatctttatgtgttatcatggttgagattacaaacaacttgaaactcttgccattgatcatgcttgttcttctggtttctaaggcggttggtgacttttttaatgaagggttatatgaagagcaagcccgattaaggggcatccctttactggattccaggcctaagcaagtcatgagaaatatgaatgcaagggatgcgtgcaagaatcaaaaggttgtctgcctaccacgtgtttcaagggttgttgatatcatttctgttttgcgaactaacaagcataatggtttccctgttgttgaccgtgggcagaatggcgagtcacttgtcataggtctcatacttcgtagccacttattggtacttctacaagctaaagtagatttccagaacagtgctttcccctgtgggccaggcgtactgaacaggcacaattttagtgactttgttaaaccagcatcaagtaaaggaaagtcaattgatgatattcatttgacagaggatgaactggggttgtatttggatcttgccccatttttaaatccttcaccatacatagtgccagaggacatgtcgttggcgaaggtgtacaatctcttccgtcaacttggattgagacatatatttgttgttcctaggccttctcgtgttgtaggattgataaccagaaaagatttattacttgaggaggataacaacaatgtgatgccggagctccaatcgacgagtgggcttgctgaacggcaaaatgctcgggggtaatatacatctggaacgtcctcttcttgacaacctagttattgaatagacacgtagcagcatgtatgtcaaaataattttgatagctagcagttaaccttgcactgcatgttgggacatggcccatgggtattatacttcacatgaatgatgaagcagcagtgagcggataatgcagcatggttttggattctgccgactgttgcgcatggatgttggcgttgcgcatcattttttgctccgtcagcagtggctagggaggcgattccccggtgccgtgtgtttagattaggtgattgtaacttacaaaggcgtccatacatacacaccatccatgtatcccacggtaaatttcgaagactgtatgtataagtacatatttgttatacgatggtaaagacaaaagctatgtaggatttgcgtgctctcatgaaactatgatacgtggctataattacttccggttcccgctga

SEQ ID NO: 10766 - DNA, 2676 bp, Zea Mays
atgtggtctcctcaagcaagctttgaggaggtggatgtggcatggcggcactatgagcaggccggtactggattagctgctatattcataaacctggctgttgagaacttctctggatggaaatatactgcgacatttgctataataaagcactcgtattttgtgggattctttgtgtacacagttttcaatttagccctggtcttctcttctgtatatatagtcacaaactttgctccagcagctgctggatctggtattccagagatcaaaggttacttaaatggagtggatacacatggaatcctccttttcaggacattagttgggaagatctttgggagcattggatcagttggaggtggattggctctagggaaagaagggcctcttgttcatactggggcctgcattgcttcgcttcttggacaaggtggatctgcaaagtaccacttgagttctaggtgggtacggatttttgaaagcgatcgtgataggcgagaccttcttatttttgtttttgaggtttcacaacttgaaattctctggccaagtcatgaagctattgttaaagtgacatgtggatgtgcagctggagttgctgctgccttcagagctcctgttggtggggtactatttgccttggaggaagttacttcctggtggagaagtcatcttatgtggagagtattcttcacatctgccgtggtggccgttgtggtgcgttcagccatgaattggtgcaacagtggaaaatgcggtcattttggagctggaggttttataatatgggacatatctggaggtcaagaagattactcataccaggaattgtttcctatggcaattattggtgttatcggtggacttcttggggcattatttaatcaactcaccctctatataactaaatggcggcgaacgtgtcttcataagaaagggaaacgagtccaaatctttgaagcctgtcttatatctttggtaacatccacgatttcctttgtgttgccactactgaggaaatgcagcccatgccctaagttagaaactaattctggcatagaatgccctcatccacctggcacagatgggaattttgttaacttctattgttcacaagatagagagtacaatgatttagcaaccattttcttcaatactcaggatgatgcaatacgtaatcttttcagtgcaaaaacatttcatgaatacagtgcacaaagcctgatcactttcctggtcatgttttatttcttggctgttgtgacatttggaactgcagttccggctggccagttcgttcccggaataatgattggatctacatatggaaggcttgttggaatgtttgttgtcaagttctataagaaactaaacattgaggagggcacgtatgcactccttggtgctgcatcgtttcttggaggttcaatgagaatgactgtatctttatgtgttatcatggttgagattacaaacaacttgaaactcttgccattgatcatgcttgttcttctggtttctaaggcggttggtgacttttttaatgaagggttatatgaagagcaagcccgattaaggggcatccctttactggattccaggcctaagcaagtcatgagaaatatgaatgcaagggatgcgtgcaagaatcaaaaggttgtctgcctaccacgtgtttcaagggttgttgatatcatttctgttttgcgaactaacaagcataatggtttccctgttgttgaccgtgggcagaatggcgagtcacttgtcataggtctcatacttcgtagccacttattggtacttctacaagctaaagtagatttccagaacagtgctttcccctgtgggccaggcgtactgaacaggcacaattttagtgactttgttaaaccagcatcaagtaaaggaaagtcaattgatgatattcatttgacagaggatgaactggggttgtatttggatcttgccccatttttaaatccttcaccatacatagtgccagaggacatgtcgttggcgaaggtgtacaatctcttccgtcaacttggattgagacatatatttgttgttcctaggccttctcgtgttgtaggattgataaccagaaaagatttattacttgaggaggataacaacaatgtgatgccggagctccaatcgacgagtgggcttgctgaacggcaaaatgctcgggggtaatatacatctggaacgtcctcttcttgacaacctagttattgaatagacacgtagcagcatgtatgtcaaaataattttgatagctagcagttaaccttgcactgcatgttgggacatggcccatgggtattatacttcacatgaatgatgaagcagcagtgagcggataatgcagcatggttttggattctgccgactgttgcgcatggatgttggcgttgcgcatcattttttgctccgtcagcagtggctagggaggcgattccccggtgccgtgtgtttagattaggtgattgtaacttacaaaggcgtccatacatacacaccatccatgtatcccacggtaaatttcgaagactgtatgtataagtacatatttgttatacgatggtaaagacaaaagctatgtaggatttgcgtgctctcatgaaactatgatacgtggctataattacttccggttcccgctga

SEQ ID NO: 10767 - DNA, 2596 bp, Zea Mays
atgtggtctcctcaagcaagctttgaggaggtggatgtggcatggcggcactatgagcaggccggtactggattagctgctatattcataaacctggctgttgagaacttctctggatggaaatatactgcgacatttgctataataaagcactcgtattttgtgggattctttgtgtacacagttttcaatttagccctggtcttctcttctgtatatatagtcacaaactttgctccagcagctgctggatctggtattccagagatcaaaggttacttaaatggagtggatacacatggaatcctccttttcaggacattagttgggaagatctttgggagcattggatcagttggaggtggattggctctagggaaagaagggcctcttgttcatactggggcctgcattgcttcgcttcttggacaaggtggatctgcaaagtaccacttgagttctaggtgggtacggatttttgaaagcgatcgtgataggcgagaccttctggagttgctgctgccttcagagctcctgttggtggggtactatttgccttggaggaagttacttcctggtggagaagtcatcttatgtggagagtattcttcacatctgccgtggtggccgttgtggtgcgttcagccatgaattggtgcaacagtggaaaatgcggtcattttggagctggaggttttataatatgggacatatctggaggtcaagaagattactcataccaggaattgtttcctatggcaattattggtgttatcggtggacttcttggggcattatttaatcaactcaccctctatataactaaatggcggcgaacgtgtcttcataagaaagggaaacgagtccaaatctttgaagcctgtcttatatctttggtaacatccacgatttcctttgtgttgccactactgaggaaatgcagcccatgccctaagttagaaactaattctggcatagaatgccctcatccacctggcacagatgggaattttgttaacttctattgttcacaagatagagagtacaatgatttagcaaccattttcttcaatactcaggatgatgcaatacgtaatcttttcagtgcaaaaacatttcatgaatacagtgcacaaagcctgatcactttcctggtcatgttttatttcttggctgttgtgacatttggaactgcagttccggctggccagttcgttcccggaataatgattggatctacatatggaaggcttgttggaatgtttgttgtcaagttctataagaaactaaacattgaggagggcacgtatgcactccttggtgctgcatcgtttcttggaggttcaatgagaatgactgtatctttatgtgttatcatggttgagattacaaacaacttgaaactcttgccattgatcatgcttgttcttctggtttctaaggcggttggtgacttttttaatgaagggttatatgaagagcaagcccgattaaggggcatccctttactggattccaggcctaagcaagtcatgagaaatatgaatgcaagggatgcgtgcaagaatcaaaaggttgtctgcctaccacgtgtttcaagggttgttgatatcatttctgttttgcgaactaacaagcataatggtttccctgttgttgaccgtgggcagaatggcgagtcacttgtcataggtctcatacttcgtagccacttattggtacttctacaagctaaagtagatttccagaacagtgctttcccctgtgggccaggcgtactgaacaggcacaattttagtgactttgttaaaccagcatcaagtaaaggaaagtcaattgatgatattcatttgacagaggatgaactggggttgtatttggatcttgccccatttttaaatccttcaccatacatagtgccagaggacatgtcgttggcgaaggtgtacaatctcttccgtcaacttggattgagacatatatttgttgttcctaggccttctcgtgttgtaggattgataaccagaaaagatttattacttgaggaggataacaacaatgtgatgccggagctccaatcgacgagtgtaaggggcttgctgaacggcaaaatgctcgggggtaatatacatctggaacgtcctcttcttgacaacctagttattgaatagacacgtagcagcatgtatgtcaaaataattttgatagctagcagttaaccttgcactgcatgttgggacatggcccatgggtattatacttcacatgaatgatgaagcagcagtgagcggataatgcagcatggttttggattctgccgactgttgcgcatggatgttggcgttgcgcatcattttttgctccgtcagcagtggctagggaggcgattccccggtgccgtgtgtttagattaggtgattgtaacttacaaaggcgtccatacatacacaccatccatgtatcccacggtaaatttcgaagactgtatgtataagtacatatttgttatacgatggtaaagacaaaagctatgtaggatttgcgtgctctcatgaaactatgatacgtggctataattacttccggttcccgctga

SEQ ID NO: 10768 - DNA, 2585 bp, Zea Mays
atgtggtctcctcaagcaagctttgaggaggtggatgtggcatggcggcactatgagcaggccggtactggattagctgctatattcataaacctggctgttgagaacttctctggatggaaatatactgcgacatttgctataataaagcactcgtattttgtgggattctttgtgtacacagttttcaatttagccctggtcttctcttctgtatatatagtcacaaactttgctccagcagctgctggatctggtattccagagatcaaaggttacttaaatggagtggatacacatggaatcctccttttcaggacattagttgggaagatctttgggagcattggatcagttggaggtggattggctctagggaaagaagggcctcttgttcatactggggcctgcattgcttcgcttcttggacaaggtggatctgcaaagtaccacttgagttctaggtgggtacggatttttgaaagcgatcgtgataggcgagaccttgtgacatgtggatgtgcagctggagttgctgctgccttcagagctcctgttggtggggtactatttgccttggaggaagttacttcctggtggagaagtcatcttatgtggagagtattcttcacatctgccgtggtggccgttgtggtgcgttcagccatgaattggtgcaacagtggaaaatgcggtcattttggagctggaggttttataatatgggacatatctggaggtcaagaagattactcataccaggaattgtttcctatggcaattattggtgttatcggtggacttcttggggcattatttaatcaactcaccctctatataactaaatggcggcgaacgtgtcttcataagaaagggaaacgagtccaaatctttgaagcctgtcttatatctttggtaacatccacgatttcctttgtgttgccactactgaggaaatgcagcccatgccctaagttagaaactaattctggcatagaatgccctcatccacctggcacagatgggaattttgttaacttctattgttcacaagatagagagtacaatgatttagcaaccattttcttcaatactcaggatgatgcaatacgtaatcttttcagtgcaaaaacatttcatgaatacagtgcacaaagcctgatcactttcctggtcatgttttatttcttggctgttgtgacatttggaactgcagttccggctggccagttcgttcccggaataatgattggatctacatatggaaggcttgttggaatgtttgttgtcaagttctataagaaactaaacattgaggagggcacgtatgcactccttggtgctgcatcgtttcttggaggttcaatgagaatgactgtatctttatgtgttatcatggttgagattacaaacaacttgaaactcttgccattgatcatgcttgttcttctggtttctaagggttatatgaagagcaagcccgattaaggggcatccctttactggattccaggcctaagcaagtcatgagaaatatgaatgcaagggatgcgtgcaagaatcaaaaggttgtctgcctaccacgtgtttcaagggttgttgatatcatttctgttttgcgaactaacaagcataatggtttccctgttgttgaccgtgggcagaatggcgagtcacttgtcataggtctcatacttcgtagccacttattggtacttctacaagctaaagtagatttccagaacagtgctttcccctgtgggccaggcgtactgaacaggcacaattttagtgactttgttaaaccagcatcaagtaaaggaaagtcaattgatgatattcatttgacagaggatgaactggggttgtatttggatcttgccccatttttaaatccttcaccatacatagtgccagaggacatgtcgttggcgaaggtgtacaatctcttccgtcaacttggattgagacatatatttgttgttcctaggccttctcgtgttgtaggattgataaccagaaaagatttattacttgaggaggataacaacaatgtgatgccggagctccaatcgacgagtgggcttgctgaacggcaaaatgctcgggggtaatatacatctggaacgtcctcttcttgacaacctagttattgaatagacacgtagcagcatgtatgtcaaaataattttgatagctagcagttaaccttgcactgcatgttgggacatggcccatgggtattatacttcacatgaatgatgaagcagcagtgagcggataatgcagcatggttttggattctgccgactgttgcgcatggatgttggcgttgcgcatcattttttgctccgtcagcagtggctagggaggcgattccccggtgccgtgtgtttagattaggtgattgtaacttacaaaggcgtccatacatacacaccatccatgtatcccacggtaaatttcgaagactgtatgtataagtacatatttgttatacgatggtaaagacaaaagctatgtaggatttgcgtgctctcatgaaactatgatacgtggctataattacttccggttcccgctga

SEQ ID NO: 10769 - DNA, 2496 bp, Zea Mays
atgtggtctcctcaagcaagctttgaggaggtggatgtggcatggcggcactatgagcaggccggtactggattagctgctatattcataaacctggctgttgagaacttctctggatggaaatatactgcgacatttgctataataaagcactcgtattttgtgggattctttgtgtacacagttttcaatttagccctggtcttctcttctgtatatatagtcacaaactttgctccagcagctgctggatctggtattccagagatcaaaggttacttaaatggagtggatacacatggaatcctccttttcaggacattagttgggaagatctttgggagcattggatcagttggaggtggattggctctagggaaagaagggcctcttgttcatactggggcctgcattgcttcgcttcttggacaaggtggatctgcaaagtaccacttgagttctaggtgggtacggatttttgaaagcgatcgtgataggcgagaccttgtgacatgtggatgtgcagctggagttgctgctgccttcagagctcctgttggtggggtactatttgccttggaggaagttacttcctggtgtggagaagtcatcttatgtggagagtattcttcacatctgccgtggtggccgttgtggtgcgttcagccatgaattggtgcaacagtggaaaatgcggtcattttggagctggaggttttataatatgggacatatctggaggtcaagaagattactcataccaggaattgtttcctatggcaattattggtgttatcggtggacttcttggggcattatttaatcaactcaccctctatataactaaatggcggcgaacgtgtcttcataagaaagggaaacgagtccaaatctttgaagcctgtcttatatctttggtaacatccacgatttcctttgtgttgccactactgaggaaatgcagcccatgccctaagttagaaactaattctggcatagaatgccctcatccacctggcacagatgggaattttgttaacttctattgttcacaagatagagagtacaatgatttagcaaccattttcttcaatactcaggatgatgcaatacgtaatcttttcagtgcaaaaacatttcatgaatacagtgcacaaagcctctgcagttccggctggccagttcgttcccggaataatgattggatctacatatggaaggcttgttggaatgtttgttgtcaagttctataagaaactaaacattgaggagggcacgtatgcactccttggtgctgcatcgtttcttggaggttcaatgagaatgactgtatctttatgtgttatcatggttgagattacaaacaacttgaaactcttgccattgatcatgcttgttcttctggtttctaaggcggttggtgacttttttaatgaagggttatatgaagagcaagcccgattaaggggcatccctttactggattccaggcctaagcaagtcatgagaaatatgaatgcaagggatgcgtgcaagaatcaaaaggttgtctgcctaccacgtgtttcaagggttgttgatatcatttctgttttgcgaactaacaagcataatggtttccctgttgttgaccgtgggcagaatggcgagtcacttgtcataggtctcatacttcgtagccacttattggtacttctacaagctaaagtagatttccagaacagtgctttcccctgtgggccaggcgtactgaacagaggatgaactggggttgtatttggatcttgccccatttttaaatccttcaccatacatagtgccagaggacatgtcgttggcgaaggtgtacaatctcttccgtcaacttggattgagacatatatttgttgttcctaggccttctcgtgttgtaggattgataaccagaaaagatttattacttgaggaggataacaacaatgtgatgccggagctccaatcgacgagtgtaaggggcttgctgaacggcaaaatgctcgggggtaatatacatctggaacgtcctcttcttgacaacctagttattgaatagacacgtagcagcatgtatgtcaaaataattttgatagctagcagttaaccttgcactgcatgttgggacatggcccatgggtattatacttcacatgaatgatgaagcagcagtgagcggataatgcagcatggttttggattctgccgactgttgcgcatggatgttggcgttgcgcatcattttttgctccgtcagcagtggctagggaggcgattccccggtgccgtgtgtttagattaggtgattgtaacttacaaaggcgtccatacatacacaccatccatgtatcccacggtaaatttcgaagactgtatgtataagtacatatttgttatacgatggtaaagacaaaagctatgtaggatttgcgtgctctcatgaaactatgatacgtggctataattacttccggttcccgctga

SEQ ID NO: 10770 - DNA, 2590 bp, Zea Mays
atgtggtctcctcaagcaagctttgaggaggtggatgtggcatggcggcactatgagcaggccggtactggattagctgctatattcataaacctggctgttgagaacttctctggatggaaatatactgcgacatttgctataataaagcactcgtattttgtgggattctttgtgtacacagttttcaatttagccctggtcttctcttctgtatatatagtcacaaactttgctccagcagctgctggatctggtattccagagatcaaaggttacttaaatggagtggatacacatggaatcctccttttcaggacattagttgggaagatctttgggagcattggatcagttggaggtggattggctctagggaaagaagggcctcttgttcatactggggcctgcattgcttcgcttcttggacaaggtggatctgcaaagtaccacttgagttctaggtgggtacggatttttgaaagcgatcgtgataggcgagaccttgtgacatgtggatgtgcagctggagttgctgctgccttcagagctcctgttggtggggtactatttgccttggaggaagttacttcctggtggagaagtcatcttatgtggagagtattcttcacatctgccgtggtggccgttgtggtgcgttcagccatgaattggtgcaacagtggaaaatgcggtcattttggagctggaggttttataatatgggacatatctggaggtcaagaagattactcataccaggaattgtttcctatggcaattattggtgttatcggtggacttcttggggcattatttaatcaactcaccctctatataactaaatggcggcgaacgtgtcttcataagaaagggaaacgagtccaaatctttgaagcctgtcttatatctttggtaacatccacgatttcctttgtgttgccactactgaggaaatgcagcccatgccctaagttagaaactaattctggcatagaatgccctcatccacctggcacagatgggaattttgttaacttctattgttcacaagatagagagtacaatgatttagcaaccattttcttcaatactcaggatgatgcaatacgtaatcttttcagtgcaaaaacatttcatgaatacagtgcacaaagcctgatcactttcctggtcatgttttatttcttggctgttgtgacatttggaactgcagttccggctggccagttcgttcccggaataatgattggatctacatatggaaggcttgttggaatgtttgttgtcaagttctataagaaactaaacattgaggagggcacgtatgcactccttggtgctgcatcgtttcttggaggttcaatgagaatgactgtatctttatgtgttatcatggttgagattacaaacaacttgaaactcttgccattgatcatgcttgttcttctggtttctaagggttatatgaagagcaagcccgattaaggggcatccctttactggattccaggcctaagcaagtcatgagaaatatgaatgcaagggatgcgtgcaagaatcaaaaggttgtctgcctaccacgtgtttcaagggttgttgatatcatttctgttttgcgaactaacaagcataatggtttccctgttgttgaccgtgggcagaatggcgagtcacttgtcataggtctcatacttcgtagccacttattggtacttctacaagctaaagtagatttccagaacagtgctttcccctgtgggccaggcgtactgaacaggcacaattttagtgactttgttaaaccagcatcaagtaaaggaaagtcaattgatgatattcatttgacagaggatgaactggggttgtatttggatcttgccccatttttaaatccttcaccatacatagtgccagaggacatgtcgttggcgaaggtgtacaatctcttccgtcaacttggattgagacatatatttgttgttcctaggccttctcgtgttgtaggattgataaccagaaaagatttattacttgaggaggataacaacaatgtgatgccggagctccaatcgacgagtgtaaggggcttgctgaacggcaaaatgctcgggggtaatatacatctggaacgtcctcttcttgacaacctagttattgaatagacacgtagcagcatgtatgtcaaaataattttgatagctagcagttaaccttgcactgcatgttgggacatggcccatgggtattatacttcacatgaatgatgaagcagcagtgagcggataatgcagcatggttttggattctgccgactgttgcgcatggatgttggcgttgcgcatcattttttgctccgtcagcagtggctagggaggcgattccccggtgccgtgtgtttagattaggtgattgtaacttacaaaggcgtccatacatacacaccatccatgtatcccacggtaaatttcgaagactgtatgtataagtacatatttgttatacgatggtaaagacaaaagctatgtaggatttgcgtgctctcatgaaactatgatacgtggctataattacttccggttcccgctga

SEQ ID NO: 10771 - DNA, 2565 bp, Zea Mays
atgtggtctcctcaagcaagctttgaggaggtggatgtggcatggcggcactatgagcaggccggtactggattagctgctatattcataaacctggctgttgagaacttctctggatggaaatatactgcgacatttgctataataaagcactcgtattttgtgggattctttgtgtacacagttttcaatttagccctggtcttctcttctgtatatatagtcacaaactttgctccagcagctgctggatctggtattccagagatcaaaggttacttaaatggagtggatacacatggaatcctccttttcaggacattagttgggaagatctttgggagcattggatcagttggaggtggattggctctagggaaagaagggcctcttgttcatactggggcctgcattgcttcgcttcttggacaaggtggatctgcaaagtaccacttgagttctaggtgggtacggatttttgaaagcgatcgtgataggcgagaccttgtgacatgtggatgtgcagctggagttgctgctgccttcagagctcctgttggtggggtactatttgccttggaggaagttacttcctggtggagaagtcatcttatgtggagagtattcttcacatctgccgtggtggccgttgtggtgcgttcagccatgaattggtgcaacagtggaaaatgcggtcattttggagctggaggttttataatatgggacatatctggaggtcaagaagattactcataccaggaattgtttcctatggcaattattggtgttatcggtggacttcttggggcattatttaatcaactcaccctctatataactaaatggcggcgaacgtgtcttcataagaaagggaaacgagtccaaatctttgaagcctgtcttatatctttggtaacatccacgatttcctttgtgttgccactactgaggaaatgcagcccatgccctaagttagaaactaattctggcatagaatgccctcatccacctggcacagatgggaattttgttaacttctattgttcacaagatagagagtacaatgatttagcaaccattttcttcaatactcaggatgatgcaatacgtaatcttttcagtgcaaaaacatttcatgaatacagtgcacaaagcctctgcagttccggctggccagttcgttcccggaataatgattggatctacatatggaaggcttgttggaatgtttgttgtcaagttctataagaaactaaacattgaggagggcacgtatgcactccttggtgctgcatcgtttcttggaggttcaatgagaatgactgtatctttatgtgttatcatggttgagattacaaacaacttgaaactcttgccattgatcatgcttgttcttctggtttctaaggcggttggtgacttttttaatgaagggttatatgaagagcaagcccgattaaggggcatccctttactggattccaggcctaagcaagtcatgagaaatatgaatgcaagggatgcgtgcaagaatcaaaaggttgtctgcctaccacgtgtttcaagggttgttgatatcatttctgttttgcgaactaacaagcataatggtttccctgttgttgaccgtgggcagaatggcgagtcacttgtcataggtctcatacttcgtagccacttattggtacttctacaagctaaagtagatttccagaacagtgctttcccctgtgggccaggcgtactgaacaggcacaattttagtgactttgttaaaccagcatcaagtaaaggaaagtcaattgatgatattcatttgacagaggatgaactggggttgtatttggatcttgccccatttttaaatccttcaccatacatagtgccagaggacatgtcgttggcgaaggtgtacaatctcttccgtcaacttggattgagacatatatttgttgttcctaggccttctcgtgttgtaggattgataaccagaaaagatttattacttgaggaggataacaacaatgtgatgccggagctccaatcgacgagtgtaaggggcttgctgaacggcaaaatgctcgggggtaatatacatctggaacgtcctcttcttgacaacctagttattgaatagacacgtagcagcatgtatgtcaaaataattttgatagctagcagttaaccttgcactgcatgttgggacatggcccatgggtattatacttcacatgaatgatgaagcagcagtgagcggataatgcagcatggttttggattctgccgactgttgcgcatggatgttggcgttgcgcatcattttttgctccgtcagcagtggctagggaggcgattccccggtgccgtgtgtttagattaggtgattgtaacttacaaaggcgtccatacatacacaccatccatgtatcccacggtaaatttcgaagactgtatgtataagtacatatttgttatacgatggtaaagacaaaagctatgtaggatttgcgtgctctcatgaaactatgatacgtggctataattacttccggttcccgctga

SEQ ID NO: 10772 - DNA, 2539 bp, Zea Mays
atgtggtctcctcaagcaagctttgaggaggtggatgtggcatggcggcactatgagcaggccggtactggattagctgctatattcataaacctggctgttgagaacttctctggatggaaatatactgcgacatttgctataataaagcactcgtattttgtgggattctttgtgtacacagttttcaatttagccctggtcttctcttctgtatatatagtcacaaactttgctccagcagctgctggatctggtattccagagatcaaaggttacttaaatggagtggatacacatggaatcctccttttcaggacattagttgggaagatctttgggagcattggatcagttggaggtggattggctctagggaaagaagggcctcttgttcatactggggcctgcattgcttcgcttcttggacaaggtggatctgcaaagtaccacttgagttctaggtgggtacggatttttgaaagcgatcgtgataggcgagaccttgtgacatgtggatgtgcagctggagttgctgctgccttcagagctcctgttggtggggtactatttgccttggaggaagttacttcctggtggagaagtcatcttatgtggagagtattcttcacatctgccgtggtggccgttgtggtgcgttcagccatgaattggtgcaacagtggaaaatgcggtcattttggagctggaggttttataatatgggacatatctggaggtcaagaagattactcataccaggaattgtttcctatggcaattattggtgttatcggtggacttcttggggcattatttaatcaactcaccctctatataactaaatggcggcgaacgtgtcttcataagaaagggaaacgagtccaaatctttgaagcctgtcttatatctttggtaacatccacgatttcctttgtgttgccactactgaggaaatgcagcccatgccctaagttagaaactaattctggcatagaatgccctcatccacctggcacagatgggaattttgttaacttctattgttcacaagatagagagtacaatgatttagcaaccattttcttcaatactcaggatgatgcaatacgtaatcttttcagtgcaaaaacatttcatgaatacagtgcacaaagcctgatcactttcctggtcatgttttatttcttggctgttgtgacatttggaactgcagttccggctggccagttcgttcccggaataatgattggatctacatatggaaggcttgttggaatgtttgttgtcaagttctataagaaactaaacattgaggagggcacgtatgcactccttggtgctgcatcgtttcttggaggttcaatgagaatgactgtatctttatgtgttatcatggttgagattacaaacaacttgaaactcttgccattgatcatgcttgttcttctggtttctaaggcggttggtgacttttttaatgaagggttatatgaagagcaagcccgattaaggggcatccctttactggattccaggcctaagcaagtcatgagaaatatgaatgcaagggatgcgtgcaagaatcaaaaggttgtctgcctaccacgtgtttcaagggttgttgatatcatttctgttttgcgaactaacaagcataatggtttccctgttgttgaccgtgggcagaatggcgagtcacttgtcataggtctcatacttcgtagccacttattggtacttctacaagctaaagtagatttccagaacagtgctttcccctgtgggccaggcgtactgaacagaggatgaactggggttgtatttggatcttgccccatttttaaatccttcaccatacatagtgccagaggacatgtcgttggcgaaggtgtacaatctcttccgtcaacttggattgagacatatatttgttgttcctaggccttctcgtgttgtaggattgataaccagaaaagatttattacttgaggaggataacaacaatgtgatgccggagctccaatcgacgagtgggcttgctgaacggcaaaatgctcgggggtaatatacatctggaacgtcctcttcttgacaacctagttattgaatagacacgtagcagcatgtatgtcaaaataattttgatagctagcagttaaccttgcactgcatgttgggacatggcccatgggtattatacttcacatgaatgatgaagcagcagtgagcggataatgcagcatggttttggattctgccgactgttgcgcatggatgttggcgttgcgcatcattttttgctccgtcagcagtggctagggaggcgattccccggtgccgtgtgtttagattaggtgattgtaacttacaaaggcgtccatacatacacaccatccatgtatcccacggtaaatttcgaagactgtatgtataagtacatatttgttatacgatggtaaagacaaaagctatgtaggatttgcgtgctctcatgaaactatgatacgtggctataattacttccggttcccgctga

SEQ ID NO: 10773 - DNA, 2660 bp, Zea Mays
atgtggtctcctcaagcaagctttgaggaggtggatgtggcatggcggcactatgagcaggccggtactggattagctgctatattcataaacctggctgttgagaacttctctggatggaaatatactgcgacatttgctataataaagcactcgtattttgtgggattctttgtgtacacagttttcaatttagccctggtcttctcttctgtatatatagtcacaaactttgctccagcagctgctggatctggtattccagagatcaaaggttacttaaatggagtggatacacatggaatcctccttttcaggacattagttgggaagatctttgggagcattggatcagttggaggtggattggctctagggaaagaagggcctcttgttcatactggggcctgcattgcttcgcttcttggacaaggtggatctgcaaagtaccacttgagttctaggtgggtacggatttttgaaagcgatcgtgataggcgagaccttcttatttttgtttttgaggtttcacaacttgaaattctctggccaagtcatgaagctattgttaaagtgacatgtggatgtgcagctggagttgctgctgccttcagagctcctgttggtggggtactatttgccttggaggaagttacttcctggtggagaagtcatcttatgtggagagtattcttcacatctgccgtggtggccgttgtggtgcgttcagccatgaattggtgcaacagtggaaaatgcggtcattttggagctggaggttttataatatgggacatatctggaggtcaagaagattactcataccaggaattgtttcctatggcaattattggtgttatcggtggacttcttggggcattatttaatcaactcaccctctatataactaaatggcggcgaacgtgtcttcataagaaagggaaacgagtccaaatctttgaagcctgtcttatatctttggtaacatccacgatttcctttgtgttgccactactgaggaaatgcagcccatgccctaagttagaaactaattctggcatagaatgccctcatccacctggcacagatgggaattttgttaacttctattgttcacaagatagagagtacaatgatttagcaaccattttcttcaatactcaggatgatgcaatacgtaatcttttcagtgcaaaaacatttcatgaatacagtgcacaaagcctgatcactttcctggtcatgttttatttcttggctgttgtgacatttggaactgcagttccggctggccagttcgttcccggaataatgattggatctacatatggaaggcttgttggaatgtttgttgtcaagttctataagaaactaaacattgaggagggcacgtatgcactccttggtgctgcatcgtttcttggaggttcaatgagaatgactgtatctttatgtgttatcatggttgagattacaaacaacttgaaactcttgccattgatcatgcttgttcttctggtttctaaggcggttggtgacttttttaatgaagggttatatgaagagcaagcccgattaaggggcatccctttactggattccaggcctaagcaagtcatgagaaatatgaatgcaagggatgcgtgcaagaatcaaaaggttgtctgcctaccacgtgtttcaagggttgttgatatcatttctgttttgcgaactaacaagcataatggtttccctgttgttgaccgtgggcagaatggcgagtcacttgtcataggtctcatacttcgtagccacttattggtacttctacaagctaaagtagatttccagaacagtgctttcccctgtgggccaggcgtactgaacaggtttttgtttttctatttataagccaagaatagcacatccaatgcacgttttctgaggatgaactggggttgtatttggatcttgccccatttttaaatccttcaccatacatagtgccagaggacatgtcgttggcgaaggtgtacaatctcttccgtcaacttggattgagacatatatttgttgttcctaggccttctcgtgttgtaggattgataaccagaaaagatttattacttgaggaggataacaacaatgtgatgccggagctccaatcgacgagtgggcttgctgaacggcaaaatgctcgggggtaatatacatctggaacgtcctcttcttgacaacctagttattgaatagacacgtagcagcatgtatgtcaaaataattttgatagctagcagttaaccttgcactgcatgttgggacatggcccatgggtattatacttcacatgaatgatgaagcagcagtgagcggataatgcagcatggttttggattctgccgactgttgcgcatggatgttggcgttgcgcatcattttttgctccgtcagcagtggctagggaggcgattccccggtgccgtgtgtttagattaggtgattgtaacttacaaaggcgtccatacatacacaccatccatgtatcccacggtaaatttcgaagactgtatgtataagtacatatttgttatacgatggtaaagacaaaagctatgtaggatttgcgtgctctcatgaaactatgatacgtggctataattacttccggttcccgctga

SEQ ID NO: 10774 - DNA, 2560 bp, Zea Mays
atgtggtctcctcaagcaagctttgaggaggtggatgtggcatggcggcactatgagcaggccggtactggattagctgctatattcataaacctggctgttgagaacttctctggatggaaatatactgcgacatttgctataataaagcactcgtattttgtgggattctttgtgtacacagttttcaatttagccctggtcttctcttctgtatatatagtcacaaactttgctccagcagctgctggatctggtattccagagatcaaaggttacttaaatggagtggatacacatggaatcctccttttcaggacattagttgggaagatctttgggagcattggatcagttggaggtggattggctctagggaaagaagggcctcttgttcatactggggcctgcattgcttcgcttcttggacaaggtggatctgcaaagtaccacttgagttctaggtgggtacggatttttgaaagcgatcgtgataggcgagaccttgtgacatgtggatgtgcagctggagttgctgctgccttcagagctcctgttggtggggtactatttgccttggaggaagttacttcctggtggagaagtcatcttatgtggagagtattcttcacatctgccgtggtggccgttgtggtgcgttcagccatgaattggtgcaacagtggaaaatgcggtcattttggagctggaggttttataatatgggacatatctggaggtcaagaagattactcataccaggaattgtttcctatggcaattattggtgttatcggtggacttcttggggcattatttaatcaactcaccctctatataactaaatggcggcgaacgtgtcttcataagaaagggaaacgagtccaaatctttgaagcctgtcttatatctttggtaacatccacgatttcctttgtgttgccactactgaggaaatgcagcccatgccctaagttagaaactaattctggcatagaatgccctcatccacctggcacagatgggaattttgttaacttctattgttcacaagatagagagtacaatgatttagcaaccattttcttcaatactcaggatgatgcaatacgtaatcttttcagtgcaaaaacatttcatgaatacagtgcacaaagcctctgcagttccggctggccagttcgttcccggaataatgattggatctacatatggaaggcttgttggaatgtttgttgtcaagttctataagaaactaaacattgaggagggcacgtatgcactccttggtgctgcatcgtttcttggaggttcaatgagaatgactgtatctttatgtgttatcatggttgagattacaaacaacttgaaactcttgccattgatcatgcttgttcttctggtttctaaggcggttggtgacttttttaatgaagggttatatgaagagcaagcccgattaaggggcatccctttactggattccaggcctaagcaagtcatgagaaatatgaatgcaagggatgcgtgcaagaatcaaaaggttgtctgcctaccacgtgtttcaagggttgttgatatcatttctgttttgcgaactaacaagcataatggtttccctgttgttgaccgtgggcagaatggcgagtcacttgtcataggtctcatacttcgtagccacttattggtacttctacaagctaaagtagatttccagaacagtgctttcccctgtgggccaggcgtactgaacaggcacaattttagtgactttgttaaaccagcatcaagtaaaggaaagtcaattgatgatattcatttgacagaggatgaactggggttgtatttggatcttgccccatttttaaatccttcaccatacatagtgccagaggacatgtcgttggcgaaggtgtacaatctcttccgtcaacttggattgagacatatatttgttgttcctaggccttctcgtgttgtaggattgataaccagaaaagatttattacttgaggaggataacaacaatgtgatgccggagctccaatcgacgagtgggcttgctgaacggcaaaatgctcgggggtaatatacatctggaacgtcctcttcttgacaacctagttattgaatagacacgtagcagcatgtatgtcaaaataattttgatagctagcagttaaccttgcactgcatgttgggacatggcccatgggtattatacttcacatgaatgatgaagcagcagtgagcggataatgcagcatggttttggattctgccgactgttgcgcatggatgttggcgttgcgcatcattttttgctccgtcagcagtggctagggaggcgattccccggtgccgtgtgtttagattaggtgattgtaacttacaaaggcgtccatacatacacaccatccatgtatcccacggtaaatttcgaagactgtatgtataagtacatatttgttatacgatggtaaagacaaaagctatgtaggatttgcgtgctctcatgaaactatgatacgtggctataattacttccggttcccgctga

SEQ ID NO: 10775 - DNA, 2660 bp, Zea Mays
ggcttctccagcggtggcgacgtcgaccttgacctcaatgccggcatgtggtctcctcaagcaagctttgaggaggtggatgtggcatggcggcactatgagcaggccggtactggattagctgctatattcataaacctggctgttgagaacttctctggatggaaatatactgcgacatttgctataataaagcactcgtattttgtgggattctttgtgtacacagttttcaatttagccctggtcttctcttctgtatatatagtcacaaactttgctccagcagctgctggatctggtattccagagatcaaaggttacttaaatggagtggatacacatggaatcctccttttcaggacattagttgggaagatctttgggagcattggatcagttggaggtggattggctctagggaaagaagggcctcttgttcatactggggcctgcattgcttcgcttcttggacaaggtggatctgcaaagtaccacttgagttctaggtgggtacggatttttgaaagcgatcgtgataggcgagaccttgtgacatgtggatgtgcagctggagttgctgctgccttcagagctcctgttggtggggtactatttgccttggaggaagttacttcctggtggagaagtcatcttatgtggagagtattcttcacatctgccgtggtggccgttgtggtgcgttcagccatgaattggtgcaacagtggaaaatgcggtcattttggagctggaggttttataatatgggacatatctggaggtcaagaagattactcataccaggaattgtttcctatggcaattattggtgttatcggtggacttcttggggcattatttaatcaactcaccctctatataactaaatggcggcgaacgtgtcttcataagaaagggaaacgagtccaaatctttgaagcctgtcttatatctttggtaacatccacgatttcctttgtgttgccactactgaggaaatgcagcccatgccctaagttagaaactaattctggcatagaatgccctcatccacctggcacagatgggaattttgttaacttctattgttcacaagatagagagtacaatgatttagcaaccattttcttcaatactcaggatgatgcaatacgtaatcttttcagtgcaaaaacatttcatgaatacagtgcacaaagcctgatcactttcctggtcatgttttatttcttggctgttgtgacatttggaactgcagttccggctggccagttcgttcccggaataatgattggatctacatatggaaggcttgttggaatgtttgttgtcaagttctataagaaactaaacattgaggagggcacgtatgcactccttggtgctgcatcgtttcttggaggttcaatgagaatgactgtatctttatgtgttatcatggttgagattacaaacaacttgaaactcttgccattgatcatgcttgttcttctggtttctaaggcggttggtgacttttttaatgaagggttatatgaagagcaagcccgattaaggggcatccctttactggattccaggcctaagcaagtcatgagaaatatgaatgcaagggatgcgtgcaagaatcaaaaggttgtctgcctaccacgtgtttcaagggttgttgatatcatttctgttttgcgaactaacaagcataatggtttccctgttgttgaccgtgggcagaatggcgagtcacttgtcataggtctcatacttcgtagccacttattggtacttctacaagctaaagtagatttccagaacagtgctttcccctgtgggccaggcgtactgaacaggcacaattttagtgactttgttaaaccagcatcaagtaaaggaaagtcaattgatgatattcatttgacagaggatgaactggggttgtatttggatcttgccccatttttaaatccttcaccatacatagtgccagaggacatgtcgttggcgaaggtgtacaatctcttccgtcaacttggattgagacatatatttgttgttcctaggccttctcgtgttgtaggattgataaccagaaaagatttattacttgaggaggataacaacaatgtgatgccggagctccaatcgacgagtgtaaggggcttgctgaacggcaaaatgctcgggggtaatatacatctggaacgtcctcttcttgacaacctagttattgaatagacacgtagcagcatgtatgtcaaaataattttgatagctagcagttaaccttgcactgcatgttgggacatggcccatgggtattatacttcacatgaatgatgaagcagcagtgagcggataatgcagcatggttttggattctgccgactgttgcgcatggatgttggcgttgcgcatcattttttgctccgtcagcagtggctagggaggcgattccccggtgccgtgtgtttagattaggtgattgtaacttacaaaggcgtccatacatacacaccatccatgtatcccacggtaaatttcgaagactgtatgtataagtacatatttgttatacgatggtaaagacaaaagctatgtaggatttgcgtgctctcatgaaactatgatacgtggctataattacttccggttcccgctga

SEQ ID NO: 10776 - DNA, 2673 bp, Zea Mays
ctcagaagtgcatgatgcggcttctccagcggtggcgacgtcgaccttgacctcaatgccggcatgtggtctcctcaagcaagctttgaggaggtggatgtggcatggcggcactatgagcaggccggtactggattagctgctatattcataaacctggctgttgagaacttctctggatggaaatatactgcgacatttgctataataaagcactcgtattttgtgggattctttgtgtacacagttttcaatttagccctggtcttctcttctgtatatatagtcacaaactttgctccagcagctgctggatctggtattccagagatcaaaggttacttaaatggagtggatacacatggaatcctccttttcaggacattagttgggaagatctttgggagcattggatcagttggaggtggattggctctagggaaagaagggcctcttgttcatactggggcctgcattgcttcgcttcttggacaaggtggatctgcaaagtaccacttgagttctaggtgggtacggatttttgaaagcgatcgtgataggcgagaccttgtgacatgtggatgtgcagctggagttgctgctgccttcagagctcctgttggtggggtactatttgccttggaggaagttacttcctggtggagaagtcatcttatgtggagagtattcttcacatctgccgtggtggccgttgtggtgcgttcagccatgaattggtgcaacagtggaaaatgcggtcattttggagctggaggttttataatatgggacatatctggaggtcaagaagattactcataccaggaattgtttcctatggcaattattggtgttatcggtggacttcttggggcattatttaatcaactcaccctctatataactaaatggcggcgaacgtgtcttcataagaaagggaaacgagtccaaatctttgaagcctgtcttatatctttggtaacatccacgatttcctttgtgttgccactactgaggaaatgcagcccatgccctaagttagaaactaattctggcatagaatgccctcatccacctggcacagatgggaattttgttaacttctattgttcacaagatagagagtacaatgatttagcaaccattttcttcaatactcaggatgatgcaatacgtaatcttttcagtgcaaaaacatttcatgaatacagtgcacaaagcctgatcactttcctggtcatgttttatttcttggctgttgtgacatttggaactgcagttccggctggccagttcgttcccggaataatgattggatctacatatggaaggcttgttggaatgtttgttgtcaagttctataagaaactaaacattgaggagggcacgtatgcactccttggtgctgcatcgtttcttggaggttcaatgagaatgactgtatctttatgtgttatcatggttgagattacaaacaacttgaaactcttgccattgatcatgcttgttcttctggtttctaaggcggttggtgacttttttaatgaagggttatatgaagagcaagcccgattaaggggcatccctttactggattccaggcctaagcaagtcatgagaaatatgaatgcaagggatgcgtgcaagaatcaaaaggttgtctgcctaccacgtgtttcaagggttgttgatatcatttctgttttgcgaactaacaagcataatggtttccctgttgttgaccgtgggcagaatggcgagtcacttgtcataggtctcatacttcgtagccacttattggtacttctacaagctaaagtagatttccagaacagtgctttcccctgtgggccaggcgtactgaacaggcacaattttagtgactttgttaaaccagcatcaagtaaaggaaagtcaattgatgatattcatttgacagaggatgaactggggttgtatttggatcttgccccatttttaaatccttcaccatacatagtgccagaggacatgtcgttggcgaaggtgtacaatctcttccgtcaacttggattgagacatatatttgttgttcctaggccttctcgtgttgtaggattgataaccagaaaagatttattacttgaggaggataacaacaatgtgatgccggagctccaatcgacgagtgggcttgctgaacggcaaaatgctcgggggtaatatacatctggaacgtcctcttcttgacaacctagttattgaatagacacgtagcagcatgtatgtcaaaataattttgatagctagcagttaaccttgcactgcatgttgggacatggcccatgggtattatacttcacatgaatgatgaagcagcagtgagcggataatgcagcatggttttggattctgccgactgttgcgcatggatgttggcgttgcgcatcattttttgctccgtcagcagtggctagggaggcgattccccggtgccgtgtgtttagattaggtgattgtaacttacaaaggcgtccatacatacacaccatccatgtatcccacggtaaatttcgaagactgtatgtataagtacatatttgttatacgatggtaaagacaaaagctatgtaggatttgcgtgctctcatgaaactatgatacgtggctataattacttccggttcccgctga

SEQ ID NO: 10777 - DNA, 2668 bp, Zea Mays
atggcgcggctcgcgtggacgcgcctccccaccgccgacggggagggggcgggcccctccacttccgaggccgcggacgacgaactcttatcgggcgctgccatagagagcctcgactacgaggtcatcgagaactacgcgtaccgggaggagcaggcgcagcggagcaagttctgggtgccctactacgtcatgctcaagtggctgttcgctctgctgatcggcgttggtactggattagctgctatattcataaacctggctgttgagaacttctctggatggaaatatactgcgacatttgctataataaagcactcgtattttgtgggattctttgtgtacacagttttcaatttagccctggtcttctcttctgtatatatagtcacaaactttgctccagcagctgctggatctggtattccagagatcaaaggttacttaaatggagtggatacacatggaatcctccttttcaggacattagttgggaagatctttgggagcattggatcagttggaggtggattggctctagggaaagaagggcctcttgttcatactggggcctgcattgcttcgcttcttggacaaggtggatctgcaaagtaccacttgagttctagctggagttgctgctgccttcagagctcctgttggtggggtactatttgccttggaggaagttacttcctggtggagaagtcatcttatgtggagagtattcttcacatctgccgtggtggccgttgtggtgcgttcagccatgaattggtgcaacagtggaaaatgcggtcattttggagctggaggttttataatatgggacatatctggaggtcaagaagattactcataccaggaattgtttcctatggcaattattggtgttatcggtggacttcttggggcattatttaatcaactcaccctctatataactaaatggcggcgaacgtgtcttcataagaaagggaaacgagtccaaatctttgaagcctgtcttatatctttggtaacatccacgatttcctttgtgttgccactactgaggaaatgcagcccatgccctaagttagaaactaattctggcatagaatgccctcatccacctggcacagatgggaattttgttaacttctattgttcacaagatagagagtacaatgatttagcaaccattttcttcaatactcaggatgatgcaatacgtaatcttttcagtgcaaaaacatttcatgaatacagtgcacaaagcctctgcagttccggctggccagttcgttcccggaataatgattggatctacatatggaaggcttgttggaatgtttgttgtcaagttctataagaaactaaacattgaggagggcacgtatgcactccttggtgctgcatcgtttcttggaggttcaatgagaatgactgtatctttatgtgttatcatggttgagattacaaacaacttgaaactcttgccattgatcatgcttgttcttctggtttctaaggcggttggtgacttttttaatgaagggttatatgaagagcaagcccgattaaggggcatccctttactggattccaggcctaagcaagtcatgagaaatatgaatgcaagggatgcgtgcaagaatcaaaaggttgtctgcctaccacgtgtttcaagggttgttgatatcatttctgttttgcgaactaacaagcataatggtttccctgttgttgaccgtgggcagaatggcgagtcacttgtcataggtctcatacttcgtagccacttattggtacttctacaagctaaagtagatttccagaacagtgctttcccctgtgggccaggcgtactgaacaggcacaattttagtgactttgttaaaccagcatcaagtaaaggaaagtcaattgatgatattcatttgacagaggatgaactggggttgtatttggatcttgccccatttttaaatccttcaccatacatagtgccagaggacatgtcgttggcgaaggtgtacaatctcttccgtcaacttggattgagacatatatttgttgttcctaggccttctcgtgttgtaggattgataaccagaaaagatttattacttgaggaggataacaacaatgtgatgccggagctccaatcgacgagtgtaaggggcttgctgaacggcaaaatgctcgggggtaatatacatctggaacgtcctcttcttgacaacctagttattgaatagacacgtagcagcatgtatgtcaaaataattttgatagctagcagttaaccttgcactgcatgttgggacatggcccatgggtattatacttcacatgaatgatgaagcagcagtgagcggataatgcagcatggttttggattctgccgactgttgcgcatggatgttggcgttgcgcatcattttttgctccgtcagcagtggctagggaggcgattccccggtgccgtgtgtttagattaggtgattgtaacttacaaaggcgtccatacatacacaccatccatgtatcccacggtaaatttcgaagactgtatgtataagtacatatttgttatacgatggtaaagacaaaagctatgtaggatttgcgtgctctcatgaaactatgatacgtggctataattacttccggttcccgctga

SEQ ID NO: 10778 - DNA, 2676 bp, Zea Mays
cgacgttcccgacggcatcgggatggcgcggctcgcgtggacgcgcctccccaccgccgacggggagggggcgggcccctccacttccgaggccgcggacgacgaactcttatcgggcgctgccatagagagcctcgactacgaggtcatcgagaactacgcgtaccgggaggagcaggcgcagcggagcaagttctgggtgccctactacgtcatgctcaagtggctgttcgctctgctgatcggcgttggtactggattagctgctatattcataaacctggctgttgagaacttctctggatggaaatatactgcgacatttgctataataaagcactcgtattttgtgggattctttgtgtacacagttttcaatttagccctggtcttctcttctgtatatatagtcacaaactttgctccagcagctgctggatctggtattccagagatcaaaggttacttaaatggagtggatacacatggaatcctccttttcaggacattagttgggaagatctttgggagcattggatcagttggaggtggattggctctagggaaagaagggcctcttgttcatactggggcctgcattgcttcgcttcttggacaaggtggatctgcaaagtaccacttgagttctaggtgggtacggatttttgaaagcgatcgtgataggcgagaccttgtgacatgtggatgtgcagctggagttgctgctgccttcagagctcctgttggtggggtactatttgccttggaggaagttacttcctggtggagaagtcatcttatgtggagagtattcttcacatctgccgtggtggccgttgtggtgcgttcagccatgaattggtgcaacagtggaaaatgcggtcattttggagctggaggttttataatatgggacatatctggaggtcaagaagattactcataccaggaattgtttcctatggcaattattggtgttatcggtggacttcttggggcattatttaatcaactcaccctctatataactaaatggcggcgaacgtgtcttcataagaaagggaaacgagtccaaatctttgaagcctgtcttatatctttggtaacatccacgatttcctttgtgttgccactactgaggaaatgcagcccatgccctaagttagaaactaattctggcatagaatgccctcatccacctggcacagatgggaattttgttaacttctattgttcacaagatagagagtacaatgatttagcaaccattttcttcaatactcaggatgatgcaatacgtaatcttttcagtgcaaaaacatttcatgaatacagtgcacaaagcctctgcagttccggctggccagttcgttcccggaataatgattggatctacatatggaaggcttgttggaatgtttgttgtcaagttctataagaaactaaacattgaggagggcacgtatgcactccttggtgctgcatcgtttcttggaggttcaatgagaatgactgtatctttatgtgttatcatggttgagattacaaacaacttgaaactcttgccattgatcatgcttgttcttctggtttctaaggcggttggtgacttttttaatgaagggttatatgaagagcaagcccgattaaggggcatccctttactggattccaggcctaagcaagtcatgagaaatatgaatgcaagggatgcgtgcaagaatcaaaaggttgtctgcctaccacgtgtttcaagggttgttgatatcatttctgttttgcgaactaacaagcataatggtttccctgttgttgaccgtgggcagaatggcgagtcacttgtcataggtctcatacttcgtagccacttattggtacttctacaagctaaagtagatttccagaacagtgctttcccctgtgggccaggcgtactgaacagaggatgaactggggttgtatttggatcttgccccatttttaaatccttcaccatacatagtgccagaggacatgtcgttggcgaaggtgtacaatctcttccgtcaacttggattgagacatatatttgttgttcctaggccttctcgtgttgtaggattgataaccagaaaagatttattacttgaggaggataacaacaatgtgatgccggagctccaatcgacgagtgggcttgctgaacggcaaaatgctcgggggtaatatacatctggaacgtcctcttcttgacaacctagttattgaatagacacgtagcagcatgtatgtcaaaataattttgatagctagcagttaaccttgcactgcatgttgggacatggcccatgggtattatacttcacatgaatgatgaagcagcagtgagcggataatgcagcatggttttggattctgccgactgttgcgcatggatgttggcgttgcgcatcattttttgctccgtcagcagtggctagggaggcgattccccggtgccgtgtgtttagattaggtgattgtaacttacaaaggcgtccatacatacacaccatccatgtatcccacggtaaatttcgaagactgtatgtataagtacatatttgttatacgatggtaaagacaaaagctatgtaggatttgcgtgctctcatgaaactatgatacgtggctataattacttccggttcccgctga

SEQ ID NO: 10779 - DNA, 2822 bp, Zea Mays
cccgatccgatgctctccggcgtcgaccacgacgttcccgacggcatcgggatggcgcggctcgcgtggacgcgcctccccaccgccgacggggagggggcgggcccctccacttccgaggccgcggacgacgaactcttatcgggcgctgccatagagagcctcgactacgaggtcatcgagaactacgcgtaccgggaggagcaggcgcagcggagcaagttctgggtgccctactacgtcatgctcaagtggctgttcgctctgctgatcggcgttggtactggattagctgctatattcataaacctggctgttgagaacttctctggatggaaatatactgcgacatttgctataataaagcactcgtattttgtgggattctttgtgtacacagttttcaatttagccctggtcttctcttctgtatatatagtcacaaactttgctccagcagctgctggatctggtattccagagatcaaaggttacttaaatggagtggatacacatggaatcctccttttcaggacattagttgggaagatctttgggagcattggatcagttggaggtggattggctctagggaaagaagggcctcttgttcatactggggcctgcattgcttcgcttcttggacaaggtggatctgcaaagtaccacttgagttctaggtgggtacggatttttgaaagcgatcgtgataggcgagaccttgtgacatgtggatgtgcagctggagttgctgctgccttcagagctcctgttggtggggtactatttgccttggaggaagttacttcctggtggagaagtcatcttatgtggagagtattcttcacatctgccgtggtggccgttgtggtgcgttcagccatgaattggtgcaacagtggaaaatgcggtcattttggagctggaggttttataatatgggacatatctggaggtcaagaagattactcataccaggaattgtttcctatggcaattattggtgttatcggtggacttcttggggcattatttaatcaactcaccctctatataactaaatggcggcgaacgtgtcttcataagaaagggaaacgagtccaaatctttgaagcctgtcttatatctttggtaacatccacgatttcctttgtgttgccactactgaggaaatgcagcccatgccctaagttagaaactaattctggcatagaatgccctcatccacctggcacagatgggaattttgttaacttctattgttcacaagatagagagtacaatgatttagcaaccattttcttcaatactcaggatgatgcaatacgtaatcttttcagtgcaaaaacatttcatgaatacagtgcacaaagcctgatcactttcctggtcatgttttatttcttggctgttgtgacatttggaactgcagttccggctggccagttcgttcccggaataatgattggatctacatatggaaggcttgttggaatgtttgttgtcaagttctataagaaactaaacattgaggagggtatgcactccttggtgctgcatcgtttcttggaggttcaatgagaatgactgtatctttatgtgttatcatggttgagattacaaacaacttgaaactcttgccattgatcatgcttgttcttctggtttctaaggcggttggtgacttttttaatgaagggttatatgaagagcaagcccgattaaggggcatccctttactggattccaggcctaagcaagtcatgagaaatatgaatgcaagggatgcgtgcaagaatcaaaaggttgtctgcctaccacgtgtttcaagggttgttgatatcatttctgttttgcgaactaacaagcataatggtttccctgttgttgaccgtgggcagaatggcgagtcacttgtcataggtctcatacttcgtagccacttattggtacttctacaagctaaagtagatttccagaacagtgctttcccctgtgggccaggcgtactgaacaggcacaattttagtgactttgttaaaccagcatcaagtaaaggaaagtcaattgatgatattcatttgacagaggatgaactggggttgtatttggatcttgccccatttttaaatccttcaccatacatagtgccagaggacatgtcgttggcgaaggtgtacaatctcttccgtcaacttggattgagacatatatttgttgttcctaggccttctcgtgttgtaggattgataaccagaaaagatttattacttgaggaggataacaacaatgtgatgccggagctccaatcgacgagtgggcttgctgaacggcaaaatgctcgggggtaatatacatctggaacgtcctcttcttgacaacctagttattgaatagacacgtagcagcatgtatgtcaaaataattttgatagctagcagttaaccttgcactgcatgttgggacatggcccatgggtattatacttcacatgaatgatgaagcagcagtgagcggataatgcagcatggttttggattctgccgactgttgcgcatggatgttggcgttgcgcatcattttttgctccgtcagcagtggctagggaggcgattccccggtgccgtgtgtttagattaggtgattgtaacttacaaaggcgtccatacatacacaccatccatgtatcccacggtaaatttcgaagactgtatgtataagtacatatttgttatacgatggtaaagacaaaagctatgtaggatttgcgtgctctcatgaaactatgatacgtggctataattacttccggttcccgctga

SEQ ID NO: 10780 - DNA, 2866 bp, Zea Mays
ctttccctaccccgatcgagcgtgcgtcaaggtcgggatccggcgccgccgcatcccgatccgatgctctccggcgtcgaccacgacgttcccgacggcatcgggatggcgcggctcgcgtggacgcgcctccccaccgccgacggggagggggcgggcccctccacttccgaggccgcggacgacgaactcttatcgggcgctgccatagagagcctcgactacgaggtcatcgagaactacgcgtaccgggaggagcaggcgcagcggagcaagttctgggtgccctactacgtcatgctcaagtggctgttcgctctgctgatcggcgttggtactggattagctgctatattcataaacctggctgttgagaacttctctggatggaaatatactgcgacatttgctataataaagcactcgtattttgtgggattctttgtgtacacagttttcaatttagccctggtcttctcttctgtatatatagtcacaaactttgctccagcagctgctggatctggtattccagagatcaaaggttacttaaatggagtggatacacatggaatcctccttttcaggacattagttgggaagatctttgggagcattggatcagttggaggtggattggctctagggaaagaagggcctcttgttcatactggggcctgcattgcttcgcttcttggacaaggtggatctgcaaagtaccacttgagttctaggtgggtacggatttttgaaagcgatcgtgataggcgagaccttctggagttgctgctgccttcagagctcctgttggtggggtactatttgccttggaggaagttacttcctggtggagaagtcatcttatgtggagagtattcttcacatctgccgtggtggccgttgtggtgcgttcagccatgaattggtgcaacagtggaaaatgcggtcattttggagctggaggttttataatatgggacatatctggaggtcaagaagattactcataccaggaattgtttcctatggcaattattggtgttatcggtggacttcttggggcattatttaatcaactcaccctctatataactaaatggcggcgaacgtgtcttcataagaaagggaaacgagtccaaatctttgaagcctgtcttatatctttggtaacatccacgatttcctttgtgttgccactactgaggaaatgcagcccatgccctaagttagaaactaattctggcatagaatgccctcatccacctggcacagatgggaattttgttaacttctattgttcacaagatagagagtacaatgatttagcaaccattttcttcaatactcaggatgatgcaatacgtaatcttttcagtgcaaaaacatttcatgaatacagtgcacaaagcctgatcactttcctggtcatgttttatttcttggctgttgtgacatttggaactgcagttccggctggccagttcgttcccggaataatgattggatctacatatggaaggcttgttggaatgtttgttgtcaagttctataagaaactaaacattgaggagggcacgtatgcactccttggtgctgcatcgtttcttggaggttcaatgagaatgactgtatctttatgtgttatcatggttgagattacaaacaacttgaaactcttgccattgatcatgcttgttcttctggtttctaaggcggttggtgacttttttaatgaagggttatatgaagagcaagcccgattaaggggcatccctttactggattccaggcctaagcaagtcatgagaaatatgaatgcaagggatgcgtgcaagaatcaaaaggttgtctgcctaccacgtgtttcaagggttgttgatatcatttctgttttgcgaactaacaagcataatggtttccctgttgttgaccgtgggcagaatggcgagtcacttgtcataggtctcatacttcgtagccacttattggtacttctacaagctaaagtagatttccagaacagtgctttcccctgtgggccaggcgtactgaacaggcacaattttagtgactttgttaaaccagcatcaagtaaaggaaagtcaattgatgatattcatttgacagaggatgaactggggttgtatttggatcttgccccatttttaaatccttcaccatacatagtgccagaggacatgtcgttggcgaaggtgtacaatctcttccgtcaacttggattgagacatatatttgttgttcctaggccttctcgtgttgtaggattgataaccagaaaagatttattacttgaggaggataacaacaatgtgatgccggagctccaatcgacgagtgtaaggggcttgctgaacggcaaaatgctcgggggtaatatacatctggaacgtcctcttcttgacaacctagttattgaatagacacgtagcagcatgtatgtcaaaataattttgatagctagcagttaaccttgcactgcatgttgggacatggcccatgggtattatacttcacatgaatgatgaagcagcagtgagcggataatgcagcatggttttggattctgccgactgttgcgcatggatgttggcgttgcgcatcattttttgctccgtcagcagtggctagggaggcgattccccggtgccgtgtgtttagattaggtgattgtaacttacaaaggcgtccatacatacacaccatccatgtatcccacggtaaatttcgaagactgtatgtataagtacatatttgttatacgatggtaaagacaaaagctatgtaggatttgcgtgctctcatgaaactatgatacgtggctataattacttccggttcccgctga

SEQ ID NO: 10781 - DNA, 2986 bp, Zea Mays
caaccctttccctaccccgatcgagcgtgcgtcaaggtcgggatccggcgccgccgcatcccgatccgatgctctccggcgtcgaccacgacgttcccgacggcatcgggatggcgcggctcgcgtggacgcgcctccccaccgccgacggggagggggcgggcccctccacttccgaggccgcggacgacgaactcttatcgggcgctgccatagagagcctcgactacgaggtcatcgagaactacgcgtaccgggaggagcaggcgcagcggagcaagttctgggtgccctactacgtcatgctcaagtggctgttcgctctgctgatcggcgttggtactggattagctgctatattcataaacctggctgttgagaacttctctggatggaaatatactgcgacatttgctataataaagcactcgtattttgtgggattctttgtgtacacagttttcaatttagccctggtcttctcttctgtatatatagtcacaaactttgctccagcagctgctggatctggtattccagagatcaaaggttacttaaatggagtggatacacatggaatcctccttttcaggacattagttgggaagatctttgggagcattggatcagttggaggtggattggctctagggaaagaagggcctcttgttcatactggggcctgcattgcttcgcttcttggacaaggtggatctgcaaagtaccacttgagttctaggtgggtacggatttttgaaagcgatcgtgataggcgagaccttcttatttttgtttttgaggtttcacaacttgaaattctctggccaagtcatgaagctattgttaaagtgacatgtggatgtgcagctggagttgctgctgccttcagagctcctgttggtggggtactatttgccttggaggaagttacttcctggtggagaagtcatcttatgtggagagtattcttcacatctgccgtggtggccgttgtggtgcgttcagccatgaattggtgcaacagtggaaaatgcggtcattttggagctggaggttttataatatgggacatatctggaggtcaagaagattactcataccaggaattgtttcctatggcaattattggtgttatcggtggacttcttggggcattatttaatcaactcaccctctatataactaaatggcggcgaacgtgtcttcataagaaagggaaacgagtccaaatctttgaagcctgtcttatatctttggtaacatccacgatttcctttgtgttgccactactgaggaaatgcagcccatgccctaagttagaaactaattctggcatagaatgccctcatccacctggcacagatgggaattttgttaacttctattgttcacaagatagagagtacaatgatttagcaaccattttcttcaatactcaggatgatgcaatacgtaatcttttcagtgcaaaaacatttcatgaatacagtgcacaaagcctctgcagttccggctggccagttcgttcccggaataatgattggatctacatatggaaggcttgttggaatgtttgttgtcaagttctataagaaactaaacattgaggagggcacgtatgcactccttggtgctgcatcgtttcttggaggttcaatgagaatgactgtatctttatgtgttatcatggttgagattacaaacaacttgaaactcttgccattgatcatgcttgttcttctggtttctaaggcggttggtgacttttttaatgaagggttatatgaagagcaagcccgattaaggggcatccctttactggattccaggcctaagcaagtcatgagaaatatgaatgcaagggatgcgtgcaagaatcaaaaggttgtctgcctaccacgtgtttcaagggttgttgatatcatttctgttttgcgaactaacaagcataatggtttccctgttgttgaccgtgggcagaatggcgagtcacttgtcataggtctcatacttcgtagccacttattggtacttctacaagctaaagtagatttccagaacagtgctttcccctgtgggccaggcgtactgaacaggcacaattttagtgactttgttaaaccagcatcaagtaaaggaaagtcaattgatgatattcatttgacagaggatgaactggggttgtatttggatcttgccccatttttaaatccttcaccatacatagtgccagaggacatgtcgttggcgaaggtgtacaatctcttccgtcaacttggattgagacatatatttgttgttcctaggccttctcgtgttgtaggattgataaccagaaaagatttattacttgaggtgacaagttattcttttagcttatgatttgaggaattttttttatctggaatccctttactagtgttattgtattttaggaggataacaacaatgtgatgccggagctccaatcgacgagtgtaaggggcttgctgaacggcaaaatgctcgggggtaatatacatctggaacgtcctcttcttgacaacctagttattgaatagacacgtagcagcatgtatgtcaaaataattttgatagctagcagttaaccttgcactgcatgttgggacatggcccatgggtattatacttcacatgaatgatgaagcagcagtgagcggataatgcagcatggttttggattctgccgactgttgcgcatggatgttggcgttgcgcatcattttttgctccgtcagcagtggctagggaggcgattccccggtgccgtgtgtttagattaggtgattgtaacttacaaaggcgtccatacatacacaccatccatgtatcccacggtaaatttcgaagactgtatgtataagtacatatttgttatacgatggtaaagacaaaagctatgtaggatttgcgtgctctcatgaaactatgatacgtggctataattacttccggttcccgctga

SEQ ID NO: 10782 - DNA, 2953 bp, Zea Mays
agcaaccctttccctaccccgatcgagcgtgcgtcaaggtcgggatccggcgccgccgcatcccgatccgatgctctccggcgtcgaccacgacgttcccgacggcatcgggatggcgcggctcgcgtggacgcgcctccccaccgccgacggggagggggcgggcccctccacttccgaggccgcggacgacgaactcttatcgggcgctgccatagagagcctcgactacgaggtcatcgagaactacgcgtaccgggaggagcaggcgcagcggagcaagttctgggtgccctactacgtcatgctcaagtggctgttcgctctgctgatcggcgttggtactggattagctgctatattcataaacctggctgttgagaacttctctggatggaaatatactgcgacatttgctataataaagcactcgtattttgtgggattctttgtgtacacagttttcaatttagccctggtcttctcttctgtatatatagtcacaaactttgctccagcagctgctggatctggtattccagagatcaaaggttacttaaatggagtggatacacatggaatcctccttttcaggacattagttgggaagatctttgggagcattggatcagttggaggtggattggctctagggaaagaagggcctcttgttcatactggggcctgcattgcttcgcttcttggacaaggtggatctgcaaagtaccacttgagttctaggtgggtacggatttttgaaagcgatcgtgataggcgagaccttcttatttttgtttttgaggtttcacaacttgaaattctctggccaagtcatgaagctattgttaaagtgacatgtggatgtgcagctggagttgctgctgccttcagagctcctgttggtggggtactatttgccttggaggaagttacttcctggtggagaagtcatcttatgtggagagtattcttcacatctgccgtggtggccgttgtggtgcgttcagccatgaattggtgcaacagtggaaaatgcggtcattttggagctggaggttttataatatgggacatatctggaggtcaagaagattactcataccaggaattgtttcctatggcaattattggtgttatcggtggacttcttggggcattatttaatcaactcaccctctatataactaaatggcggcgaacgtgtcttcataagaaagggaaacgagtccaaatctttgaagcctgtcttatatctttggtaacatccacgatttcctttgtgttgccactactgaggaaatgcagcccatgccctaagttagaaactaattctggcatagaatgccctcatccacctggcacagatgggaattttgttaacttctattgttcacaagatagagagtacaatgatttagcaaccattttcttcaatactcaggatgatgcaatacgtaatcttttcagtgcaaaaacatttcatgaatacagtgcacaaagcctgatcactttcctggtcatgttttatttcttggctgttgtgacatttggaactgcagttccggctggccagttcgttcccggaataatgattggatctacatatggaaggcttgttggaatgtttgttgtcaagttctataagaaactaaacattgaggagggcacgtatgcactccttggtgctgcatcgtttcttggaggttcaatgagaatgactgtatctttatgtgttatcatggttgagattacaaacaacttgaaactcttgccattgatcatgcttgttcttctggtttctaaggcggttggtgacttttttaatgaagggttatatgaagagcaagcccgattaaggggcatccctttactggattccaggcctaagcaagtcatgagaaatatgaatgcaagggatgcgtgcaagaatcaaaaggttgtctgcctaccacgtgtttcaagggttgttgatatcatttctgttttgcgaactaacaagcataatggtttccctgttgttgaccgtgggcagaatggcgagtcacttgtcataggtctcatacttcgtagccacttattggtacttctacaagctaaagtagatttccagaacagtgctttcccctgtgggccaggcgtactgaacaggcacaattttagtgactttgttaaaccagcatcaagtaaaggaaagtcaattgatgatattcatttgacagaggatgaactggggttgtatttggatcttgccccatttttaaatccttcaccatacatagtgccagaggacatgtcgttggcgaaggtgtacaatctcttccgtcaacttggattgagacatatatttgttgttcctaggccttctcgtgttgtaggattgataaccagaaaagatttattacttgaggaggataacaacaatgtgatgccggagctccaatcgacgagtgggcttgctgaacggcaaaatgctcgggggtaatatacatctggaacgtcctcttcttgacaacctagttattgaatagacacgtagcagcatgtatgtcaaaataattttgatagctagcagttaaccttgcactgcatgttgggacatggcccatgggtattatacttcacatgaatgatgaagcagcagtgagcggataatgcagcatggttttggattctgccgactgttgcgcatggatgttggcgttgcgcatcattttttgctccgtcagcagtggctagggaggcgattccccggtgccgtgtgtttagattaggtgattgtaacttacaaaggcgtccatacatacacaccatccatgtatcccacggtaaatttcgaagactgtatgtataagtacatatttgttatacgatggtaaagacaaaagctatgtaggatttgcgtgctctcatgaaactatgatacgtggctataattacttccggttcccgctga

SEQ ID NO: 10783 - DNA, 2819 bp, Zea Mays
ctcgcagcaaccctttccctaccccgatcgagcgtgcgtcaaggtcgggatccggcgccgccgcatcccgatccgatgctctccggcgtcgaccacgacgttcccgacggcatcgggatggcgcggctcgcgtggacgcgcctccccaccgccgacggggagggggcgggcccctccacttccgaggccgcggacgacgaactcttatcgggcgctgccatagagagcctcgactacgaggtcatcgagaactacgcgtaccgggaggagcaggcgcagcggagcaagttctgggtgccctactacgtcatgctcaagtggctgttcgctctgctgatcggcgttggtactggattagctgctatattcataaacctggctgttgagaacttctctggatggaaatatactgcgacatttgctataataaagcactcgtattttgtgggattctttgtgtacacagttttcaatttagccctggtcttctcttctgtatatatagtcacaaactttgctccagcagctgctggatctggtattccagagatcaaaggttacttaaatggagtggatacacatggaatcctccttttcaggacattagttgggaagatctttgggagcattggatcagttggaggtggattggctctagggaaagaagggcctcttgttcatactggggcctgcattgcttcgcttcttggacaaggtggatctgcaaagtaccacttgagttctaggtgggtacggatttttgaaagcgatcgtgataggcgagaccttgtgacatgtggatgtgcagctggagttgctgctgccttcagagctcctgttggtggggtactatttgccttggaggaagttacttcctggtggagaagtcatcttatgtggagagtattcttcacatctgccgtggtggccgttgtggtgcgttcagccatgaattggtgcaacagtggaaaatgcggtcattttggagctggaggttttataatatgggacatatctggaggtcaagaagattactcataccaggaattgtttcctatggcaattattggtgttatcggtggacttcttggggcattatttaatcaactcaccctctatataactaaatggcggcgaacgtgtcttcataagaaagggaaacgagtccaaatctttgaagcctgtcttatatctttggtaacatccacgatttcctttgtgttgccactactgaggaaatgcagcccatgccctaagttagaaactaattctggcatagaatgccctcatccacctggcacagatgggaattttgttaacttctattgttcacaagatagagagtacaatgatttagcaaccattttcttcaatactcaggatgatgcaatacgtaatcttttcagtgcaaaaacatttcatgaatacagtgcacaaagcctgatcactttcctggtcatgttttatttcttggctgttgtgacatttggaactgcagttccggctggccagttcgttcccggaataatgattggatctacatatggaaggcttgttggaatgtttgttgtcaagttctataagaaactaaacattgaggagggcacgtatgcactccttggtgctgcatcgtttcttggaggttcaatgagaatgactgtatctttatgtgttatcatggttgagattacaaacaacttgaaactcttgccattgatcatgcttgttcttctggtttctaaggcggttggtgacttttttaatgaagggttatatgaagagcaagcccgattaaggggcatccctttactggattccaggcctaagcaagtcatgagaaatatgaatgcaagggatgcgtgcaagaatcaaaaggttgttgaccgtgggcagaatggcgagtcacttgtcataggtctcatacttcgtagccacttattggtacttctacaagctaaagtagatttccagaacagtgctttcccctgtgggccaggcgtactgaacaggcacaattttagtgactttgttaaaccagcatcaagtaaaggaaagtcaattgatgatattcatttgacagaggatgaactggggttgtatttggatcttgccccatttttaaatccttcaccatacatagtgccagaggacatgtcgttggcgaaggtgtacaatctcttccgtcaacttggattgagacatatatttgttgttcctaggccttctcgtgttgtaggattgataaccagaaaagatttattacttgaggaggataacaacaatgtgatgccggagctccaatcgacgagtgtaaggggcttgctgaacggcaaaatgctcgggggtaatatacatctggaacgtcctcttcttgacaacctagttattgaatagacacgtagcagcatgtatgtcaaaataattttgatagctagcagttaaccttgcactgcatgttgggacatggcccatgggtattatacttcacatgaatgatgaagcagcagtgagcggataatgcagcatggttttggattctgccgactgttgcgcatggatgttggcgttgcgcatcattttttgctccgtcagcagtggctagggaggcgattccccggtgccgtgtgtttagattaggtgattgtaacttacaaaggcgtccatacatacacaccatccatgtatcccacggtaaatttcgaagactgtatgtataagtacatatttgttatacgatggtaaagacaaaagctatgtaggatttgcgtgctctcatgaaactatgatacgtggctataattacttccggttcccgctga

SEQ ID NO: 10784 - DNA, 2867 bp, Zea Mays
tggttctcaagctttcccggccagtctcgcagcaaccctttccctaccccgatcgagcgtgcgtcaaggtcgggatccggcgccgccgcatcccgatccgatgctctccggcgtcgaccacgacgttcccgacggcatcgggatggcgcggctcgcgtggacgcgcctccccaccgccgacggggagggggcgggcccctccacttccgaggccgcggacgacgaactcttatcgggcgctgccatagagagcctcgactacgaggtcatcgagaactacgcgtaccgggaggagcaggcgcagcggagcaagttctgggtgccctactacgtcatgctcaagtggctgttcgctctgctgatcggcgttggtactggattagctgctatattcataaacctggctgttgagaacttctctggatggaaatatactgcgacatttgctataataaagcactcgtattttgtgggattctttgtgtacacagttttcaatttagccctggtcttctcttctgtatatatagtcacaaactttgctccagcagctgctggatctggtattccagagatcaaaggttacttaaatggagtggatacacatggaatcctccttttcaggacattagttgggaagatctttgggagcattggatcagttggaggtggattggctctagggaaagaagggcctcttgttcatactggggcctgcattgcttcgcttcttggacaaggtggatctgcaaagtaccacttgagttctaggtgggtacggatttttgaaagcgatcgtgataggcgagaccttgtgacatgtggatgtgcagctggagttgctgctgccttcagagctcctgttggtggggtactatttgccttggaggaagttacttcctggtggagaagtcatcttatgtggagagtattcttcacatctgccgtggtggccgttgtggtgcgttcagccatgaattggtgcaacagtggaaaatgcggtcattttggagctggaggttttataatatgggacatatctggaggtcaagaagattactcataccaggaattgtttcctatggcaattattggtgttatcggtggacttcttggggcattatttaatcaactcaccctctatataactaaatggcggcgaacgtgtcttcataagaaagggaaacgagtccaaatctttgaagcctgtcttatatctttggtaacatccacgatttcctttgtgttgccactactgaggaaatgcagcccatgccctaagttagaaactaattctggcatagaatgccctcatccacctggcacagatgggaattttgttaacttctattgttcacaagatagagagtacaatgatttagcaaccattttcttcaatactcaggatgatgcaatacgtaatcttttcagtgcaaaaacatttcatgaatacagtgcacaaagcctctgcagttccggctggccagttcgttcccggaataatgattggatctacatatggaaggcttgttggaatgtttgttgtcaagttctataagaaactaaacattgaggagggcacgtatgcactccttggtgctgcatcgtttcttggaggttcaatgagaatgactgtatctttatgtgttatcatggttgagattacaaacaacttgaaactcttgccattgatcatgcttgttcttctggtttctaaggcggttggtgacttttttaatgaagggttatatgaagagcaagcccgattaaggggcatccctttactggattccaggcctaagcaagtcatgagaaatatgaatgcaagggatgcgtgcaagaatcaaaaggttgtctgcctaccacgtgtttcaagggttgttgatatcatttctgttttgcgaactaacaagcataatggtttccctgttgttgaccgtgggcagaatggcgagtcacttgtcataggtctcatacttcgtagccacttattggtacttctacaagctaaagtagatttccagaacagtgctttcccctgtgggccaggcgtactgaacaggcacaattttagtgactttgttaaaccagcatcaagtaaaggaaagtcaattgatgatattcatttgacagaggatgaactggggttgtatttggatcttgccccatttttaaatccttcaccatacatagtgccagaggacatgtcgttggcgaaggtgtacaatctcttccgtcaacttggattgagacatatatttgttgttcctaggccttctcgtgttgtaggattgataaccagaaaagatttattacttgaggaggataacaacaatgtgatgccggagctccaatcgacgagtgggcttgctgaacggcaaaatgctcgggggtaatatacatctggaacgtcctcttcttgacaacctagttattgaatagacacgtagcagcatgtatgtcaaaataattttgatagctagcagttaaccttgcactgcatgttgggacatggcccatgggtattatacttcacatgaatgatgaagcagcagtgagcggataatgcagcatggttttggattctgccgactgttgcgcatggatgttggcgttgcgcatcattttttgctccgtcagcagtggctagggaggcgattccccggtgccgtgtgtttagattaggtgattgtaacttacaaaggcgtccatacatacacaccatccatgtatcccacggtaaatttcgaagactgtatgtataagtacatatttgttatacgatggtaaagacaaaagctatgtaggatttgcgtgctctcatgaaactatgatacgtggctataattacttccggttcccgctga

SEQ ID NO: 10785 - DNA, 2881 bp, Zea Mays
acgaactcttggttctcaagctttcccggccagtctcgcagcaaccctttccctaccccgatcgagcgtgcgtcaaggtcgggatccggcgccgccgcatcccgatccgatgctctccggcgtcgaccacgacgttcccgacggcatcgggatggcgcggctcgcgtggacgcgcctccccaccgccgacggggagggggcgggcccctccacttccgaggccgcggacgacgaactcttatcgggcgctgccatagagagcctcgactacgaggtcatcgagaactacgcgtaccgggaggagcaggcgcagcggagcaagttctgggtgccctactacgtcatgctcaagtggctgttcgctctgctgatcggcgttggtactggattagctgctatattcataaacctggctgttgagaacttctctggatggaaatatactgcgacatttgctataataaagcactcgtattttgtgggattctttgtgtacacagttttcaatttagccctggtcttctcttctgtatatatagtcacaaactttgctccagcagctgctggatctggtattccagagatcaaaggttacttaaatggagtggatacacatggaatcctccttttcaggacattagttgggaagatctttgggagcattggatcagttggaggtggattggctctagggaaagaagggcctcttgttcatactggggcctgcattgcttcgcttcttggacaaggtggatctgcaaagtaccacttgagttctaggtgggtacggatttttgaaagcgatcgtgataggcgagaccttgtgacatgtggatgtgcagctggagttgctgctgccttcagagctcctgttggtggggtactatttgccttggaggaagttacttcctggtggagaagtcatcttatgtggagagtattcttcacatctgccgtggtggccgttgtggtgcgttcagccatgaattggtgcaacagtggaaaatgcggtcattttggagctggaggttttataatatgggacatatctggaggtcaagaagattactcataccaggaattgtttcctatggcaattattggtgttatcggtggacttcttggggcattatttaatcaactcaccctctatataactaaatggcggcgaacgtgtcttcataagaaagggaaacgagtccaaatctttgaagcctgtcttatatctttggtaacatccacgatttcctttgtgttgccactactgaggaaatgcagcccatgccctaagttagaaactaattctggcatagaatgccctcatccacctggcacagatgggaattttgttaacttctattgttcacaagatagagagtacaatgatttagcaaccattttcttcaatactcaggatgatgcaatacgtaatcttttcagtgcaaaaacatttcatgaatacagtgcacaaagcctctgcagttccggctggccagttcgttcccggaataatgattggatctacatatggaaggcttgttggaatgtttgttgtcaagttctataagaaactaaacattgaggagggcacgtatgcactccttggtgctgcatcgtttcttggaggttcaatgagaatgactgtatctttatgtgttatcatggttgagattacaaacaacttgaaactcttgccattgatcatgcttgttcttctggtttctaaggcggttggtgacttttttaatgaagggttatatgaagagcaagcccgattaaggggcatccctttactggattccaggcctaagcaagtcatgagaaatatgaatgcaagggatgcgtgcaagaatcaaaaggttgtctgcctaccacgtgtttcaagggttgttgatatcatttctgttttgcgaactaacaagcataatggtttccctgttgttgaccgtgggcagaatggcgagtcacttgtcataggtctcatacttcgtagccacttattggtacttctacaagctaaagtagatttccagaacagtgctttcccctgtgggccaggcgtactgaacaggcacaattttagtgactttgttaaaccagcatcaagtaaaggaaagtcaattgatgatattcatttgacagaggatgaactggggttgtatttggatcttgccccatttttaaatccttcaccatacatagtgccagaggacatgtcgttggcgaaggtgtacaatctcttccgtcaacttggattgagacatatatttgttgttcctaggccttctcgtgttgtaggattgataaccagaaaagatttattacttgaggaggataacaacaatgtgatgccggagctccaatcgacgagtgtaaggggcttgctgaacggcaaaatgctcgggggtaatatacatctggaacgtcctcttcttgacaacctagttattgaatagacacgtagcagcatgtatgtcaaaataattttgatagctagcagttaaccttgcactgcatgttgggacatggcccatgggtattatacttcacatgaatgatgaagcagcagtgagcggataatgcagcatggttttggattctgccgactgttgcgcatggatgttggcgttgcgcatcattttttgctccgtcagcagtggctagggaggcgattccccggtgccgtgtgtttagattaggtgattgtaacttacaaaggcgtccatacatacacaccatccatgtatcccacggtaaatttcgaagactgtatgtataagtacatatttgttatacgatggtaaagacaaaagctatgtaggatttgcgtgctctcatgaaactatgatacgtggctataattacttccggttcccgctga

SEQ ID NO: 10786 - DNA, 2858 bp, Zea Mays
gaccaacttgacgaactcttggttctcaagctttcccggccagtctcgcagcaaccctttccctaccccgatcgagcgtgcgtcaaggtcgggatccggcgccgccgcatcccgatccgatgctctccggcgtcgaccacgacgttcccgacggcatcgggatggcgcggctcgcgtggacgcgcctccccaccgccgacggggagggggcgggcccctccacttccgaggccgcggacgacgaactcttatcgggcgctgccatagagagcctcgactacgaggtcatcgagaactacgcgtaccgggaggagcaggcgcagcggagcaagttctgggtgccctactacgtcatgctcaagtggctgttcgctctgctgatcggcgttggtactggattagctgctatattcataaacctggctgttgagaacttctctggatggaaatatactgcgacatttgctataataaagcactcgtattttgtgggattctttgtgtacacagttttcaatttagccctggtcttctcttctgtatatatagtcacaaactttgctccagcagctgctggatctggtattccagagatcaaaggttacttaaatggagtggatacacatggaatcctccttttcaggacattagttgggaagatctttgggagcattggatcagttggaggtggattggctctagggaaagaagggcctcttgttcatactggggcctgcattgcttcgcttcttggacaaggtggatctgcaaagtaccacttgagttctaggtgggtacggatttttgaaagcgatcgtgataggcgagaccttgtgacatgtggatgtgcagctggagttgctgctgccttcagagctcctgttggtggggtactatttgccttggaggaagttacttcctggtggagaagtcatcttatgtggagagtattcttcacatctgccgtggtggccgttgtggtgcgttcagccatgaattggtgcaacagtggaaaatgcggtcattttggagctggaggttttataatatgggacatatctggaggtcaagaagattactcataccaggaattgtttcctatggcaattattggtgttatcggtggacttcttggggcattatttaatcaactcaccctctatataactaaatggcggcgaacgtgtcttcataagaaagggaaacgagtccaaatctttgaagcctgtcttatatctttggtaacatccacgatttcctttgtgttgccactactgaggaaatgcagcccatgccctaagttagaaactaattctggcatagaatgccctcatccacctggcacagatgggaattttgttaacttctattgttcacaagatagagagtacaatgatttagcaaccattttcttcaatactcaggatgatgcaatacgtaatcttttcagtgcaaaaacatttcatgaatacagtgcacaaagcctgatcactttcctggtcatgttttatttcttggctgttgtgacatttggaactgcagttccggctggccagttcgttcccggaataatgattggatctacatatggaaggcttgttggaatgtttgttgtcaagttctataagaaactaaacattgaggagggcacgtatgcactccttggtgctgcatcgtttcttggaggttcaatgagaatgactgtatctttatgtgttatcatggttgagattacaaacaacttgaaactcttgccattgatcatgcttgttcttctggtttctaaggcggttggtgacttttttaatgaagggttatatgaagagcaagcccgattaaggggcatccctttactggattccaggcctaagcaagtcatgagaaatatgaatgcaagggatgcgtgcaagaatcaaaaggttgttgaccgtgggcagaatggcgagtcacttgtcataggtctcatacttcgtagccacttattggtacttctacaagctaaagtagatttccagaacagtgctttcccctgtgggccaggcgtactgaacaggcacaattttagtgactttgttaaaccagcatcaagtaaaggaaagtcaattgatgatattcatttgacagaggatgaactggggttgtatttggatcttgccccatttttaaatccttcaccatacatagtgccagaggacatgtcgttggcgaaggtgtacaatctcttccgtcaacttggattgagacatatatttgttgttcctaggccttctcgtgttgtaggattgataaccagaaaagatttattacttgaggaggataacaacaatgtgatgccggagctccaatcgacgagtgggcttgctgaacggcaaaatgctcgggggtaatatacatctggaacgtcctcttcttgacaacctagttattgaatagacacgtagcagcatgtatgtcaaaataattttgatagctagcagttaaccttgcactgcatgttgggacatggcccatgggtattatacttcacatgaatgatgaagcagcagtgagcggataatgcagcatggttttggattctgccgactgttgcgcatggatgttggcgttgcgcatcattttttgctccgtcagcagtggctagggaggcgattccccggtgccgtgtgtttagattaggtgattgtaacttacaaaggcgtccatacatacacaccatccatgtatcccacggtaaatttcgaagactgtatgtataagtacatatttgttatacgatggtaaagacaaaagctatgtaggatttgcgtgctctcatgaaactatgatacgtggctataattacttccggttcccgctga

SEQ ID NO: 10787 - DNA, 2976 bp, Zea Mays
aaaaaacagaacctaaccacgccacaaattcacgggaccaacttgacgaactcttggttctcaagctttcccggccagtctcgcagcaaccctttccctaccccgatcgagcgtgcgtcaaggtcgggatccggcgccgccgcatcccgatccgatgctctccggcgtcgaccacgacgttcccgacggcatcgggatggcgcggctcgcgtggacgcgcctccccaccgccgacggggagggggcgggcccctccacttccgaggccgcggacgacgaactcttatcgggcgctgccatagagagcctcgactacgaggtcatcgagaactacgcgtaccgggaggagcaggcgcagcggagcaagttctgggtgccctactacgtcatgctcaagtggctgttcgctctgctgatcggcgttggtactggattagctgctatattcataaacctggctgttgagaacttctctggatggaaatatactgcgacatttgctataataaagcactcgtattttgtgggattctttgtgtacacagttttcaatttagccctggtcttctcttctgtatatatagtcacaaactttgctccagcagctgctggatctggtattccagagatcaaaggttacttaaatggagtggatacacatggaatcctccttttcaggacattagttgggaagatctttgggagcattggatcagttggaggtggattggctctagggaaagaagggcctcttgttcatactggggcctgcattgcttcgcttcttggacaaggtggatctgcaaagtaccacttgagttctaggtgggtacggatttttgaaagcgatcgtgataggcgagaccttgtgacatgtggatgtgcagctggagttgctgctgccttcagagctcctgttggtggggtactatttgccttggaggaagttacttcctggtggagaagtcatcttatgtggagagtattcttcacatctgccgtggtggccgttgtggtgcgttcagccatgaattggtgcaacagtggaaaatgcggtcattttggagctggaggttttataatatgggacatatctggaggtcaagaagattactcataccaggaattgtttcctatggcaattattggtgttatcggtggacttcttggggcattatttaatcaactcaccctctatataactaaatggcggcgaacgtgtcttcataagaaagggaaacgagtccaaatctttgaagcctgtcttatatctttggtaacatccacgatttcctttgtgttgccactactgaggaaatgcagcccatgccctaagttagaaactaattctggcatagaatgccctcatccacctggcacagatgggaattttgttaacttctattgttcacaagatagagagtacaatgatttagcaaccattttcttcaatactcaggatgatgcaatacgtaatcttttcagtgcaaaaacatttcatgaatacagtgcacaaagcctgatcactttcctggtcatgttttatttcttggctgttgtgacatttggaactgcagttccggctggccagttcgttcccggaataatgattggatctacatatggaaggcttgttggaatgtttgttgtcaagttctataagaaactaaacattgaggagggcacgtatgcactccttggtgctgcatcgtttcttggaggttcaatgagaatgactgtatctttatgtgttatcatggttgagattacaaacaacttgaaactcttgccattgatcatgcttgttcttctggtttctaaggcggttggtgacttttttaatgaagggttatatgaagagcaagcccgattaaggggcatccctttactggattccaggcctaagcaagtcatgagaaatatgaatgcaagggatgcgtgcaagaatcaaaaggttgtctgcctaccacgtgtttcaagggttgttgatatcatttctgttttgcgaactaacaagcataatggtttccctgttgttgaccgtgggcagaatggcgagtcacttgtcataggtctcatacttcgtagccacttattggtacttctacaagctaaagtagatttccagaacagtgctttcccctgtgggccaggcgtactgaacaggcacaattttagtgactttgttaaaccagcatcaagtaaaggaaagtcaattgatgatattcatttgacagaggatgaactggggttgtatttggatcttgccccatttttaaatccttcaccatacatagtgccagaggacatgtcgttggcgaaggtgtacaatctcttccgtcaacttggattgagacatatatttgttgttcctaggccttctcgtgttgtaggattgataaccagaaaagatttattacttgaggaggataacaacaatgtgatgccggagctccaatcgacgagtgtaaggggcttgctgaacggcaaaatgctcgggggtaatatacatctggaacgtcctcttcttgacaacctagttattgaatagacacgtagcagcatgtatgtcaaaataattttgatagctagcagttaaccttgcactgcatgttgggacatggcccatgggtattatacttcacatgaatgatgaagcagcagtgagcggataatgcagcatggttttggattctgccgactgttgcgcatggatgttggcgttgcgcatcattttttgctccgtcagcagtggctagggaggcgattccccggtgccgtgtgtttagattaggtgattgtaacttacaaaggcgtccatacatacacaccatccatgtatcccacggtaaatttcgaagactgtatgtataagtacatatttgttatacgatggtaaagacaaaagctatgtaggatttgcgtgctctcatgaaactatgatacgtggctataattacttccggttcccgctga

SEQ ID NO: 10788 - DNA, 711 bp, Zea Mays
atgtggtctcctcaagcaagctttgaggaggtggatgtggcatggcggcactatgagcaggccggtactggattagctgctatattcataaacctggctgttgagaacttctctggatggaaatatactgcgacatttgctataataaagcactcgtattttgtgggattctttgtgtacacagttttcaatttagccctggtcttctcttctgtatatatagtcacaaactttgctccagcagctgctggatctggtattccagagatcaaaggttacttaaatggagtggatacacatggaatcctccttttcaggacattagttgggaagatctttgggagcattggatcagttggaggtggattggctctagggaaagaagggcctcttgttcatactggggcctgcattgcttcgcttcttggacaaggtggatctgcaaagtaccacttgagttctaggtgggtacggatttttgaaagcgatcgtgataggcgagaccttgtgacatgtggatgtgcagctggagttgctgctgccttcagagctcctgttggtggggtactatttgccttggaggaagttacttcctgttattcctttagctgctggcaacaaattcttcagtactaatgctgtaatgcaataatgtgattcaccttatggttgactgaagcaagttgaaatggctagtgacgtgaaatgctt

SEQ ID NO: 10789 - DNA, 1036 bp, Zea Mays
accaacttgacgaactcttggttctcaagctttcccggccagtctcgcagcaaccctttccctaccccgatcgagcgtgcgtcaaggtcgggatccggcgccgccgcatcccgatccgatgctctccggcgtcgaccacgacgttcccgacggcatcgggatggcgcggctcgcgtggacgcgcctccccaccgccgacggggagggggcgggcccctccacttccgaggccgcggacgacgaactcttatcgggcgctgccatagagagcctcgactacgaggtcatcgagaactacgcgtaccgggaggagcaggcgcagcggagcaagttctgggtgccctactacgtcatgctcaagtggctgttcgctctgctgatcggcgttggtactggattagctgctatattcataaacctggctgttgagaacttctctggatggaaatatactgcgacatttgctataataaagcactcgtattttgtgggattctttgtgtacacagttttcaatttagccctggtcttctcttctgtatatatagtcacaaactttgctccagcagctgctggatctggtattccagagatcaaaggttacttaaatggagtggatacacatggaatcctccttttcaggacattagttgggaagatctttgggagcattggatcagttggaggtggattggctctagggaaagaagggcctcttgttcatactggggcctgcattgcttcgcttcttggacaaggtggatctgcaaagtaccacttgagttctaggtgggtacggatttttgaaagcgatcgtgataggcgagaccttgtgacatgtggatgtgcagctggagttgctgctgccttcagagctcctgttggtggggtactatttgccttggaggaagttacttcctgttattcctttagctgctggcaacaaattcttcagtactaatgctgtaatgcaataatgtgattcaccttatggttgactgaagcaagttgaaatggctagtgacgtgaaatgctt

SEQ ID NO: 10790 - DNA, 917 bp, Zea Mays
caaggaactactggtttaagaattgcctacaacagagtgatgagactcctatggtttgggagatccttctctacatgtatgtcctctattcaccggactggcactacaggagcacaatgccaactttcctgttcctgtatggtgctgcctttgccgtagtacatttctttgcccggttccaagtcgtattcaagctgcattacgttggcctctgcttgctctgcatcccccggatgtacaagtactacatacagacgaaagacgtgggtgcgaagcggctcgcaaaactgtgggtccttacactgacccttgggaccctctgctggctggttgatcgcgtcttctgcaagaagctttcgcattggtacgtcaacccgcaggggcacgcgtggtggcacgtgcttatgggcctcaactcgtactatgcaaacacgttcctgatgttctgccgggctcagcagcgcgggtgggagccgcggatcacgcacctccttggattcttgccgtatgtcaaggtccagaaaccagagaagagggaatgatttctgtctctgcttgaaaactgatgatattcagtcggccaccagtaagctaatgcccccaatgtgtgctcagacaagtccgtggcactcttgtatatgggcgcccaaatgattacggacttcaaatgttctgatgtcgcattagattttgtatcatacttaaatcatcgaacagagattgtcctagttttggccacctttcttttggtttcttcgcaattaccgtttggtggtaaattaggactgagttatttatttatttgtttgtcgttgaatggagtccagttgtactagttaccactgcacaagaagatacattcatccacatgatgacatgttaattatttggcttgtgttgctgccaatagacaactc

SEQ ID NO: 10791 - DNA, 552 bp, Zea Mays
acttcactactctctctctctgcctgcaaagctgcttgatccatcatcgatcacatcactccaccagccgcagcgcacgaacgtacgactcatggcagatcgcgaccgcagcggcatctacggcggcggcgcctacgggcagcagcaggggggcggccgcccgatgggtgagcaggacttcctcgtaaataagcaaatcatccatggatgcgtgcgtgtcaatgtcagcagggtcgtcgtggaatgctcttctctgtacgtgggtaaccgtcttttggtcgtcttccccgagtgcgtgataaatatcctggtgttcgtcgtgtgtggtgctgccctaggctggggcctggggtcggctgtgtaccggtatctgttcatcgccgctccgtcgcgttcggagatgtgaataagtgatgtgaaggttaagtttcagctttgctattgctattgtggcttgtgcatcagcggtttgctcgttgactgttatggaaataagcattggtgaaggtattgtctattatttgctgaataattttgttatatatgataaaa

SEQ ID NO: 10792 - DNA, 1800 bp, Zea Mays
atttccttcccctctctccgtccgcgtctctgcgcctatgcccatcttttttgtctccgactctcatggcgacgcggcggcgcctctctccgactttcttcggcgggctccgagcccgggagcacggtggcgctagtggctcctcccgcgccacagcggggctcccttacctcgccgacctctcctctaaccccggcggccgcggcggcggggtcatagctgttgagcactccggtgaccccgtgatccccttcgccatctccttcggcaagactgcacagacctgtaacctcctggcggtcgccgacgaagacgggtatgttggcctctacgacacccgccggcgccttccttccacctcctcgtcactagagaagtcagctgaaacaagggtgcccgactgggttgctcacaacaatgcaatatttgacgtgtgctggatcaaggagggatcccagatactgactgcatcgggcgatcaaactgtcaaaatttggagtgtaggaaacaggaaatgcattggtgtcttgtctgggcatactgggagcgtgaagtcgctgtcttgccattcttcaaatcctgagctcattgtttccggttcaagggatggttcatttgctctctgggatttaagatgtgaccctaaatctccaaacagccacggtgaaacgtgcctcaccgacaatacaaattcaatgaacaaagttgtgctacatgttagatcttctgctgttgtcagagaagcccacagtcccatacagagaaaccgaacccggtctcgagcaaaggcggcttcaactagcatcacatcagttctttatctgaaagatggtgtctccattgctacttctggagcagcagacaatgttgtgaagatatgggatacacggaacctggaagtgccggtctccaacaaaaactctcaagcaggggccctgcctttggagggggtgaaacatggcatctcttgtctgtctcaagattcgtacggtgcgtacattgctgcgtcttgtatggataacagaatctatttgtacagtgttctccatgtgaacaagggtcccataaatgtttacactggcagcaaaatagagttttttttcgtcaagtctgctatcagtcctgatggaactcacatccttggcggatcaagtgatggaaatgtatacctgtggcaggtggatcagcctgaaagtgtaactgcagttttgaaaggccatgaaggtgaagcaacttcggttgactggtgtgcatcagaggttggaaagatagcgacatcttctgatgattccacggtccgtgtgtggagcaccaagaaaatggactgcacaaatgtgagctcaccaacagtgattcgtaagcgggcaatcgcaccaaacaccgagcaccgaaggtccattacccatgagcctgctgctacaacatcaagaggcgcggttgcatgcgctcgcggtgacggcgaacagcagagcggctgccactctcccctccaacctagaggctagagcactggacttcggcactcccgaatcctcgaagaagagagagagggccttggcgttgttccaggaggaggccctcggtgccaggaaaagcccggacccggaagctcagatgaccagcccatcttctgttctgagcccaccgccgtcgttgaaacggagaacgattcgggactacttcgctgccactacacaaacaacctagacaacaaacctacacacaatactcatcttgagtcatcgttgtcgagctaaacacaaaagacgaatgtaccgggcttaccgttgcctgtctaag

SEQ ID NO: 10793 - DNA, 5693 bp, Zea Mays
gccaaccagctgaagcagtccacgcttgaggcaaccagctagcaaaccaacatggaatactgttcagccgttcagtcaatccaaacaatgttttccgtctgtaaggccaaccccaacgcgggagcaaactgactgcgcaaaacactgtagtaacactgtagcttatcattggaaatggtaaatcatgtttattttgggaggatctttgggaggacgagtcacttgtcaagcatacccagaacttcactcttttgctaaagatagacgcataaccctacacaaagtaaagcaaatgacagatttgtatcttctcttccatcttcctttatcggtggaagcttttgcccagctacaagctttgcagcttgagttagaaggaataacactaacgcatgaaatggattggtggacatacatttggggttctcacatttacacatcagctcgggcttataagtatctaattgggcatactgaaatacatccagttttcaagtggctatggaaatcctcttgccagcacaagcacaaagttttcttttggctgctcttaaaagagagactgagtactagaaatgttcttaggagaaaaaacatggatctcccctcctatgactgtatcctatgtacccagtgtgtagaagaaacagtagaccacattttcatcaagtgtgactttgcacagcagcaagatgactccttggctgttcttgagagcttcaaaaggcaattgggagttccattgtacacggaaataaccgtcctcatgtgttggagtatatggactgcaagtaatgacttcatcttcagaggacttcaaccacaaacccaacactgcaaagccatctttaaggagtttgcctggttatccatcgagcaaagaaaaagtatttcccatctattgagcaatggctagacgcttttgtgtgattgttttgatcttcgtttcccttttctcttaatatattcctaatcagtaggggttttacccctcctgtttcctcaaaaaaaaagaatttgacctaaactctaaaagttcctaaagcttgagttgaatgtggttgacttgcaacttggtttctccttcgctgacctttgtacttccactgttgataccactgctttggagtagtgagctgtgacagctaatgtgtagcaatttgcaaaaaatcctggcaatatcttactctggcttctttcattattttacaacacaagaagacaagatccactacaacaatttttaaagattggtactagtgttccctaagaattttgtgaagactaaaaaggggttttgctgaagttaatatgagtaacactaattacctcttctaatcctcctttttctttttctatttatgcctttaaagtggatttagccactgagctgggtcgataactggctcttcgaatgttatcctctttgcaacttcagaaggaagccctacgtcacctagtcagatgatccatccttcatctaaacagggaggggtaccatggtaatttgaaacagaaggcaaggatcgatggagtgtgtaaggcttcctcatttgttgaagggcttatgtcaaacgtcgtgcctagaggtgtaaacggataggatatcagttttttggtcttttttttctttgattgtgaattaatagaatatagaatttactatacaaatttatattattatttttagtattgagcttgttgtaaagattcatgaaagataaatctcaaatctatcatatatcttctcaaataataaatataaatttcggatacaaatcgaatacggatacagatattttttttacttttttttgttgtacggagcaaataatgtatgaaatctcctctgagcacgcaagagctcacgctctagtgactagtcgccgccctgcacctgcaccgctaaacctaaccattcccagcatcaccaatctaggtcgctttgccatgctgcactcttgcttcccaatgccttatcgcaccaccaacttgccaagagcatatggaacaaagttccaacagatttaggcgatttttacaaaaaaaaatgattttcattgaagcgcactgagatgcgaagcgttcggttttctgtgtctggtatctagaagtcgactatgacggctaaaatctagcgaaaaaccgaaacaaatagcccctttgtgatgatgatgatgaatgacacatgatcagtctagatgaagtgcactataggtggccatatcaagatgtatgttaattgtatctgtgattttgtaacctttcctaagtgcccactaacctaattccagccttacactaacatttgtgagcttgcaatataggcacaccctgaagggctaagaatgctgagtacttaaacatgccaaatagaaaattacaagcagatggaagtgatctttggcaatggtcttgcaactggcaagtttgcaatgggtaccacatcttactttgctgagagctcactacaaacagatgccatgaaggttgatgatgtttcaaggctgtttggggaggctccgaagagctaggaggcagctgcaggtgctactagtgggtctgcggcaggcaacaagaggaaaaggtgcatacttagtgaggagaaagaacatcgttgtcatgactggtgtcttctgttctctagttgggaggcttgccatgctcaagtgtctgtacagccttgcaaccaaaggcaagctctaatgggccatcatgagatgaaacaaagtaaccaaacaatagcctattgcacctctttagcatgccgccatgggcctgaatgactggatacgctcaggctgggccgagcaggcaaccaatcacgctctaaataatgtatcattgatttgcctacatcaaggaaatcaaagaagaaatcagcaaactggtggcgacaatgagcggaatagttcaggaatttgaacgggacaactgggcaactgcattgttcaccactgagactatggcacagattatttctgattcttttgatctccgtttataactttggactagcataatcgagaatagaaaagatcctcacagtaagatgattataattgaatcgattataagtggttccaaatagggtctatataagcggcctacaaattctttccatcgaaagttcaaatatagaggatatatccaatgtactactgaaggcatacgcaaatactagaagtaaccattcatcatatgatgtaaactacccaaggatcatgcttactaagatgtgtgttgtaaactctccttcctcctaatgaaaaatgtgcttagacatggtcacgaaaaaaagagatgcaatatgatcaaccttctatggtccaattagctgttgtttactaaaatgtgaaattcagctgcaaagatgggatgctcgactaaaacaaaaacctttccaaaacccacaggccacaactcattgagtggatctagatctcaagaagctcgtctttctcatgggaagattacagtttctacttctatttttactaaaaacaggtaagaagagaaaaggatcacctcacgaatgcaagcatacttggtaaaagaaatcatcctttgaccctgctactagatctaccagtgtccacctcactcattgtcaattccaagcttgccacgctagatgactgcttctcctgaacagatttattaacgtctttcacgctttgatgtcagacgatcatgtcacaactcgcaagagccaccatatgtgcaagttgagactagaaccttgttgcagactccacacatggtgtatcctatagaggaaccacctgatttgcagtaccactgtccacattaatttgcttcattcaacaaccaacaaagcattctgtttgcagcaatcaccggaggtgtcaggtgagacagtggtgtttctttgagtaataggtagataagccaacacttccactcccacaaacagaggtacagtcatgataagaaccatcctgttaattgtgaatttaaatggaagagaaatagtgattgataaaagaaatattcagacttctccacaaacagagcgttgtccgtgcaggcatccgagtctatttgcacaacctttttcagttgacataggctctctgtccagtcaattttaagggcacaaccttcagttgacataggctctgtccagtcaatgctaaggatgaacttctggattactagacatatgatttgcatgtagagtagcgtcagaaactgcccttgtgatcaaaagctaatttgagatgacggatatgctacgaaaattatttctatcacctttcagtgaatcctgtggaacaaggatggctaaggacctctgttcttcatatgcttcatgtgccctattctcagagaagtcggttttgctgtgacgagtggcatccaacgtttctctctgttatgagtgcacagacaacgctctctcagcttcattacatgctgattttagtggagtaacagcaaggaacagtgcaaaaccaatagatccacatgatatcaggactacgacgatatatggaagtagaatagggttttcagtgttccctttcaggtcatttgtccaagtgctatcaccaaaaagaacttccgccacaaaaatgatatttgtaaacagtgttagaagaaatgctaggaagcacaatatttcaacacatcgagatatccggtatcttcccatcaatgatctcgacgaggaaatgcggaaaacaggtataacagacgaaggaaggagcatagcttggataattgggcagaccatgagtaactgatataacccttcaaaacccacaaccttcgcatggtatatagtagtaatcatggcaaaaaccttaggtaacagatggtgcacaaaaagaggcagctttatgccgaagagatcctctgaaattacatcactaccaataatacatgtcattgacacgatgtggcctgaaaagagaaggaccactaataatacaattggcgccacaggacttgtgaacacctgcaaaatacaagaatccagacgaaattcaggaaggagcttcctccttcaatgcacactccaagctcaaagggatactatttttattgaatatgcgctggccagttcatgcggaggctaagttttcaagaaagttgaagagaaaaagagcatcccagcagcttacttataactcagtctttatgtccctattcagggaatgagcctaagagagtgtccccagtggcttccctagaacacatcatttctcccaaccttagcccttgtttagaacaacgtgtattgggtttgagtaatatggtgatccatcatgatcactttttgtttggtctgtagaatagaatgagttgatgcatcaccaactcaattctcacaagctaatgtatacacatgaagaatgggtttgttccacccaaaaattcatggaataaactcatgatacacgacctgatctagcatgaggcacttccacaaagcaaacacacactataggatttctaatatctataacttgaaccccaaatatactagaactatatttttcctaaaactctgctactccaattaggtccttttgaccatagtaaaatattgaaactcgtgcaccatttggtcaacccaaaaaataggtaatgtacttataatacaataacttcacaaagttgaaaatccaaacatgcaagtatagtagcatgccacaacaccaaac

SEQ ID NO: 10794 - DNA, 2354 bp, Zea Mays
atcaaatccaagatctcataattttccaatgacaaaaaatgcttccctttctaaaaaaaagcatgatattgtccccttaaccagctacacccactatctttacaaagggtagcagtcccttgcatcagtacactcatctcagcagcatctttccgattaccacaggatgcatacgggggcggaaggcccgtatggacagatatggcccatgccatcctacgggtgtcaataagctctaaattttacactacaagatttaataatcggattagattagaattagaccatatttctattcatttttgaactaaaatttatttaaggttctatcattttgtgaggaagcatttaaatcacaattcattaccacgcctagccataccccatacttagacccagcctattaacagagactagattaacactttggccttgcataggcgcagtcgcccgcttctcaccctggtgtcgccggcagcctggccgccgttcacccgattcgcgcttccacgagaccgccgttcaccctttccgctccctagccgccgttcacccgattcgcgcttccacgagaccgccgttcaccctttccgctcgctagccgccgttcacccgaatggccaactagtgaattccctcatcctttttctcagcctgctggatatagaggaagtctgcattgttttacttgcatgctttatgaaaaaagagagaattattcccgagccaacccactcaagccaaaagcaggcccaaagggtataggccgactcccaggcctcccgctcccctgtctagcgccgccgcggagacgctctcctgcaacgcctgagcgagagcgacagccgccgccgccgcctgacgcccctacctcgacggtcgacgcatcacggccgtgcgtttccccaagctgccgagcatcgtccaactctgctgctccagcaccctggcgccagcggccagccagaccgtgcggccacttccccgcgttcgcttacagtagaaatttgattcctcgctcccaggcccgcaggatggcaccggcttttatggagctagcactcgagcaggctaagtttgcgctggataacctcgaggtccctgttgggtgtgtgattgtggaggacgggaaagtgatttcctctgggagcaacaagacgaatgccacccggaatgctaccagacatgctgagatggaagctattgatgtcctgcttcgggagtggcagagcatgggtcttgatcagccacaggtcgcggagaaatttgcaggatgcgacctttatgtcacgtgtgagccctgcataatgtgcgcgacggcattgtcgataattgggataagagaagtatactttggttgtgccaacgacaaatttggtggatgtggatcaatcatgtcattgcacaatggtgctgcttcgtcgtcagatgaattatcagggagccaagcctctacaccaaaaggtttcaaatgcactggagggatcatggctgaagaagcagttgctctttttaggtgtttctacgaacaaggaaacccaaatgccccaaggcctcacagaccagtacgaatgcctcaacaataattggtttgttttcctggactacaatcataacgcaaaaacttcaggagtgcagacatacaaacttactgtaaaacttgtttaggattctttgtatgctttagtgtgacgcatgtatgctatttgatagtgtctttttagtctgggagcgcagccacatttcttgatcggaccatgcaagttggtcgatttaaaaggatctgtgacagaagagtttgccagtgtccgcaaaatcagcattatgcaattggagtagattgttttcatcatttgcaatcttgaaagaaatattctgtaatgatgtagatacactgcaacgtcattgactcgtgatatggtatgcttttctttgtacaaaatactatttagaggtacttccatgcttagctctttgaaaaatacaaatttgacagaataattgtttaaattgcttgcaccttcaagcattttaaaattgatacagttcctttacaaagcattgaaacaccagttgaccacttttactggttctggaaaatttcttgcatcatgtatgttattcaataaaaagaagataatcaggacaacaatgcctatatttcatagatgcatgtgcattgctacggtttctgtacattaaattggtaaactttgttctaataaagcacaaaaaaatatgtatgttatgttggttagatgaatgtaaatctggagctaacaactatgacaatgtgcgaagttgaaaccaaatatgacaatggagtcatgtgcaggagtaaaccgtgtaatatc

SEQ ID NO: 10795 - DNA, 2440 bp, Zea Mays
atcaaatccaagatctcataattttccaatgacaaaaaatgcttccctttctaaaaaaaagcatgatattgtccccttaaccagctacacccactatctttacaaagggtagcagtcccttgcatcagtacactcatctcagcagcatctttccgattaccacaggatgcatacgggggcggaaggcccgtatggacagatatggcccatgccatcctacgggtgtcaataagctctaaattttacactacaagatttaataatcggattagattagaattagaccatatttctattcatttttgaactaaaatttatttaaggttctatcattttgtgaggaagcatttaaatcacaattcattaccacgcctagccataccccatacttagacccagcctattaacagagactagattaacactttggccttgcataggcgcagtcgcccgcttctcaccctggtgtcgccggcagcctggccgccgttcacccgattcgcgcttccacgagaccgccgttcaccctttccgctccctagccgccgttcacccgattcgcgcttccacgagaccgccgttcaccctttccgctcgctagccgccgttcacccgaatggtcagtcctgttcctgaaatacactgtataatttatcaatttagtgcaaagcttagtagttgctgactgaggcagataaccggatactatcatctcgggatctaacatacgtactactattttttcaggccaactagtgaattccctcatcctttttctcagcctgctggatatagaggaagtctgcattgttttacttgcatgctttatgaaaaaagagagaattattcccgagccaacccactcaagccaaaagcaggcccaaagggtataggccgactcccaggcctcccgctcccctgtctagcgccgccgcggagacgctctcctgcaacgcctgagcgagagcgacagccgccgccgccgcctgacgcccctacctcgacggtcgacgcatcacggccgtgcgtttccccaagctgccgagcatcgtccaactctgctgctccagcaccctggcgccagcggccagccagaccgtgcggccacttccccgcgttcgcttacagtagaaatttgattcctcgctcccaggcccgcaggatggcaccggcttttatggagctagcactcgagcaggctaagtttgcgctggataacctcgaggtccctgttgggtgtgtgattgtggaggacgggaaagtgatttcctctgggagcaacaagacgaatgccacccggaatgctaccagacatgctgagatggaagctattgatgtcctgcttcgggagtggcagagcatgggtcttgatcagccacaggtcgcggagaaatttgcaggatgcgacctttatgtcacgtggataagagaagtatactttggttgtgccaacgacaaatttggtggatgtggatcaatcatgtcattgcacaatggtgctgcttcgtcgtcagatgaattatcagggagccaagcctctacaccaaaaggtttcaaatgcactggagggatcatggctgaagaagcagttgctctttttaggtgtttctacgaacaaggaaacccaaatgccccaaggcctcacagaccagtacgaatgcctcaacaataattggtttgttttcctggactacaatcataacgcaaaaacttcaggagtgcagacatacaaacttactgtaaaacttgtttaggattctttgtatgctttagtgtgacgcatgtatgctatttgatagtgtctttttagtctgggagcgcagccacatttcttgatcggaccatgcaagttggtcgatttaaaaggatctgtgacagaagagtttgccagtgtccgcaaaatcagcattatgcaattggagtagattgttttcatcatttgcaatcttgaaagaaatattctgtaatgatgtagatacactgcaacgtcattgactcgtgatatggtatgcttttctttgtacaaaatactatttagaggtacttccatgcttagctctttgaaaaatacaaatttgacagaataattgtttaaattgcttgcaccttcaagcattttaaaattgatacagttcctttacaaagcattgaaacaccagttgaccacttttactggttctggaaaatttcttgcatcatgtatgttattcaataaaaagaagataatcaggacaacaatgcctatatttcatagatgcatgtgcattgctacggtttctgtacattaaattggtaaactttgttctaataaagcacaaaaaaatatgtatgttatgttggttagatgaatgtaaatctggagctaacaactatgacaatgtgcgaagttgaaaccaaatatgacaatggagtcatgtgcaggagtaaaccgtgtaatatc

SEQ ID NO: 10796 - DNA, 2448 bp, Zea Mays
atcaaatccaagatctcataattttccaatgacaaaaaatgcttccctttctaaaaaaaagcatgatattgtccccttaaccagctacacccactatctttacaaagggtagcagtcccttgcatcagtacactcatctcagcagcatctttccgattaccacaggatgcatacgggggcggaaggcccgtatggacagatatggcccatgccatcctacgggtgtcaataagctctaaattttacactacaagatttaataatcggattagattagaattagaccatatttctattcatttttgaactaaaatttatttaaggttctatcattttgtgaggaagcatttaaatcacaattcattaccacgcctagccataccccatacttagacccagcctattaacagagactagattaacactttggccttgcataggcgcagtcgcccgcttctcaccctggtgtcgccggcagcctggccgccgttcacccgattcgcgcttccacgagaccgccgttcaccctttccgctccctagccgccgttcacccgattcgcgcttccacgagaccgccgttcaccctttccgctcgctagccgccgttcacccgaatggtcagtcctgttcctgaaatacactgtataatttatcaatttagtgcaaagcttagtagttgctgactgaggcagataaccggatactatcatctcgggatctaacatacgtactactattttttcaggccaactagtgaattccctcatcctttttctcagcctgctggatatagaggaagtctgcattgttttacttgcatgctttatgaaaaaagagagaattattcccgagccaacccactcaagccaaaagcaggcccaaagggtataggccgactcccaggcctcccgctcccctgtctagcgccgccgcggagacgctctcctgcaacgcctgagcgagagcgacagccgccgccgccgcctgacgcccctacctcgacggtcgacgcatcacggccgtgcgtttccccaagctgccgagcatcgtccaactctgctgctccagcaccctggcgccagcggccagccagaccgtgcggccacttccccgcgttcgcttacagtagaaatttgattcctcgctcccaggcccgcaggatggcaccggcttttatggagctagcactcgagcaggctaagtttgcgctggataacctcgaggtccctgttgggtgtgtgattgtggaggacgggaaagtgatttcctctgggagcaacaagacgaatgccacccggaatacatgctgagatggaagctattgatgtcctgcttcgggagtggcagagcatgggtcttgatcagccacaggtcgcggagaaatttgcaggatgcgacctttatgtcacgtgtgagccctgcataatggataagagaagtatactttggttgtgccaacgacaaatttggtggatgtggatcaatcatgtcattgcacaatggtgctgcttcgtcgtcagatgaattatcagggagccaagcctctacaccaaaaggtttcaaatgcactggagggatcatggctgaagaagcagttgctctttttaggtgtttctacgaacaaggaaacccaaatgccccaaggcctcacagaccagtacgaatgcctcaacaataattggtttgttttcctggactacaatcataacgcaaaaacttcaggagtgcagacatacaaacttactgtaaaacttgtttaggattctttgtatgctttagtgtgacgcatgtatgctatttgatagtgtctttttagtctgggagcgcagccacatttcttgatcggaccatgcaagttggtcgatttaaaaggatctgtgacagaagagtttgccagtgtccgcaaaatcagcattatgcaattggagtagattgttttcatcatttgcaatcttgaaagaaatattctgtaatgatgtagatacactgcaacgtcattgactcgtgatatggtatgcttttctttgtacaaaatactatttagaggtacttccatgcttagctctttgaaaaatacaaatttgacagaataattgtttaaattgcttgcaccttcaagcattttaaaattgatacagttcctttacaaagcattgaaacaccagttgaccacttttactggttctggaaaatttcttgcatcatgtatgttattcaataaaaagaagataatcaggacaacaatgcctatatttcatagatgcatgtgcattgctacggtttctgtacattaaattggtaaactttgttctaataaagcacaaaaaaatatgtatgttatgttggttagatgaatgtaaatctggagctaacaactatgacaatgtgcgaagttgaaaccaaatatgacaatggagtcatgtgcaggagtaaaccgtgtaatatc

SEQ ID NO: 10797 - DNA, 2432 bp, Zea Mays
atcaaatccaagatctcataattttccaatgacaaaaaatgcttccctttctaaaaaaaagcatgatattgtccccttaaccagctacacccactatctttacaaagggtagcagtcccttgcatcagtacactcatctcagcagcatctttccgattaccacaggatgcatacgggggcggaaggcccgtatggacagatatggcccatgccatcctacgggtgtcaataagctctaaattttacactacaagatttaataatcggattagattagaattagaccatatttctattcatttttgaactaaaatttatttaaggttctatcattttgtgaggaagcatttaaatcacaattcattaccacgcctagccataccccatacttagacccagcctattaacagagactagattaacactttggccttgcataggcgcagtcgcccgcttctcaccctggtgtcgccggcagcctggccgccgttcacccgattcgcgcttccacgagaccgccgttcaccctttccgctccctagccgccgttcacccgattcgcgcttccacgagaccgccgttcaccctttccgctcgctagccgccgttcacccgaatggtcagtcctgttcctgaaatacactgtataatttatcaatttagtgcaaagcttagtagttgctgactgaggcagataaccggatactatcatctcgggatctaacatacgtactactattttttcaggccaactagtgaattccctcatcctttttctcagcctgctggatatagaggaagtctgcattgttttacttgcatgctttatgaaaaaagagagaattattcccgagccaacccactcaagccaaaagcaggcccaaagggtataggccgactcccaggcctcccgctcccctgtctagcgccgccgcggagacgctctcctgcaacgcctgagcgagagcgacagccgccgccgccgcctgacgcccctacctcgacggtcgacgcatcacggccgtgcgtttccccaagctgccgagcatcgtccaactctgctgctccagcaccctggcgccagcggccagccagaccgtgcggccacttccccgcgttcgcttacagtagaaatttgattcctcgctcccaggcccgcaggatggcaccggcttttatggagctagcactcgagcaggctaagtttgcgctggataacctcgaggtccctgttgggtgtgtgattgtggaggacgggaaagtgatttcctctgggagcaacaagacgaatgccacccggaatacatgctgagatggaagctattgatgtcctgcttcgggagtggcagagcatgggtcttgatcagccacaggtcgcggagaaatttgcaggatgcgacctttatgtcacgtggataagagaagtatactttggttgtgccaacgacaaatttggtggatgtggatcaatcatgtcattgcacaatggtgctgcttcgtcgtcagatgaattatcagggagccaagcctctacaccaaaaggtttcaaatgcactggagggatcatggctgaagaagcagttgctctttttaggtgtttctacgaacaaggaaacccaaatgccccaaggcctcacagaccagtacgaatgcctcaacaataattggtttgttttcctggactacaatcataacgcaaaaacttcaggagtgcagacatacaaacttactgtaaaacttgtttaggattctttgtatgctttagtgtgacgcatgtatgctatttgatagtgtctttttagtctgggagcgcagccacatttcttgatcggaccatgcaagttggtcgatttaaaaggatctgtgacagaagagtttgccagtgtccgcaaaatcagcattatgcaattggagtagattgttttcatcatttgcaatcttgaaagaaatattctgtaatgatgtagatacactgcaacgtcattgactcgtgatatggtatgcttttctttgtacaaaatactatttagaggtacttccatgcttagctctttgaaaaatacaaatttgacagaataattgtttaaattgcttgcaccttcaagcattttaaaattgatacagttcctttacaaagcattgaaacaccagttgaccacttttactggttctggaaaatttcttgcatcatgtatgttattcaataaaaagaagataatcaggacaacaatgcctatatttcatagatgcatgtgcattgctacggtttctgtacattaaattggtaaactttgttctaataaagcacaaaaaaatatgtatgttatgttggttagatgaatgtaaatctggagctaacaactatgacaatgtgcgaagttgaaaccaaatatgacaatggagtcatgtgcaggagtaaaccgtgtaatatc

SEQ ID NO: 10798 - DNA, 2352 bp, Zea Mays
cacatcatcaaatccaagatctcataattttccaatgacaaaaaatgcttccctttctaaaaaaaagcatgatattgtccccttaaccagctacacccactatctttacaaagggtagcagtcccttgcatcagtacactcatctcagcagcatctttccgattaccacaggatgcatacgggggcggaaggcccgtatggacagatatggcccatgccatcctacgggtgtcaataagctctaaattttacactacaagatttaataatcggattagattagaattagaccatatttctattcatttttgaactaaaatttatttaaggttctatcattttgtgaggaagcatttaaatcacaattcattaccacgcctagccataccccatacttagacccagcctattaacagagactagattaacactttggccttgcataggcgcagtcgcccgcttctcaccctggtgtcgccggcagcctggccgccgttcacccgattcgcgcttccacgagaccgccgttcaccctttccgctccctagccgccgttcacccgattcgcgcttccacgagaccgccgttcaccctttccgctcgctagccgccgttcacccgaatggccaactagtgaattccctcatcctttttctcagcctgctggatatagaggaagtctgcattgttttacttgcatgctttatgaaaaaagagagaattattcccgagccaacccactcaagccaaaagcaggcccaaagggtataggccgactcccaggcctcccgctcccctgtctagcgccgccgcggagacgctctcctgcaacgcctgagcgagagcgacagccgccgccgccgcctgacgcccctacctcgacggtcgacgcatcacggccgtgcgtttccccaagctgccgagcatcgtccaactctgctgctccagcaccctggcgccagcggccagccagaccgtgcggccacttccccgcgttcgcttacagtagaaatttgattcctcgctcccaggcccgcaggatggcaccggcttttatggagctagcactcgagcaggctaagtttgcgctggataacctcgaggtccctgttgggtgtgtgattgtggaggacgggaaagtgatttcctctgggagcaacaagacgaatgccacccggaatacatgctgagatggaagctattgatgtcctgcttcgggagtggcagagcatgggtcttgatcagccacaggtcgcggagaaatttgcaggatgcgacctttatgtcacgtgtgagccctgcataatgtgcgcgacggcattgtcgataattgggataagagaagtatactttggttgtgccaacgacaaatttggtggatgtggatcaatcatgtcattgcacaatggtgctgcttcgtcgtcagatgaattatcagggagccaagcctctacaccaaaaggtttcaaatgcactggagggatcatggctgaagaagcagttgctctttttaggtgtttctacgaacaaggaaacccaaatgccccaaggcctcacagaccagtacgaatgcctcaacaataattggtttgttttcctggactacaatcataacgcaaaaacttcaggagtgcagacatacaaacttactgtaaaacttgtttaggattctttgtatgctttagtgtgacgcatgtatgctatttgatagtgtctttttagtctgggagcgcagccacatttcttgatcggaccatgcaagttggtcgatttaaaaggatctgtgacagaagagtttgccagtgtccgcaaaatcagcattatgcaattggagtagattgttttcatcatttgcaatcttgaaagaaatattctgtaatgatgtagatacactgcaacgtcattgactcgtgatatggtatgcttttctttgtacaaaatactatttagaggtacttccatgcttagctctttgaaaaatacaaatttgacagaataattgtttaaattgcttgcaccttcaagcattttaaaattgatacagttcctttacaaagcattgaaacaccagttgaccacttttactggttctggaaaatttcttgcatcatgtatgttattcaataaaaagaagataatcaggacaacaatgcctatatttcatagatgcatgtgcattgctacggtttctgtacattaaattggtaaactttgttctaataaagcacaaaaaaatatgtatgttatgttggttagatgaatgtaaatctggagctaacaactatgacaatgtgcgaagttgaaaccaaatatgacaatggagtcatgtgcaggagtaaaccgtgtaatatc

SEQ ID NO: 10799 - DNA, 901 bp, Zea Mays
gtggggcctgcccactcctagctaggcccactaacttaagcctaatctattttggctcttcagtttccaaatcgtgtgccttccgttcgcaaacccttctcgctgccttctgcatccacgacgacgcctgcggcggcgctggcaaaatcccactgcgatggccaccaaatcccacgagaacaagaagcctactgcctccaagccgtctgtcaaccccaagtccccttcctccgacaagaaatccaagccgccgaagcccaccgaggagcagcgggagcaggtgccggcggtcaagaagccgaagaagcagaaggtgagggacgagatcgatgagatcttcagcgccgcaaaggcgggaaagaagcggaagccgccgcagcgggaggaggctgagacccatggggacgggaggaagaagcccaaggagagggccggggggagcagcagcaagaagaagaacaacaaggcgtcggggagtaagggcaagggtcgggtagctgctgctgacgacgacgaggaggaggagttcgaggagaagcggccgcgtcggcgcactgcggacggactcgccatatactcggccgatgagctcgggttcggcaaggccgacgccggtggcaccccgatgtgcccgttcgactgcgaatgctgcttctgagctctgagtttgtcggctgccgccttccctgccggagtgcggtaaatgcggtttttcttatctggctgaagaatatgttccaatgggaggatcaactcagaaatgcggtttttcttatcgtgcgatactgtctgtgcctgctgcttgattgctttgagaaacagaaaatgtatatcagtgcccaggggaatgggatgccagatgcccagattacacaagacaaatcttgaaggcttcttgttg

SEQ ID NO: 10800 - DNA, 2017 bp, Zea Mays
actcgcatatgagtcgttgcctcgcagtttatatccctactgtttcggactttcgggttttggccgacacccgacaatcttaacatcaaactcgtcgtccacgcctcctcggcaaggttgcgtacggcgtggccctaaggcataccagcgggatcaagctattttgctggccaaccgaacggtcaagccgacgatgacgctcggatcggcggcacacaagatcccgctggaggttgcgcacaccctcgtcgagatcgccgaggtcgcgcgctacgcctaccaccaccgccccggccgccctgcaacccacgagggggacccgactgcgccgcccgcaggggctgatagcagcgggggcaccaacgaggatgccgcgcggctgctggaggagaacgccatgctccgcgcccgactcgcagatgacctcgcgctcctgcgtgagctccacggcgcgccctgcgtctccaaggagtgccctcctgatctatacaaccgattgatggcggcggtcaacaatgttagcttccttgctcatctcgagaaattacaggatgagtcagcacgtcaacttaatgaactaacttctggcgacatgacagtgctattccattttctgcttcaatggaactagaggtggaagctgcagacattccggacaaagcgggtaacgggaagaaaggattgtgggtcttggtcccttgtgatacagctggagctaatttggaggaaattagtgggattgatgatgaaaattatgtcatagtaaatgaagacgatatagtcgatggtattgccgcctttgttgctaggtgcattcttgaagatccaaaatccaaggtacttacctctttaagacttttttagatgctatcaatggttgatgagcattctcattagcatctctaattttctatgatgtctaactatttctcattatgttccctccagtcgttatcgccaatgcagctccaaaagggttcgtctatcctccatgcaaccatgctgcactcaaacattgcaccgttaaatagctagctgtctgggtttctggggttcatcatttctgaatagttacataaattctcaactccgctactatatatcttactatgcattgatgatgattgtagccttttgttttatttatctagttttctgattacttgatgatatgtgagatatagtgtattgtacaagatgttaatccttatggtacctgagagtgtacacctatggtgtatgatggacaacgttgctaagttttgccactgtttaaagatccattgctgctttgacgaggttgcatatgtgatgattgattaagttgattttaagattgctatttgatgaagttgtactgtgtaggacatgttgggtacttttttctttcaatttctcattaaattaaccccactgggggtgtaacatgaatattagacagtatacatgaggttgaactttgtatttttttactcgccaacatcagtttcttattcatggctgagcttgagctgtgttcatgtgcaatctgatattttgttggatttaacttgtaagcagctgttgcaaaggcattagatagcatgaaagctcgatggagatggtcaaccttttgggaggctggacagattatatatatcttggctacttggggcatcacattagcagggttgtacaagagccgccatgtcctgaaggtggcagcaaagggtgctgctgtgtctgccagatttgttatgaaggccatttgagtgtaagaggcactcatgtgggatcagcaatttgcaaaatgtaaatacaaaactcgtcccgtcagttgtgcatatggttgtggcatgtttatcatgatgaagttatgatcatccagacatgaaaaactgtttcatttattttcgttgtatggacggtggtgtgattgcagaaaaaaaaaagatacatatgtgattacttgtaggatcgatactcgggccatgtttgtttccctcctaaattatacggagtataagctagactatgg

SEQ ID NO: 10801 - DNA, 1398 bp, Zea Mays
actcgcatatgagtcgttgcctcgcagtttatatccctactgtttcggactttcgggttttggccgacacccgacaatcttaacatcaaactcgtcgtccacgcctcctcggcaaggttgcgtacggcgtggccctaagcgggatcaagctattttgctggccaaccgaacggtcaagccgacgatgacgctcggatcggcggcacacaagatcccgctggaggttgcgcacaccctcgtcgagatcgccgaggtcgcgcgctacgcctaccaccaccgccccggccgccctgcaacccacgagggggacccgactgcgccgcccgcaggggctgatagcagcgggggcaccaacgaggatgccgcgcggctgctggaggagaacgccatgctccgcgcccgactcgcagatgacctcgcgctcctgcgtgagctccacggcgcgccctgcgtctccaaggagtgccctcctgatctatacaaccgattgatggcggcggtcaacaatgttagcttccttgctcatctcgagaaattacaggatgagtcagcacgtcaacttaatgaactaacttctggcgacatgacaggttcattcctcgttaagtattgtgaagtttgtttctagactacattttatggtcactgttggttcttctaatacattttgcgaagtgctattccattttctgcttcaatggaactagaggtggaagctgcagacattccggacaaagcgggtaacgggaagaaaggattgtgggtcttggtcccttgtgatacagctggagctaatttggaggaaattagtgggattgatgatgaaaattatgtcatagtaaatgaagacgatatagtcgatggtattgccgcctttgttgctaggtgcattcttgaagatccaaaatccaagtcgttatcgccaatgcagctccaaaaggctgttgcaaaggcattagatagcatgaaagctcgatggagatggtcaaccttttgggaggctggacagattatatatatcttggctacttggggcatcacattagcagggttgtacaagagccgccatgtcctgaaggtggcagcaaagggtgctgctgtgtctgccagatttgttatgaaggccatttgagtgtaagaggcactcatgtgggatcagcaatttgcaaaatgtaaatacaaaactcgtcccgtcagttgtgcatatggttgtggcatgtttatcatgatgaagttatgatcatccagacatgaaaaactgtttcatttattttcgttgtatggacggtggtgtgattgcagaaaaaaaaaagatacatatgtgattacttgtaggatcgatactcgggccatgtttgtttccctcctaaattatacggagtataagctagactatgg

SEQ ID NO: 10802 - DNA, 1931 bp, Zea Mays
aaacactaaatatgagatatatatctatatgtaacgtaccaagataccttgcatattactcgcatatgagtcgttgcctcgcagtttatatccctactgtttcggactttcgggttttggccgacacccgacaatcttaacatcaaactcgtcgtccacgcctcctcggcaaggttgcgtacggcgtggccctaaggcataccagcgggatcaagctattttgctggccaaccgaacggtcaagccgacgatgacgctcggatcggcggcacacaagatcccgctggaggttgcgcacaccctcgtcgagatcgccgaggtcgcgcgctacgcctaccaccaccgccccggccgccctgcaacccacgagggggacccgactgcgccgcccgcaggggctgatagcagcgggggcaccaacgaggatgccgcgcggctgctggaggagaacgccatgctccgcgcccgactcgcagatgacctcgcgctcctgcgtgagctccacggcgcgccctgcgtctccaaggagtgccctcctgatctatacaaccgattgatggcggcggtcaacaatgttagcttccttgctcatctcgagaaattacaggatgagtcagcacgtcaacttaatgaactaacttctggcgacatgacagaggtggaagctgcagacattccggacaaagcgggtaacgggaagaaaggattgtgggtcttggtcccttgtgatacagctggagctaatttggaggaaattagtgggattgatgatgaaaattatgtcatagtaaatgaagacgatatagtcgatggtattgccgcctttgttgctaggtgcattcttgaagatccaaaatccaagtcgttatcgccaatgcagctccaaaagggttcgtctatcctccatgcaaccatgctgcactcaaacattgcaccgttaaatagctagctgtctgggtttctggggttcatcatttctgaatagttacataaattctcaactccgctactatatatcttactatgcattgatgatgattgtagccttttgttttatttatctagttttctgattacttgatgatatgtgagatatagtgtattgtacaagatgttaatccttatggtacctgagagtgtacacctatggtgtatgatggacaacgttgctaagttttgccactgtttaaagatccattgctgctttgacgaggttgcatatgtgatgattgattaagttgattttaagattgctatttgatgaagttgtactgtgtaggacatgttgggtacttttttctttcaatttctcattaaattaaccccactgggggtgtaacatgaatattagacagtatacatgaggttgaactttgtatttttttactcgccaacatcagtttcttattcatggctgagcttgagctgtgttcatgtgcaatctgatattttgttggatttaacttgtaagcagctgttgcaaaggcattagatagcatgaaagctcgatggagatggtcaaccttttgggaggctggacagattatatatatcttggctacttggggcatcacattagcagggttgtacaagagccgccatgtcctgaaggtggcagcaaagggtgctgctgtgtctgccagatttgttatgaaggccatttgagtgtaagaggcactcatgtgggatcagcaatttgcaaaatgtaaatacaaaactcgtcccgtcagttgtgcatatggttgtggcatgtttatcatgatgaagttatgatcatccagacatgaaaaactgtttcatttattttcgttgtatggacggtggtgtgattgcagaaaaaaaaaagatacatatgtgattacttgtaggatcgatactcgggccatgtttgtttccctcctaaattatacggagtataagctagactatgg

SEQ ID NO: 10803 - DNA, 1922 bp, Zea Mays
aaacactaaatatgagatatatatctatatgtaacgtaccaagataccttgcatattactcgcatatgagtcgttgcctcgcagtttatatccctactgtttcggactttcgggttttggccgacacccgacaatcttaacatcaaactcgtcgtccacgcctcctcggcaaggttgcgtacggcgtggccctaagcgggatcaagctattttgctggccaaccgaacggtcaagccgacgatgacgctcggatcggcggcacacaagatcccgctggaggttgcgcacaccctcgtcgagatcgccgaggtcgcgcgctacgcctaccaccaccgccccggccgccctgcaacccacgagggggacccgactgcgccgcccgcaggggctgatagcagcgggggcaccaacgaggatgccgcgcggctgctggaggagaacgccatgctccgcgcccgactcgcagatgacctcgcgctcctgcgtgagctccacggcgcgccctgcgtctccaaggagtgccctcctgatctatacaaccgattgatggcggcggtcaacaatgttagcttccttgctcatctcgagaaattacaggatgagtcagcacgtcaacttaatgaactaacttctggcgacatgacagaggtggaagctgcagacattccggacaaagcgggtaacgggaagaaaggattgtgggtcttggtcccttgtgatacagctggagctaatttggaggaaattagtgggattgatgatgaaaattatgtcatagtaaatgaagacgatatagtcgatggtattgccgcctttgttgctaggtgcattcttgaagatccaaaatccaagtcgttatcgccaatgcagctccaaaagggttcgtctatcctccatgcaaccatgctgcactcaaacattgcaccgttaaatagctagctgtctgggtttctggggttcatcatttctgaatagttacataaattctcaactccgctactatatatcttactatgcattgatgatgattgtagccttttgttttatttatctagttttctgattacttgatgatatgtgagatatagtgtattgtacaagatgttaatccttatggtacctgagagtgtacacctatggtgtatgatggacaacgttgctaagttttgccactgtttaaagatccattgctgctttgacgaggttgcatatgtgatgattgattaagttgattttaagattgctatttgatgaagttgtactgtgtaggacatgttgggtacttttttctttcaatttctcattaaattaaccccactgggggtgtaacatgaatattagacagtatacatgaggttgaactttgtatttttttactcgccaacatcagtttcttattcatggctgagcttgagctgtgttcatgtgcaatctgatattttgttggatttaacttgtaagcagctgttgcaaaggcattagatagcatgaaagctcgatggagatggtcaaccttttgggaggctggacagattatatatatcttggctacttggggcatcacattagcagggttgtacaagagccgccatgtcctgaaggtggcagcaaagggtgctgctgtgtctgccagatttgttatgaaggccatttgagtgtaagaggcactcatgtgggatcagcaatttgcaaaatgtaaatacaaaactcgtcccgtcagttgtgcatatggttgtggcatgtttatcatgatgaagttatgatcatccagacatgaaaaactgtttcatttattttcgttgtatggacggtggtgtgattgcagaaaaaaaaaagatacatatgtgattacttgtaggatcgatactcgggccatgtttgtttccctcctaaattatacggagtataagctagactatgg

SEQ ID NO: 10804 - DNA, 986 bp, Zea Mays
ttaaattattgacttaaatttcaacaagaagataaaaaactatctaactccgaggcttttctgcgtagatcagagactcagcgaaaggctgagcaaaaggtccgcgaagaaagtgaaaggctgcgacagaaggaacgtgagcaaattgcagagaagcgtaagcgtgatatgctgctaaggcggaagaaaagaggttggagctgttgtacattcagtggactgagcaccataaaaggctgtccaatttcttaaggacaaaagctgaaccacctatttactacatgccaactaaaccaattattgacgatccagccattgttgaacagaacaaggaaaaggtattcgaagaatggaaatctatgcgcagggatgagctgactcggttccaaaagcaagttgaggagcaatatctctcaaatgtggagaggcagctggagaggatccagaatgcccggaacgctcgaaaggcgaacgggcatgctaacatgcaagaaatggacaaggagctggacacacacagggcggagcatggtccgaagactcggcgagttcctgaggagggcggtaatgatgacgacgaagacgcagaggacatggctgcggaagacgaggtgatggatgaagttctgggcatcaacgatgggatcaacgaggacccatccaagccgtccgaagaagctactactgaaggtggtgagcctgcacccgaggaagcacaataggattctttgttcacacaagctaggcacatagccgtacgtaccattccgtatgcttagttgccgtattgttgggaactgtttgtgcgtgtatttctgttagacgttccccgctggtttaggctgtgttttatattgctgttttgtctttttgaatgttgagaccatacaactgtcgatcattatctcataattgttgtaaaaatactataattgataccttgatttggacgtcggtggcgttaaacgtttcgggttctgttcttc

SEQ ID NO: 10805 - DNA, 1194 bp, Zea Mays
aattttggtggaatggctccattcctcaaatttcaacaagaagataaaaaactatctaactccgaggcttttctgcgtagatcagagactcagcgaaaggctgagcaaaaggtccgcgaagaaagtgaaaggctgcgacagaaggaacgtgagcaaattgcagagaagcgtaagcgtgatatgacgcttcgcgctcgtgtagctgctaaggcggaagaaaagaggttggagctgttgtacattcagtggactgagcaccataaaaggctgtccaatttcttaaggttatttttatttctggtccaaaagtgtccatattgacaattaaattgagggaagatacattctaattatgcagacttgatgtttgataaccattagtgtatctatttacattgtatactgatgaacaatatttgttccatgtttgactctatcttattacccccttatgttggcaggacaaaagctgaaccacctatttactacatgccaactaaaccaattattgacgatccagccattgttgaacagaacaaggaaaaggtattcgaagaatggaaatctatgcgcagggatgagctgactcggttccaaaagcaagttgaggagcaatatctctcaaatgtggagaggcagctggagaggatccagaatgcccggaacgctcgaaaggcgaacgggcatgctaacatgcaagaaatggacaaggagctggacacacacagggcggagcatggtccgaagactcggcgagttcctgaggagggcggtaatgatgacgacgaagacgcagaggacatggctgcggaagacgaggtgatggatgaagttctgggcatcaacgatgggatcaacgaggacccatccaagccgtccgaagaagctactactgaaggtggtgagcctgcacccgaggaagcacaataggattctttgttcacacaagctaggcacatagccgtacgtaccattccgtatgcttagttgccgtattgttgggaactgtttgtgcgtgtatttctgttagacgttccccgctggtttaggctgtgttttatattgctgttttgtctttttgaatgttgagaccatacaactgtcgatcattatctcataattgttgtaaaaatactataattgataccttgatttggacgtcggtggcgttaaacgtttcgggttctgttcttc

SEQ ID NO: 10806 - DNA, 1073 bp, Zea Mays
ctcgattctacattctagatgaggtggtggcgtggtgcatcatgagttgattcctcaattttggtggaatggctccattcctcaaatttcaacaagaagataaaaaactatctaactccgaggcttttctgcgtagatcagagactcagcgaaaggctgagcaaaaggtccgcgaagaaagtgaaaggctgcgacagaaggaacgtgagcaaattgcagagaagcgtaagcgtgatatgacgcttcgcgctcgtgtagctgctaaggcggaagaaaagaggttggagctgttgtacattcagtggactgagcaccataaaaggctgtccaatttcttaaggacaaaagctgaaccacctatttactacatgccaactaaaccaattattgacgatccagccattgttgaacagaacaaggaaaaggtattcgaagaatggaaatctatgcgcagggatgagctgactcggttccaaaagcaagttgaggagcaatatctctcaaatgtggagaggcagctggagaggatccagaatgcccggaacgctcgaaaggcgaacgggcatgctaacatgcaagaaatggacaaggagctggacacacacagggcggagcatggtccgaagactcggcgagttcctgaggagggcggtaatgatgacgacgaagacgcagaggacatggctgcggaagacgaggtgatggatgaagttctgggcatcaacgatgggatcaacgaggacccatccaagccgtccgaagaagctactactgaaggtggtgagcctgcacccgaggaagcacaataggattctttgttcacacaagctaggcacatagccgtacgtaccattccgtatgcttagttgccgtattgttgggaactgtttgtgcgtgtatttctgttagacgttccccgctggtttaggctgtgttttatattgctgttttgtctttttgaatgttgagaccatacaactgtcgatcattatctcataattgttgtaaaaatactataattgataccttgatttggacgtcggtggcgttaaacgtttcgggttctgttcttc

SEQ ID NO: 10807 - DNA, 1548 bp, Zea Mays
aggttgccaatccgagcgcagccaaacccaaaccctcctccctcccggctctcgacgggcgacggcgatggccgccgcgacagagaagacggctgaggacatccgccgcgagctccaggagctccagcgtcagcaccgcgagatcaccgagcgcctgcgcgacccccgtggccttcgccgcggcgcccccggccctggtcctggacccggggccccccgcccgctccgcggcttcgcgagacccgctgtgggtccggaatcgggggatcaacctccgcagaagcgtcggctgctatcagccgtagttaaggtggatggggctgaaaataacgaggaaggcacaaaggatgcggatgcggaggggcatgggacaggttcaggtgccactgaaggcagtgccgggaggggtttcaacaatggcgggttcagaagggatggtggcttgcggatgcagaggagagtggactataattcgctgccagagccagctccaagggagcttcccaggaatgaggacccgaatttggtgagaagaaataagaggatgctggggcagcttcttgtcggtacattagagaaatttcaacaagaagataaaaaactatctaactccgaggcttttctgcgtagatcagagactcagcgaaaggctgagcaaaaggtccgcgaagaaagtgaaaggctgcgacagaaggaacgtgagcaaattgcagagaagcgtaagcgtgatatgctgctaaggcggaagaaaagaggttggagctgttgtacattcagtggactgagcaccataaaaggctgtccaatttcttaaggacaaaagctgaaccacctatttactacatgccaactaaaccaattattgacgatccagccattgttgaacagaacaaggaaaaggtattcgaagaatggaaatctatgcgcagggatgagctgactcggttccaaaagcaagttgaggagcaatatctctcaaatgtggagaggcagctggagaggatccagaatgcccggaacgctcgaaaggcgaacgggcatgctaacatgcaagaaatggacaaggagctggacacacacagggcggagcatggtccgaagactcggcgagttcctgaggagggcggtaatgatgacgacgaagacgcagaggacatggctgcggaagacgaggtgatggatgaagttctgggcatcaacgatgggatcaacgaggacccatccaagccgtccgaagaagctactactgaaggtggtgagcctgcacccgaggaagcacaataggattctttgttcacacaagctaggcacatagccgtacgtaccattccgtatgcttagttgccgtattgttgggaactgtttgtgcgtgtatttctgttagacgttccccgctggtttaggctgtgttttatattgctgttttgtctttttgaatgttgagaccatacaactgtcgatcattatctcataattgttgtaaaaatactataattgataccttgatttggacgtcggtggcgttaaacgtttcgggttctgttcttc

SEQ ID NO: 10808 - DNA, 1540 bp, Zea Mays
gaaacccccaaccatcgttcccaggttgccaatccgagcgcagccaaacccaaaccctcctccctcccggctctcgacgggcgacggcgatggccgccgcgacagagaagacggctgaggacatccgccgcgagctccaggagctccagcgtcagcaccgcgagatcaccgagcgcctgcgcgacccccgtggccttcgccgcggcgcccccggccctggtcctggacccggggccccccgcccgctccgcggcttcgcgagacccgctgtgggtccggaatcgggggatcaacctccgcagaagcgtcggctgctatcagccgtagttaaggtggatggggctgaaaataacgaggaaggcacaaaggatgcggatgcggaggggcatgggacaggttcagaagggatggtggcttgcggatgcagaggagagtggactataattcgctgccagagccagctccaagggagcttcccaggaatgaggacccgaatttggtgagaagaaataagaggatgctggggcagcttcttgtcggtacattagagaaatttcaacaagaagataaaaaactatctaactccgaggcttttctgcgtagatcagagactcagcgaaaggctgagcaaaaggtccgcgaagaaagtgaaaggctgcgacagaaggaacgtgagcaaattgcagagaagcgtaagcgtgatatgacgcttcgcgctcgtgtagctgctaaggcggaagaaaagaggttggagctgttgtacattcagtggactgagcaccataaaaggctgtccaatttcttaaggacaaaagctgaaccacctatttactacatgccaactaaaccaattattgacgatccagccattgttgaacagaacaaggaaaaggtattcgaagaatggaaatctatgcgcagggatgagctgactcggttccaaaagcaagttgaggagcaatatctctcaaatgtggagaggcagctggagaggatccagaatgcccggaacgctcgaaaggcgaacgggcatgctaacatgcaagaaatggacaaggagctggacacacacagggcggagcatggtccgaagactcggcgagttcctgaggagggcggtaatgatgacgacgaagacgcagaggacatggctgcggaagacgaggtgatggatgaagttctgggcatcaacgatgggatcaacgaggacccatccaagccgtccgaagaagctactactgaaggtggtgagcctgcacccgaggaagcacaataggattctttgttcacacaagctaggcacatagccgtacgtaccattccgtatgcttagttgccgtattgttgggaactgtttgtgcgtgtatttctgttagacgttccccgctggtttaggctgtgttttatattgctgttttgtctttttgaatgttgagaccatacaactgtcgatcattatctcataattgttgtaaaaatactataattgataccttgatttggacgtcggtggcgttaaacgtttcgggttctgttcttc

SEQ ID NO: 10809 - DNA, 1777 bp, Zea Mays
tgaaactgcataaaacaatataatcaagaaatgtcaagcagaaaggtaattaaaagacacttggattttaaaatatcaaatagttagctcgattttaaaatgaactgtgttacaaccttacactagaagacctgcactgatagaaatgctactgccataaaagataaagaatggaaaattattcaagaatatattttagtgcaggcattcaatagtttcgcgttgaaacccaattgattagtatggcatcacttatttaatctatcacaaaacatattttaaatgccacaatcagttcattttgtatccaacttagacagccaaaaatcatttgtgatctactcccttcattccaaattataagatgctttagcttttctagatacatagctttcgctatgcacttagatatacactatgtcagtatgtctagatatacaataaaagcaatgtatctacaaaagccaaaatgtcttgtaatttgaaagagggagtataatgcatgtgatgggattttgaaagatgaatatgatcttgcgaaaccatgctttaattgagtcaatatgagagcgtgtagcatactagttctagtgcagcagtagcacaactatcatatcagttaaccatgttttggtgaatgtgtcccagagcatacagagatagtatatcaaactaccatcacagaagaaattcagctaataagccttagaataaacttgattaccaatttgtaacttctcaaatgaatgaaagaaaaaacaccaagaagcacaataaaacagataaaataatctgtgtacttcatttataacttatattaagtctgaggtttgatctcttaattacgggtacatttaaaataaaactgtcctttcaaagcatctctaagaagattcacatgggggtcagtctagtaaaaaccttaacactaaagtactttggcattgtgatttgaaacgtcaagcaaatgggattttatgttcattgacaactattttttcaagaagaataacagcgaaagcacctcttgatttttgcacattcattaatattgacaacttattgaactaaatcatgatgaaagaggctgaaggctccataagtaaatcaatatacattccaaaccacctcttttctcctccaaattgaggcattttgaaaattgaggcatgcgcctaagtggaatccaacatatgcttctaagatcactttgaggaaaacaatgagtatacaagtacagttacactgtgcactgttaaaggagacccagttatactacaaaagtgtttacaattacaaatataggttacaaaagtagctagaaagtcctagcaaacatccatactgcacatataaaacttcatagtgaagcctttgacaaggaacaggatcatccaatatactattaaggacaatctgtccacgatcataatacgctgaacaaaataccagcaatattcattcacttcatgacgtaagcgcaatgaacccaagtgtaactgtatagacttcttggaatctagaatattaatgataccgtatcacaatgattaaacctagctaatttcttgaaattataataactatgcattttcaaggctatttatcagtgaagaattttcaggttttcttgtaaaaatattatgcaaaaatatcataacatagcaatgtcattaaacggtccttgtcgggaaaattatatcaattaagagagcctttagaatgtcagaatacagtttctagtacctgcaaggggctatgtaatacaagcttgtaa

SEQ ID NO: 10810 - DNA, 185 bp, Zea Mays
ataacaaccactccctctgtcccaaaataaaatttgttttaacattttagtggattcatataatacttgatgtatgtgttctatatatgtgtctatattcatcatcgtctagttgaatatagacataaaaatctagagcaaaaacgaatactattttaagatggagggagtacataattaccaac

SEQ ID NO: 10811 - DNA, 2106 bp, Zea Mays
attgatgaggcgacgtgaccagcaacaaataggacacgccggctagtactgcgccagcccactccagcgctgaaggcctgcagcgccagcgcagcgcctctctgctactgtgctggctgacgccggtggggtgtgagcgaactgcgagctgctgccacccctgctgccgcggtcgaccgccggccccggaccgagatggacgctcggtgggcggtgctgctcgcgctgctggtcgccagcggcggcgtccgtgtctgcgccgccgctggggccaagggcgccaactggctgggcgggctgagccgcgcgtcgttccccaaggggttcgtgttcgggacggcgacgtcggcgtaccaggtcgagggcgccgcgtccaccaacggccggggcccctccatctgggattcattcgcgcacgtcccaggaaatattgcagggaatcaaaatggagacgttgcagtggatcaataccatcgctacaagacgtcgatctcatgaaaagtttgaactttgatgcctaccggttctcaatctcatggtccaggatcttcccggatggcgaagggaaagtcaatccagaaggtgtagcgtattacaataatttgataaactatctgcttcagcaaggcatgactccttacatcaacctttaccactatgatcttcctcttgcgcttgagaagaaatatggagggtggttaagcgcgaagatggcggacttgtttacagactatgctgacttctgttttaagacctacggcgatcgcgtaaagcactggtttacattcaatgagccaaggatagtagcgctacttggctatgacacagggtcaaatcctcctcaaagttgcaagataccgtacgaaatatcaggctgctcagaagggtaaggtcggaatagtcctggacttcaactggtacgaggctcttacaaactcacctgatgaccaagcagcagcccaaagagccagggacttccacattggctggtttgttgatccattgataaacggacactatccacagataatgcaagatctcgtgaaggagaggctgcccaggttcactcctgagcaggctaaactggtgaagggctcggcagactacatcggtatcaacgagtacacatccagctacatgaaggggcagaagctggtccagctggcgcccagtagctactctgccgattggcaggttcaatatgtttttgcacgcaatggcaaaccgattggaccacaggcgaattctaagtggctctacatcgccccgacggggatgtacgggtgcgtgaactacctcaaggagaagtatgggaatccaacgatctacataacggagaacggaatggaccagcctggaaacttgacccgagaccagtacctgcgcgacgccacgagggtgcggttctacaggagctacatcggccagctgaagaaggccatagaccagggagcgaacgtggctggctacttcgcctggtctctcctcgacaacttcgagtggctggcagggtactcgtccaagttcggcatcgtctacgtggacttcaacacgctcgaacgccacccgaaggcgtcggcctactggttcagggacatgcttcagaagcattgagatctccagagccgagcctgagcacggaaggtaccattttgttcagcttcgcctagtgtttgggatggcccaatggttcaaatccggctcagtgcctggctaccaaaatgggaacaaaggacagctaccccgatcaattgtgatgttgtgtgtttgtgggtatgttctctctggagtttgagctgtggttattttatcgtgttggttgatcgtgtttgaaatgcttaattcaggactgtgacatctcgagttgttttaactaaatcttataagaactaccctgatcgagcgctgggtaattggataaaatgaaaccaagagcccacaagtagagtttgaaataaaaatttcaaaaaatgtgatgagtaacgttatagtagagtttgaaataaaaaatgtgatgaagatagtcttaagaacttatttggatagtcttgcatcatctcattgttggaacttgctctcccgagcaagatgatccaacggggaagt

SEQ ID NO: 10812 - DNA, 2551 bp, Zea Mays
cccctcgattcaccgcaccgacacgcgacactactcattgatgaggcgacgtgaccagcaacaaataggacacgccggctagtactgcgccagcccactccagcgctgaaggcctgcagcgccagcgcagcgcctctctgctactgtgctggctgacgccggtggggtgtgagcgaactgcgagctgctgccacccctgctgccgcggtcgaccgccggccccggaccgagatggacgctcggtgggcggtgctgctcgcgctgctggtcgccagcggcggcgtccgtgtctgcgccgccgctggggccaagggcgccaactggctgggcgggctgagccgcgcgtcgttccccaaggggttcgtgttcgggacggcgacgtcggcgtaccaggtcgagggcgccgcgtccaccaacggccggggcccctccatctgggattcattcgcgcacgtcccaggaaatattgcagggaatcaaaatggagacgttgcagtggatcaataccatcgctacaaggaagacgtcgatctcatgaaaagtttgaactttgatgcctaccggttctcaatctcatggtccaggatcttcccggatggcgaagggaaagtcaatccagaaggtgtagcgtattacaataatttgataaactatctgcttcagcaaggcatgactccttacatcaacctttaccactatgatcttcctcttgcgcttgagaagaaatatggagggtggttaagcgcgaagatggcggacttgtttacagactatgctgacttctgttttaagacctacggcgatcgcgtaaagcactggtttacattcaatgagccaaggatagtagcgctacttggctatgacacagggtcaaatcctcctcaaaggtgcaccagatgcgctgctggtgggaattcagcaaccgaaccttacatagttgctcataattttctcttggcacatgctactgcagttgcaagataccgtacgaaatatcaggtatttccatcttgagaacctcagaagttcctctgaaaaataacatcactctagcactcctaggagtggtaaactgatgttattttattcaatgaagtgtgtggtccaagattttatttttaaatgaaatgtgggcagggtctatatatgcttggaagttggaacaatggtcagcatactttcacattaataactctactgttcatgaaatgcattagcttgttctcctaaacgattggacatgtgcctgtcgaatttcattagtttcttggactgaaaactgctgatggaagagtgacatgatgttttaaaaacataggctgctcagaagggtaaggtcggaatagtcctggacttcaactggtacgaggctcttacaaactcacctgatgaccaagcagcagcccaaagagccagggacttccacattggctggtttgttgatccattgataaacggacactatccacagataatgcaagatctcgtgaaggagaggctgcccaggttcactcctgagcaggctaaactggtgaagggctcggcagactacatcggtatcaacgagtacacatccagctacatgaaggggcagaagctggtccagctggcgcccagtagctactctgccgattggcaggttcaatatgtttttgcacgcaatggcaaaccgattggaccacaggcgaattctaagtggctctacatcgccccgacggggatgtacgggtgcgtgaactacctcaaggagaagtatgggaatccaacgatctacataacggagaacggaatggaccagcctggaaacttgacccgagaccagtacctgcgcgacgccacgagggtgcggttctacaggagctacatcggccagctgaagaaggccatagaccagggagcgaacgtggctggctacttcgcctggtctctcctcgacaacttcgagtggctggcagggtactcgtccaagttcggcatcgtctacgtggacttcaacacgctcgaacgccacccgaaggcgtcggcctactggttcagggacatgcttcagaagcattgagatctccagagccgagcctgagcacggaaggtaccattttgttcagcttcgcctagtgtttgggatggcccaatggttcaaatccggctcagtgcctggctaccaaaatgggaacaaaggacagctaccccgatcaattgtgatgttgtgtgtttgtgggtatgttctctctggagtttgagctgtggttattttatcgtgttggttgatcgtgtttgaaatgcttaattcaggactgtgacatctcgagttgttttaactaaatcttataagaactaccctgatcgagcgctgggtaattggataaaatgaaaccaagagcccacaagtagagtttgaaataaaaatttcaaaaaatgtgatgagtaacgttatagtagagtttgaaataaaaaatgtgatgaagatagtcttaagaacttatttggatagtcttgcatcatctcattgttggaacttgctctcccgagcaagatgatccaacggggaagt

SEQ ID NO: 10813 - DNA, 2174 bp, Zea Mays
ccgccggggtccccaccacacagagatgcccctcgattcaccgcaccgacacgcgacactactcattgatgaggcgacgtgaccagcaacaaataggacacgccggctagtactgcgccagcccactccagcgctgaaggcctgcagcgccagcgcagcgcctctctgctactgtgctggctgacgccggtggggtgtgagcgaactgcgagctgctgccacccctgctgccgcggtcgaccgccggccccggaccgagatggacgctcggtgggcggtgctgctcgcgctgctggtcgccagcggcggcgtccgtgtctgcgccgccgctggggccaagggcgccaactggctgggcgggctgagccgcgcgtcgttccccaaggggttcgtgttcgggacggcgacgtcggcgtaccaggtcgagggcgccgcgtccaccaacggccggggcccctccatctgggattcattcgcgcacgtcccaggaaatattgcagggaatcaaaatggagacgttgcagtggatcaataccatcgctacaaggaagacgtcgatctcatgaaaagtttgaactttgatgcctaccggttctcaatctcatggtccaggatcttcccggatggcgaagggaaagtcaatccagaaggtgtagcgtattacaataatttgataaactatctgcttcagcaaggcatgactccttacatcaacctttaccactatgatcttcctcttgcgcttgagaagaaatatggagggtggttaagcgcgaagatggcggacttgtttacagactatgctgacttctgttttaagacctacggcgatcgcgtaaagcactggtttacattcaatgagccaaggatagtagcgctacttggctatgacacagggtcaaatcctcctcaaagttgcaagataccgtacgaaatatcaggctgctcagaagggtaaggtcggaatagtcctggacttcaactggtacgaggctcttacaaactcacctgatgaccaagcagcagcccaaagagccagggacttccacattggctggtttgttgatccattgataaacggacactatccacagataatgcaagatctcgtgaaggagaggctgcccaggttcactcctgagcaggctaaactggtgaagggctcggcagactacatcggtatcaacgagtacacatccagctacatgaaggggcagaagctggtccagctggcgcccagtagctactctgccgattggcaggttcaatatgtttttgcacgcaatggcaaaccgattggaccacaggcgaattctaagtggctctacatcgccccgacggggatgtacgggtgcgtgaactacctcaaggagaagtatgggaatccaacgatctacataacggagaacggaatggaccagcctggaaacttgacccgagaccagtacctgcgcgacgccacgagggtgcggttctacaggagctacatcggccagctgaagaaggccatagaccagggagcgaacgtggctggctacttcgcctggtctctcctcgacaacttcgagtggctggcagggtactcgtccaagttcggcatcgtctacgtggacttcaacacgctcgaacgccacccgaaggcgtcggcctactggttcagggacatgcttcagaagcattgagatctccagagccgagcctgagcacggaaggtaccattttgttcagcttcgcctagtgtttgggatggcccaatggttcaaatccggctcagtgcctggctaccaaaatgggaacaaaggacagctaccccgatcaattgtgatgttgtgtgtttgtgggtatgttctctctggagtttgagctgtggttattttatcgtgttggttgatcgtgtttgaaatgcttaattcaggactgtgacatctcgagttgttttaactaaatcttataagaactaccctgatcgagcgctgggtaattggataaaatgaaaccaagagcccacaagtagagtttgaaataaaaatttcaaaaaatgtgatgagtaacgttatagtagagtttgaaataaaaaatgtgatgaagatagtcttaagaacttatttggatagtcttgcatcatctcattgttggaacttgctctcccgagcaagatgatccaacggggaagt

SEQ ID NO: 10814 - DNA, 1767 bp, Zea Mays
cgagaagggaaatattgcagggaatcaaaatggagacgttgcagtggatcaataccatcgctacaaggaagacgtcgatctcatgaaaagtttgaactttgatgcctaccggttctcaatctcatggtccaggatcttcccggatggcgaagggaaagtcaatccagaaggtgtagcgtattacaataatttgataaactatctgcttcagcaaggcatgactccttacatcaacctttaccactatgatcttcctcttgcgcttgagaagaaatatggagggtggttaagcgcgaagatggcggacttgtttacagactatgctgacttctgttttaagacctacggcgatcgcgtaaagcactggtttacattcaatgagccaaggatagtagcgctacttggctatgacacagggtcaaatcctcctcaaaggtgcaccagatgcgctgctggtgggaattcagcaaccgaaccttacatagttgctcataattttctcttggcacatgctactgcagttgcaagataccgtacgaaatatcaggctgctcagaagggtaaggtcggaatagtcctggacttcaactggtacgaggctcttacaaactcacctgatgaccaagcagcagcccaaagagccagggacttccacattggctggtttgttgatccattgataaacggacactatccacagataatgcaagatctcgtgaaggagaggctgcccaggttcactcctgagcaggctaaactggtgaagggctcggcagactacatcggtatcaacgagtacacatccagctacatgaaggggcagaagctggtccagctggcgcccagtagctactctgccgattggcagttgcacgcaatggcaaaccgattggaccacaggcgaattctaagtggctctacatcgccccgacggggatgtacgggtgcgtgaactacctcaaggagaagtatgggaatccaacgatctacataacggagaacggaatggaccagcctggaaacttgacccgagaccagtacctgcgcgacgccacgagggtgcggttctacaggagctacatcggccagctgaagaaggccatagaccagggagcgaacgtggctggctacttcgcctggtctctcctcgacaacttcgagtggctggcagggtactcgtccaagttcggcatcgtctacgtggacttcaacacgctcgaacgccacccgaaggcgtcggcctactggttcagggacatgcttcagaagcattgagatctccagagccgagcctgagcacggaaggtaccattttgttcagcttcgcctagtgtttgggatggcccaatggttcaaatccggctcagtgcctggctaccaaaatgggaacaaaggacagctaccccgatcaattgtgatgttgtgtgtttgtgggtatgttctctctggagtttgagctgtggttattttatcgtgttggttgatcgtgtttgaaatgcttaattcaggactgtgacatctcgagttgttttaactaaatcttataagaactaccctgatcgagcgctgggtaattggataaaatgaaaccaagagcccacaagtagagtttgaaataaaaatttcaaaaaatgtgatgagtaacgttatagtagagtttgaaataaaaaatgtgatgaagatagtcttaagaacttatttggatagtcttgcatcatctcattgttggaacttgctctcccgagcaagatgatccaacggggaagt

SEQ ID NO: 10815 - DNA, 1694 bp, Zea Mays
atgattgctgttcgatgggcggcgctgctggtcgcgctggtggtggcgtgcggcagcgctgctgcaggtgcagcggcgggggaaggacctaactggctgggcgggctgagccgggcggcgttccccaaggacttcgtgttcgggaccgcgacgtcggcgtaccaggtcgagggcgccgcgtccaccaacggccgaggcccctccacctgggacgcgttcgtgcacaccccaggaaacattgtatacaatcagacggcagatgtcgcagtggatcaatatcatcgctacagggaagatgtcgacctcatgaaaagtttgaattttgatgcctaccggttttcaatctcatggtccaggatcttcccagatggcgagggaagagtcaatccagaaggtgttgcctattacaacaatctgataaactacctgcttcggaaaggcattacaccgtacgccaatctttaccattccgatctccctcttgcgcttcagaacaagtatggagggtggttaaatgccaagatggcgaaactgttcacagactatgccgacttctgttttaagacttttggcgaccgtgtaaagcattggtttacattcaatgagccaaggatagtagcactacttggttatgacgctgggtcgattcctcctcaaaggtgtaccaaatgctctgctggtgggaattcagcaacggaaccttatatcgttgctcataattttctcttgtcacatgctgctgctgtgtcaagataccgtaacaagtatcaggctgctcagaaaggaaaggttggaatagttctggacttcaattggtatgaagctctcacaaactcaaccgaagaccaagcagcggctcaaagagcaagggatttccatgttggttgataatgcaagatattgtgaaagagaggctgcccaagtttactccggagcaagctaagttggtcaagggctcagcggattacattgggatcaatcaatacaccgctagctacgtgaagggccagaaactgctccagcagaagcctactagctactcagctgattggcaggttcaatatgttttagaacggaacggcaaaccgatcggaccacaggcgaattcaaagtggctttacatcgtcccagaagggatgtacggttgtgtgaactatctgaagcacaagtatggaaatccaacagttttcataaccgagaacggaatggatcagccaggaaacttgactcgtggccagtacctgcacgacaccacaagggtgcaattctacaaaggctacctcgctgagctgaggaaagccatcgatgacggcgccgacgtggctggctacttcgcttggtctctcctcgacaacttcgagtggcagtcaggttacacgtccaagtttggaatcgtctacgtcgacttcagcacgcccaagctcgaacgacaccccaaggcgtcagcctactggttcagagacatgctccagaaacacttatgagcgtctaacaaccaagcctgaaataggtaccattaaatttcttcagcgttgcctaagctagtggccatattattgtagcaaaagttgtaagctagcacagtgcaagggtatcaaaaattataaacgggcaatgaatttgtatgttccatgctaattgcattttaccatcggtcttgaaaattatctagcgagttgtcatctagatcctcg

SEQ ID NO: 10816 - DNA, 1870 bp, Zea Mays
caacaacgttgaaaacgggtgatgccgcgccggggactctggctatagggagtagcgacgaccttagctagcaatagcagccagcaggaactgtagattgctgctgggcaacagactgagagttgcttgcgctgcggcagcggagaagagagatgattgctgttcgatgggcggcgctgctggtcgcgctggtggtggcgtgcggcagcgctgctgcaggtgcagcggcgggggaaggacctaactggctgggcgggctgagccgggcggcgttccccaaggacttcgtgttcgggaccgcgacgtcggcgtaccaggtcgagggcgccgcgtccaccaacggccgaggcccctccacctgggacgcgttcgtgcacaccccaggaaacattgtatacaatcagacggcagatgtcgcagtggatcaatatcatcgctacagggaagatgtcgacctcatgaaaagtttgaattttgatgcctaccggttttcaatctcatggtccaggatcttcccagatggcgagggaagagtcaatccagaaggtgttgcctattacaacaatctgataaactacctgcttcggaaaggcattacaccgtacgccaatctttaccattccgatctccctcttgcgcttcagaacaagtatggagggtggttaaatgccaagatggcgaaactgttcacagactatgccgacttctgttttaagacttttggcgaccgtgtaaagcattggtttacattcaatgagccaaggatagtagcactacttggttatgacgctgggtcgattcctcctcaaaggtgtaccaaatgctctgctggtgggaattcagcaacggaaccttatatcgttgctcataattttctcttgtcacatgctgctgctgtgtcaagataccgtaacaagtatcaggctgctcagaaaggaaaggttggaatagttctggacttcaattggtatgaagctctcacaaactcaaccgaagaccaagcagcggctcaaagagcaagggatttccatgttggttggtttgctgatccattaataaatggacattatccacagataatgcaagatattgtgaaagagaggctgcccaagtttactccggagcaagctaagttggtcaagggctcagcggattacattgggatcaatcaatacaccgctagctacgtgaagggccagaaactgctccagcagaagcctactagctactcagctgattggcagtagaacggaacggcaaaccgatcggaccacaggcgaattcaaagtggctttacatcgtcccagaagggatgtacggttgtgtgaactatctgaagcacaagtatggaaatccaacagttttcataaccgagaacggaatggatcagccaggaaacttgactcgtggccagtacctgcacgacaccacaagggtgcaattctacaaaggctacctcgctgagctgaggaaagccatcgatgacggcgccgacgtggctggctacttcgcttggtctctcctcgacaacttcgagtggcagtcaggttacacgtccaagtttggaatcgtctacgtcgacttcagcacgcccaagctcgaacgacaccccaaggcgtcagcctactggttcagagacatgctccagaaacacttatgagcgtctaacaaccaagcctgaaataggtaccattaaatttcttcagcgttgcctaagctagtggccatattattgtagcaaaagttgtaagctagcacagtgcaagggtatcaaaaattataaacgggcaatgaatttgtatgttccatgctaattgcattttaccatcggtcttgaaaattatctagcgagttgtcatctagatcctcg

SEQ ID NO: 10817 - DNA, 1863 bp, Zea Mays
cggatacagccaacaacgttgaaaacgggtgatgccgcgccggggactctggctatagggagtagcgacgaccttagctagcaatagcagccagcaggaactgtagattgctgctgggcaacagactgagagttgcttgcgctgcggcagcggagaagagagatgattgctgttcgatgggcggcgctgctggtcgcgctggtggtggcgtgcggcagcgctgctgcaggtgcagcggcgggggaaggacctaactggctgggcgggctgagccgggcggcgttccccaaggacttcgtgttcgggaccgcgacgtcggcgtaccaggtcgagggcgccgcgtccaccaacggccgaggcccctccacctgggacgcgttcgtgcacaccccaggaaacattgtatacaatcagacggcagatgtcgcagtggatcaatatcatcgctacagggaagatgtcgacctcatgaaaagtttgaattttgatgcctaccggttttcaatctcatggtccaggatcttcccagatggcgagggaagagtcaatccagaaggtgttgcctattacaacaatctgataaactacctgcttcggaaaggcattacaccgtacgccaatctttaccattccgatctccctcttgcgcttcagaacaagaaactgttcacagactatgccgacttctgttttaagacttttggcgaccgtgtaaagcattggtttacattcaatgagccaaggatagtagcactacttggttatgacgctgggtcgattcctcctcaaaggtgtaccaaatgctctgctggtgggaattcagcaacggaaccttatatcgttgctcataattttctcttgtcacatgctgctgctgtgtcaagataccgtaacaagtatcaggctgctcagaaaggaaaggttggaatagttctggacttcaattggtatgaagctctcacaaactcaaccgaagaccaagcagcggctcaaagagcaagggatttccatgttggttggtttgctgatccattaataaatggacattatccacagataatgcaagatattgtgaaagagaggctgcccaagtttactccggagcaagctaagttggtcaagggctcagcggattacattgggatcaatcaatacaccgctagctacgtgaagggccagaaactgctccagcagaagcctactagctactcagctgattggcaggttcaatatgttttagaacggaacggcaaaccgatcggaccacaggcgaattcaaagtggctttacatcgtcccagaagggatgtacggttgtgtgaactatctgaagcacaagtatggaaatccaacagttttcataaccgagaacggaatggatcagccaggaaacttgactcgtggccagtacctgcacgacaccacaagggtgcaattctacaaaggctacctcgctgagctgaggaaagccatcgatgacggcgccgacgtggctggctacttcgcttggtctctcctcgacaacttcgagtggcagtcaggttacacgtccaagtttggaatcgtctacgtcgacttcagcacgcccaagctcgaacgacaccccaaggcgtcagcctactggttcagagacatgctccagaaacacttatgagcgtctaacaaccaagcctgaaataggtaccattaaatttcttcagcgttgcctaagctagtggccatattattgtagcaaaagttgtaagctagcacagtgcaagggtatcaaaaattataaacgggcaatgaatttgtatgttccatgctaattgcattttaccatcggtcttgaaaattatctagcgagttgtcatctagatcctcg

SEQ ID NO: 10818 - DNA, 1747 bp, Zea Mays
ctcacctcctattttaaatttcacactataaacaatacactctatagtacatagagtttgaaatcatctcctacttacctgcacctctctcacacctcacattcggacttgttcgtcacatctaatccagatgtaatggtaataaccgaataaggtctcaatagattataaggtgaaatgcccctccaacaactctccccatacctcaccatatacgacgggagagaagaaactctcccatatatagggaaacattgtatacaatcagacggcagatgtcgcagtggatcaatatcatcgctacagggaagatgtcgacctcatgaaaagtttgaattttgatgcctaccggttttcaatctcatggtccaggatcttcccagatggcgagggaagagtcaatccagaaggtgttgcctattacaacaatctgataaactacctgcttcggaaaggcattacaccgtacgccaatctttaccattccgatctccctcttgcgcttcagaacaagtatggagggtggttaaatgccaagatggcgaaactgttcacagactatgccgacttctgttttaagacttttggcgaccgtgtaaagcattggtttacattcaatgagccaaggatagtagcactacttggttatgacgctgggtcgattcctcctcaaaggtgtaccaaatgctctgctggtgggaattcagcaacggaaccttatatcgttgctcataattttctcttgtcacatgctgctgctgtgtcaagataccgtaacaagtatcaggctgctcagaaaggaaaggttggaatagttctggacttcaattggtatgaagctctcacaaactcaaccgaagaccaagcagcggctcaaagagcaagggatttccatgttggttggtttgctgatccattaataaatggacattatccacagataatgcaagatattgtgaaagagaggctgcccaagtttactccggagcaagctaagttggtcaagggctcagcggattacattgggatcaatcaatacaccgctagctacgtgaagggccagaaactgctccagcagaagcctactagctactcagctgattggcaggttcaatatgttttagaacggaacggcaaaccgatcggaccacaggcgaattcaaagtggctttacatcgtcccagaagggatgtacggttgtgtgaactatctgaagcacaagtatggaaatccaacagttttcataaccgagaacggaatggatcagccaggaaacttgactcgtggccagtacctgcacgacaccacaagggtgcaattctacaaaggctacctcgctgagctgaggaaagccatcgatgacggcgccgacgtggctggctacttcgcttggtctctcctcgacaacttcgagtggcagtcaggttacacgtccaagtttggaatcgtctacgtcgacttcagcacgcccaagctcgaacgacaccccaaggcgtcagcctactggttcagagacatgctccagaaacacttatgagcgtctaacaaccaagcctgaaataggtaccattaaatttcttcagcgttgcctaagctagtggccatattattgtagcaaaagttgtaagctagcacagtgcaagggtatcaaaaattataaacgggcaatgaatttgtatgttccatgctaattgcattttaccatcggtcttgaaaattatctagcgagttgtcatctagatcctcg

SEQ ID NO: 10819 - DNA, 3171 bp, Zea Mays
cagcgcgccaagcccgccacccgctaggccggtggcaaaaacaagttcccggtcacgtgtccgactgcccacggcacatatgactgtgagatgacccgacgccgaccagattgacctgttgccctgttgagtgtgaaggaggcgcacgcgcttgagctgaagaaactgccgcgctgatctagcccgccgggatgggcgcctcggggcctgcggctccgccggcaacgcatcgccgccgctgcatccagctgctgctgctgctcgccctggccgtcgcgccgcttggcagccgtgggcttcgcgtccgtgccgcgggggcggacacgggagggctgagccgggacgcgttcccgaaggggttcgtcttcgggacggcgacgtccgcgtaccaggtcgagggcgcggcgacgtccggcggccgcgggccctgcatctgggatcccttcgtccacacccccggaaagattgctgaagacgccaacgcagatgttacaacagatgaatatcatcgctacaaggaagatgttgatctcatgaaaagcctaaattttgatgcataccggttttcaatctcctggtccaggatcttcccagatggcgaagggaaaattaatgaagaaggagtacagtattacaacaatcttatagactacatgattaagcaaggccttactccttacgccaaccttaaccactatgatcttccgcttgcgcttcagaagaagtaccaaggctggttaggcccaaaaattgtggacatatttgctgactatgctgatttttgtttcaagacttttggcaatcgagtcaagaactggttcacattaaatgagccaaggatagtagcattccttggttatgataaagggcttaacccccctaaccggtgcacacaatgcactgccggtgggaactcatcgacagaaccttacattgttgttcataacattctcctatctcatgctactgcagttgcaagataccgcaataaataccaggcaactcagaaaggcaaggtcgggatagttcttgacttcaactggtatgaaccttttacaaactcaactgaagatcaaaaagcagcgcaaagggccagggacttccatattggttggtttcttgatccattaataaatgggcaatatccaaagataatgcaagacattgtgaaagaccggctaccaagtttcacacctgaacaggccaagctagtcaagggctcatcagactatttcgggatcaatcaatatactacatactacattgcagatcaacaaactcctccgcagggaccaccgagctactcgtccgactggggcgtccaatattactttcaaaggaatggcgtgcaaattggacagatggcgcactcaatttggctttacatcgtcccatcgggcatgtatggagtcgtgaactacctaaaggaaaagtaccataatccaatcatcatcatatcggaaaacggaatggatcagcctggaaacctcacgcgcgaggagtacgtgcacgacgccgtgaggatcgacttctacaagaactacctgacggagctaaagagagggatcgacggcggcgcgaacgtgatcggctacttcgcgtggtctctcctggacaacttcgagtggctgtcgggctacacgtccaagttcggcatcgtctacgtcgacttcgcgacgctgaagcggtaccccaaggactcggcgtactggttcagagacatgctttcggggacgggctccaaggctgctaccccgcagactggttcaggcggccggccggctggttcggcttcagccacctcgaacggacctgccttgctggtctcccttttggtctccttgggtgttctgcttccatccatcttcatggtttcctcggtctaattagaaatgtattttcatagtacggatttgtagttgtgtggatgacaacatgttccttttaagaatcaggacatgttgcatcgatgcgggacctgttgtaggaatgagaccatgattcagggcttattgttcagagccagttttgttttgttttgtttgcggattttcagatacagatttgaacgtgtattcatggatagcttgcgttttttggtgtaccaaatgctctgctggtgggaattcagcaacggaaccttatatcgttgctcataattttctcttgtcacatgctgctgctgtgtcaagataccgtaacaagtatcaggctgctcagaaaggaaaggttggaatagttctggacttcaattggtatgaagctctcacaaactcaaccgaagaccaagcagcggctcaaagagcaagggatttccatgttggttggtttgctgatccattaataaatggacattatccacagataatgcaagatattgtgaaagagaggctgcccaagtttactccggagcaagctaagttggtcaagggctcagcggattacattgggatcaatcaatacaccgctagctacgtgaagggccagaaactgctccagcagaagcctactagctactcagctgattggcaggttcaatatgttttagaacggaacggcaaaccgatcggaccacaggcgaattcaaagtggctttacatcgtcccagaagggatgtacggttgtgtgaactatctgaagcacaagtatggaaatccaacagttttcataaccgagaacggaatggatcagccaggaaacttgactcgtggccagtacctgcacgacaccacaagggtgcaattctacaaaggctacctcgctgagctgaggaaagccatcgatgacggcgccgacgtggctggctacttcgcttggtctctcctcgacaacttcgagtggcagtcaggttacacgtccaagtttggaatcgtctacgtcgacttcagcacgcccaagctcgaacgacaccccaaggcgtcagcctactggttcagagacatgctccagaaacacttatgagcgtctaacaaccaagcctgaaataggtaccattaaatttcttcagcgttgcctaagctagtggccatattattgtagcaaaagttgtaagctagcacagtgcaagggtatcaaaaattataaacgggcaatgaatttgtatgttccatgctaattgcattttaccatcggtcttgaaaattatctagcgagttgtcatctagatcctcg

SEQ ID NO: 10820 - DNA, 1207 bp, Zea Mays
gttttatttctcttctcaataggcaactcagaaaggcaaggtcgggatagttcttgacttcaactggtatgaaccttttacaaactcaactgaagatcaaaaagcagcgcaaagggccagggacttccatattggttggtttcttgatccattaataaatgggcaatatccaaagataatgcaagacattgtgaaagaccggctaccaagtttcacacctgaacaggccaagctagtcaagggctcatcagactatttcgggatcaatcaatatactacatactacattgcagatcaacaaactcctccgcagggaccaccgagctactcgtccgactggggcgtccaatattactttcaaaggaatggcgtgcaaattggacagatggtataggcttctccgggcgcactcaatttggctttacatcgtcccatcgggcatgtatggagtcgtgaactacctaaaggaaaagtaccataatccaatcatcatcatatcggaaaacggaatggatcagcctggaaacctcacgcgcgaggagtacgtgcacgacgccgtgaggatcgacttctacaagaactacctgacggagctaaagagagggatcgacggcggcgcgaacgtgatcggctacttcgcgtggtctctcctggacaacttcgagtggctgtcgggctacacgtccaagttcggcatcgtctacgtcgacttcgcgacgctgaagcggtaccccaaggactcggcgtactggttcagagacatgctttcggggacgggctccaaggctgctaccccgcagactggttcaggcggccggccggctggttcggcttcagccacctcgaacggacctgccttgctggtctcccttttggtctccttgggtgttctgcttccatccatcttcatggtttcctcggtctaattagaaatgtattttcatagtacggatttgtagttgtgtggatgacaacatgttccttttaagaatcaggacatgttgcatcgatgcgggacctgttgtaggaatgagaccatgattcagggcttattgttcagagccagttttgttttgttttgtttgcggattttcagatacagatttgaacgtgtattcatggatagcttgcgttttttggtgtatctgggcacctaccggtttagtggaggtgttctcttctctgcaacccgccgccggtgagaaag

SEQ ID NO: 10821 - DNA, 2059 bp, Zea Mays
agattgacctgttgccctgttgagtgtgaaggaggcgcacgcgcttgagctgaagaaactgccgcgctgatctagcccgccgggatgggcgcctcggggcctgcggctccgccggcaacgcatcgccgccgctgcatccagctgctgctgctgctcgccctggccgtcgcgccgcttggcagccgtgggcttcgcgtccgtgccgcgggggcggacacgggagggctgagccgggacgcgttcccgaaggggttcgtcttcgggacggcgacgtccgcgtaccaggtcgagggcgcggcgacgtccggcggccgcgggccctgcatctgggatcccttcgtccacacccccggaaagattgctgaagacgccaacgcagatgttacaacagatgaatatcatcgctacaaggaagatgttgatctcatgaaaagcctaaattttgatgcataccggttttcaatctcctggtccaggatcttcccagatggcgaagggaaaattaatgaagaaggagtacagtattacaacaatcttatagactacatgattaagcaaggccttactccttacgccaaccttaaccactatgatcttccgcttgcgcttcagaagaagtaccaaggctggttaggcccaaaaattgggacatatttgctgactatgctgatttttgtttcaagacttttggcaatcgagtcaagaactggttcacattaaatgagccaaggatagtagcattccttggttatgataaagggcttaacccccctaaccggtgcacacaatgcactgccggtgggaactcatcgacagaaccttacattgttgttcataacattctcctatctcatgctactgcagttgcaagataccgcaataaataccaggcaactcagaaaggcaaggtcgggatagttcttgacttcaactggtatgaaccttttacaaactcaactgaagatcaaaaagcagcgcaaagggccagggacttccatattggttggtttcttgatccattaataaatgggcaatatccaaagataatgcaagacattgtgaaagaccggctaccaagtttcacacctgaacaggccaagctagtcaagggctcatcagactatttcgggatcaatcaatatactacatactacattgcagatcaacaaactcctccgcagggaccaccgagctactcgtccgactggggcgtccaatattactttcaaaggaatggcgtgcaaattggacagatggcgcactcaatttggctttacatcgtcccatcgggcatgtatggagtcgtgaactacctaaaggaaaagtaccataatccaatcatcatcatatcggaaaacggaatggatcagcctggaaacctcacgcgcgaggagtacgtgcacgacgccgtgaggatcgacttctacaagaactacctgacggagctaaagagagggatcgacggcggcgcgaacgtgatcggctacttcgcgtggtctctcctggacaacttcgagtggctgtcgggctacacgtccaagttcggcatcgtctacgtcgacttcgcgacgctgaagcggtaccccaaggactcggcgtactggttcagagacatgctttcggggacgggctccaaggctgctaccccgcagactggttcaggcggccggccggctggttcggcttcagccacctcgaacggacctgccttgctggtctcccttttggtctccttgggtgttctgcttccatccatcttcatggtttcctcggtctaattagaaatgtattttcatagtacggatttgtagttgtgtggatgacaacatgttccttttaagaatcaggacatgttgcatcgatgcgggacctgttgtaggaatgagaccatgattcagggcttattgttcagagccagttttgttttgttttgtttgcggattttcagatacagatttgaacgtgtattcatggatagcttgcgttttttggtgtatctgggcacctaccggtttagtggaggtgttctcttctctgcaacccgccgccggtgagaaag

SEQ ID NO: 10822 - DNA, 2023 bp, Zea Mays
agattgacctgttgccctgttgagtgtgaaggaggcgcacgcgcttgagctgaagaaactgccgcgctgatctagcccgccgggatgggcgcctcggggcctgcggctccgccggcaacgcatcgccgccgctgcatccagctgctgctgctgctcgccctggccgtcgcgccgcttggcagccgtgggcttcgcgtccgtgccgcgggggcggacacgggagggctgagccgggacgcgttcccgaaggggttcgtcttcgggacggcgacgtccgcgtaccaggtcgagggcgcggcgacgtccggcggccgcgggccctgcatctgggatcccttcgtccacacccccggaaagattgctgaagacgccaacgcagatgttacaacagatgaatatcatcgctacaaggaagatgttgatctcatgaaaagcctaaattttgatgcataccggttttcaatctcctggtccaggatcttcccagatggcgaagggaaaattaatgaagaaggagtacagtattacaacaatcttatagactacatgattaagcaaggccttactccttacgccaaccttaaccactatgatcttccgcttgcgcttcagaagaagtaccaaggctggttaggcccaaaaattgtacttttggcaatcgagtcaagaactggttcacattaaatgagccaaggatagtagcattccttggttatgataaagggcttaacccccctaaccggtgcacacaatgcactgccggtgggaactcatcgacagaaccttacattgttgttcataacattctcctatctcatgctactgcagttgcaagataccgcaataaataccaggcaactcagaaaggcaaggtcgggatagttcttgacttcaactggtatgaaccttttacaaactcaactgaagatcaaaaagcagcgcaaagggccagggacttccatattggttggtttcttgatccattaataaatgggcaatatccaaagataatgcaagacattgtgaaagaccggctaccaagtttcacacctgaacaggccaagctagtcaagggctcatcagactatttcgggatcaatcaatatactacatactacattgcagatcaacaaactcctccgcagggaccaccgagctactcgtccgactggggcgtccaatattactttcaaaggaatggcgtgcaaattggacagatggcgcactcaatttggctttacatcgtcccatcgggcatgtatggagtcgtgaactacctaaaggaaaagtaccataatccaatcatcatcatatcggaaaacggaatggatcagcctggaaacctcacgcgcgaggagtacgtgcacgacgccgtgaggatcgacttctacaagaactacctgacggagctaaagagagggatcgacggcggcgcgaacgtgatcggctacttcgcgtggtctctcctggacaacttcgagtggctgtcgggctacacgtccaagttcggcatcgtctacgtcgacttcgcgacgctgaagcggtaccccaaggactcggcgtactggttcagagacatgctttcggggacgggctccaaggctgctaccccgcagactggttcaggcggccggccggctggttcggcttcagccacctcgaacggacctgccttgctggtctcccttttggtctccttgggtgttctgcttccatccatcttcatggtttcctcggtctaattagaaatgtattttcatagtacggatttgtagttgtgtggatgacaacatgttccttttaagaatcaggacatgttgcatcgatgcgggacctgttgtaggaatgagaccatgattcagggcttattgttcagagccagttttgttttgttttgtttgcggattttcagatacagatttgaacgtgtattcatggatagcttgcgttttttggtgtatctgggcacctaccggtttagtggaggtgttctcttctctgcaacccgccgccggtgagaaag

SEQ ID NO: 10823 - DNA, 1972 bp, Zea Mays
agattgacctgttgccctgttgagtgtgaaggaggcgcacgcgcttgagctgaagaaactgccgcgctgatctagcccgccgggatgggcgcctcggggcctgcggctccgccggcaacgcatcgccgccgctgcatccagctgctgctgctgctcgccctggccgtcgcgccgcttggcagccgtgggcttcgcgtccgtgccgcgggggcggacacgggagggctgagccgggacgcgttcccgaaggggttcgtcttcgggacggcgacgtccgcgtaccaggtcgagggcgcggcgacgtccggcggccgcgggccctgcatctgggatcccttcgtccacacccccggaaagattgctgaagacgccaacgcagatgttacaacagatgaatatcatcgctacaaggaagatgttgatctcatgaaaagcctaaattttgatgcataccggttttcaatctcctggtccaggatcttcccagatggcgaagggaaaattaatgaagaaggagtacagtattacaacaatcttatagactacatgattaagcaagggacatatttgctgactatgctgatttttgtttcaagacttttggcaatcgagtcaagaactggttcacattaaatgagccaaggatagtagcattccttggttatgataaagggcttaacccccctaaccggtgcacacaatgcactgccggtgggaactcatcgacagaaccttacattgttgttcataacattctcctatctcatgctactgcagttgcaagataccgcaataaataccaggcaactcagaaaggcaaggtcgggatagttcttgacttcaactggtatgaaccttttacaaactcaactgaagatcaaaaagcagcgcaaagggccagggacttccatattggttggtttcttgatccattaataaatgggcaatatccaaagataatgcaagacattgtgaaagaccggctaccaagtttcacacctgaacaggccaagctagtcaagggctcatcagactatttcgggatcaatcaatatactacatactacattgcagatcaacaaactcctccgcagggaccaccgagctactcgtccgactggggcgtccaatattactttcaaaggaatggcgtgcaaattggacagatggcgcactcaatttggctttacatcgtcccatcgggcatgtatggagtcgtgaactacctaaaggaaaagtaccataatccaatcatcatcatatcggaaaacggaatggatcagcctggaaacctcacgcgcgaggagtacgtgcacgacgccgtgaggatcgacttctacaagaactacctgacggagctaaagagagggatcgacggcggcgcgaacgtgatcggctacttcgcgtggtctctcctggacaacttcgagtggctgtcgggctacacgtccaagttcggcatcgtctacgtcgacttcgcgacgctgaagcggtaccccaaggactcggcgtactggttcagagacatgctttcggggacgggctccaaggctgctaccccgcagactggttcaggcggccggccggctggttcggcttcagccacctcgaacggacctgccttgctggtctcccttttggtctccttgggtgttctgcttccatccatcttcatggtttcctcggtctaattagaaatgtattttcatagtacggatttgtagttgtgtggatgacaacatgttccttttaagaatcaggacatgttgcatcgatgcgggacctgttgtaggaatgagaccatgattcagggcttattgttcagagccagttttgttttgttttgtttgcggattttcagatacagatttgaacgtgtattcatggatagcttgcgttttttggtgtatctgggcacctaccggtttagtggaggtgttctcttctctgcaacccgccgccggtgagaaag

SEQ ID NO: 10824 - DNA, 2084 bp, Zea Mays
cgccgaccagattgacctgttgccctgttgagtgtgaaggaggcgcacgcgcttgagctgaagaaactgccgcgctgatctagcccgccgggatgggcgcctcggggcctgcggctccgccggcaacgcatcgccgccgctgcatccagctgctgctgctgctcgccctggccgtcgcgccgcttggcagccgtgggcttcgcgtccgtgccgcgggggcggacacgggagggctgagccgggacgcgttcccgaaggggttcgtcttcgggacggcgacgtccgcgtaccaggtcgagggcgcggcgacgtccggcggccgcgggccctgcatctgggatcccttcgtccacacccccggaaagattgctgaagacgccaacgcagatgttacaacagatgaatatcatcgctacaaggaagatgttgatctcatgaaaagcctaaattttgatgcataccggttttcaatctcctggtccaggatcttcccagatggcgaagggaaaattaatgaagaaggagtacagtattacaacaatcttatagactacatgattaagcaaggccttactccttacgccaaccttaaccactatgatcttccgcttgcgcttcagaagaagtaccaaggctggttaggcccaaaaattgtggacatatttgctgactatgctgatttttgtttcaagacttttggcaatcgagtcaagaactggttcacattaaatgagccaaggatagtagcattccttggttatgataaagggcttaacccccctaaccggtgcacacaatgcactgccggtgggaactcatcgacagaaccttacattgttgttcataacattctcctatctcatgctactgcagttgcaagataccgcaataaataccaggcaactcagaaaggcaaggtcgggatagttcttgacttcaactggtatgaaccttttacaaactcaactgaagatcaaaaagcagcgcaaagggccagggacttccatattggttggtttcttgatccattaataaatgggcaatatccaaagataatgcaagacattgtgaaagaccggctaccaagtttcacacctgaacaggccaagctagtcaagggctcatcagactatttcgggatcaatcaatatactacatactacattgcagatcaacaaactcctccgcagggaccaccgagctactcgtccgactggggcgtccaatattactttcaaaggaatggcgtgcaaattggacagatggtataggcttctccgggcgcactcaatttggctttacatcgtcccatcgggcatgtatggagtcgtgaactacctaaaggaaaagtaccataatccaatcatcatcatatcggaaaacggaatggatcagcctggaaacctcacgcgcgaggagtacgtgcacgacgccgtgaggatcgacttctacaagaactacctgacggagctaaagagagggatcgacggcggcgcgaacgtgatcggctacttcgcgtggtctctcctggacaacttcgagtggctgtcgggctacacgtccaagttcggcatcgtctacgtcgacttcgcgacgctgaagcggtaccccaaggactcggcgtactggttcagagacatgctttcggggacgggctccaaggctgctaccccgcagactggttcaggcggccggccggctggttcggcttcagccacctcgaacggacctgccttgctggtctcccttttggtctccttgggtgttctgcttccatccatcttcatggtttcctcggtctaattagaaatgtattttcatagtacggatttgtagttgtgtggatgacaacatgttccttttaagaatcaggacatgttgcatcgatgcgggacctgttgtaggaatgagaccatgattcagggcttattgttcagagccagttttgttttgttttgtttgcggattttcagatacagatttgaacgtgtattcatggatagcttgcgttttttggtgtatctgggcacctaccggtttagtggaggtgttctcttctctgcaacccgccgccggtgagaaag

SEQ ID NO: 10825 - DNA, 2241 bp, Zea Mays
atcgacttctccaatctcatttcggcaacctttccaaggaactcctctgatgctacagtaataatagaagaaagatggacctgctcagcatcattctagttatagcatctctgctcccattcgcagcatctgatggtcaaggtgatgccttgtacgatatgaagctgaaactaaatgctactggcagtcagctttctgactggaaccaaaatcaagtcaacccatgcacctggaattctgttatttgtgacaacaacaaccatgttgtgcaagtaacattggcttctatggggtttactggagttctgtcaccaagaatcggagatctggagtatttaaatgttctgtccttgcctggtaacaacatctctggtggcataccagaagaatttggcaacctctctcgattgacaagcttagatttggaagacaacctgttggttgggccaataccagcttcacttggcaggctttcaaagctccagcttctgatactaagtcaaaacaatctcaatggctctattcctgatacactagcaagcattttaagcttgacagacattcggctggcttacaataaactcactggtcaaataccttcccagttgtttcaagttgcacgttacaatttttcaggtaataacttgacatgtggagcaaacttcctccatccatgtgcctcaaatatgtcttaccaaggttcttcccgtggttcgacaataggcattgtgcttgggacagttggaggtcttatggggcttctaatcatatgggctgtattcattatctgcaatggaaggaggaaaagccatctacgtgaaatatttgtggatgtatcaggtgaggatgatcgtagaattgcatttggccagttgaaaagatttgcatggcgagaattgcaacttgcaactgataatttcagtgagaaaaatgttcttggacaagggggttttgggaaagtatataaaggagcacttccagatggcactaagattgctgtaaaacggttaactgattacgaaagtccaggtggagaggctgctttcttgcgtgaggttgagctaattagtgttgcagttcaccggaatcttttaagattgattggtttctgtacaacacaaacagagcgcctacttgtttatcctttcatgcaaaatcttagtgtggcctaccgtctacgagaatttaaacctggggagccaatattagactggtccgcaaggaagcgagtggctataggcacagctcgtggactggagtatttgcacgagcactgcaatcctaagattatacatcgtgacgtcaaggctgccaatgtcttgcttgatgaaggttttgaaccggtggttggggatttcggcctggccaagctggtggacgtgcagaagacgtccgtgactacccaggtccgtggaaccatgggtcacatcgcccccgaatacctgtccactgggaagtcctccgagagaaccgatgtttttggctatggcataatgcttcttgagctagtcactggtcagcgtgccatcgacttttcacgtctggaggaagaagatgacgtgttgttacttgaccatgtcaagaagctgcagagggaagggcatctcgacgccatcgttgaccgcaacttgaacagctgttacaacgggcaggaggtggagatgatgatccagatcgcgctgctctgcacgcaggcgtcgcccgaggaccgcccgtccatgtccgaggtggtccggatgctggagggcgagggcctcgccgagaggtgggaggagtggcagcaggtggaggtgacgaggaggcaggactacgagcggatgcagcagcgcttcgactggggcgaggactccatctacaaccaggacgcgatcgaactgtccgccggcaggtgacgacgtcgggtcgtcacacggagcttgtcgtcgtcgacgtcgcagtgccgacatgtaactgtatatgtaaggcattgttgcgaagcttgttagcaaaatataatctgtgacactcacttagtgttgatacgtgcctgtattttattatttgtgtgtataaggaaggatgatttaaacgggttcaggtgtttaccggttgtccggctcccatcctgtaaagctctatataggggggtggggaccggttgaaaccacatcacatgcaagctgcaagaattggcttgacaaatatttaacgaactctattgtcgacataaaaagtaagtgataaacgaactctattgtggga

SEQ ID NO: 10826 - DNA, 2382 bp, Zea Mays
cacccacccaccctgccacccaccagacactgtgttttactggagtgccaaccagacctgactgctacctgccgaatcgcgcgcgcctgccaaaaaggcaatgggctcccgttccggaacagcaccaccagcggtcaatttcgacgcctggagtcaaccggccgagtcgtccacctacgccttcacagttcacacgcgcggcggcggcggcggcggtggagcgggtgatgagggaagtggcgtgaaccaccgaatctcgcggtcgcggagcgggcgtcgcgggcgaacgagccccggtctctctcttctctgcgcgcaacctttccaaggaactcctctgatgctacagtaataatagaagaaagatggacctgctcagcatcattctagttatagcatctctgctcccattcgcagcatctgatggtcaaggtgatgccttgtacgatatgaagctgaaactaaatgctactggcagtcagctttctgactggaaccaaaatcaagtcaacccatgcacctggaattctgttatttgtgacaacaacaaccatgttgtgcaagtaacattggcttctatggggtttactggagttctgtcaccaagaatcggagatctggagtatttaaatgttctgtccttgcctggtaacaacatctctggtggcataccagaagaatttggcaacctctctcgattgacaagcttagatttggaagacaacctgttggttgggccaataccagcttcacttggcaggctttcaaagctccagcttctgatactaagtcaaaacaatctcaatggctctattcctgatacactagcaagcattttaagcttgacagacattcggctggcttacaataaactcactggtcaaataccttcccagttgtttcaagttgcacgttacaatttttcaggtaataacttgacatgtggagcaaacttcctccatccatgtgcctcaaatatgtcttaccaaggttcttcccgtggttcgacaataggcattgtgcttgggacagttggaggtcttatggggcttctaatcatatgggctgtattcattatctgcaatggaaggaggaaaagccatctacgtgaaatatttgtggatgtatcaggtgaggatgatcgtagaattgcatttggccagttgaaaagatttgcatggcgagaattgcaacttgcaactgataatttcagtgagaaaaatgttcttggacaagggggttttgggaaagtatataaaggagcacttccagatggcactaagattgctgtaaaacggttaactgattacgaaagtccaggtggagaggctgctttcttgcgtgaggttgagctaattagtgttgcagttcaccggaatcttttaagattgattggtttctgtacaacacaaacagagcgcctacttgtttatcctttcatgcaaaatcttagtgtggcctaccgtctacgaggttttgaaccggtggttggggatttcggcctggccaagctggtggacgtgcagaagacgtccgtgactacccaggtccgtggaaccatgggtcacatcgcccccgaatacctgtccactgggaagtcctccgagagaaccgatgtttttggctatggcataatgcttcttgagctagtcactggtcagcgtgccatcgacttttcacgtctggaggaagaagatgacgtgttgttacttgaccatgtcaagaagctgcagagggaagggcatctcgacgccatcgttgaccgcaacttgaacagctgttacaacgggcaggaggtggagatgatgatccagatcgcgctgctctgcacgcaggcgtcgcccgaggaccgcccgtccatgtccgaggtggtccggatgctggagggcgagggcctcgccgagaggtgggaggagtggcagcaggtggaggtgacgaggaggcaggactacgagcggatgcagcagcgcttcgactggggcgaggactccatctacaaccaggacgcgatcgaactgtccgccggcaggtgacgacgtcgggtcgtcacacggagcttgtcgtcgtcgacgtcgcagtgccgacatgtaactgtatatgtaaggcattgttgcgaagcttgttagcaaaatataatctgtgacactcacttagtgttgatacgtgcctgtattttattatttgtgtgtataaggaaggatgatttaaacgggttcaggtgtttaccggttgtccggctcccatcctgtaaagctctatataggggggtggggaccggttgaaaccacatcacatgcaagctgcaagaattggcttgacaaatatttaacgaactctattgtcgacataaaaagtaagtgataaacgaactctattgtggga

SEQ ID NO: 10827 - DNA, 2586 bp, Zea Mays
gcaaagtccaattccaccttatccgaagggccagaaagaaaggttcgaaagatccacccacccaccctgccacccaccagacactgtgttttactggagtgccaaccagacctgactgctacctgccgaatcgcgcgcgcctgccaaaaaggcaatgggctcccgttccggaacagcaccaccagcggtcaatttcgacgcctggagtcaaccggccgagtcgtccacctacgccttcacagttcacacgcgcggcggcggcggcggcggtggagcgggtgatgagggaagtggcgtgaaccaccgaatctcgcggtcgcggagcgggcgtcgcgggcgaacgagccccggtctctctcttctctgcgcgcaacctttccaaggaactcctctgatgctacagtaataatagaagaaagatggacctgctcagcatcattctagttatagcatctctgctcccattcgcagcatctgatggtcaaggtgatgccttgtacgatatgaagctgaaactaaatgctactggcagtcagctttctgactggaaccaaaatcaagtcaacccatgcacctggaattctgttatttgtgacaacaacaaccatgttgtgcaagtaacattggcttctatggggtttactggagttctgtcaccaagaatcggagatctggagtatttaaatgttctgtccttgcctggtaacaacatctctggtggcataccagaagaatttggcaacctctctcgattgacaagcttagatttggaagacaacctgttggttgggccaataccagcttcacttggcaggctttcaaagctccagcttctgatactaagtcaaaacaatctcaatggctctattcctgatacactagcaagcattttaagcttgacagacattcggctggcttacaataaactcactggtcaaataccttcccagttgtttcaagttgcacgttacaatttttcaggtaataacttgacatgtggagcaaacttcctccatccatgtgcctcaaatatgtcttaccaaggttcttcccgtggttcgacaataggcattgtgcttgggacagttggaggtcttatggggcttctaatcatatgggctgtattcattatctgcaatggaaggaggaaaagccatctacgtgaaatatttgtggatgtatcaggtgaggatgatcgtagaattgcatttggccagttgaaaagatttgcatggcgagaattgcaacttgcaactgataatttcagtgagaaaaatgttcttggacaagggggttttgggaaagtatataaaggagcacttccagatggcactaagattgctgtaaaacggttaactgattacgaaagtccaggtggagaggctgctttcttgcgtgaggttgagctaattagtgttgcagttcaccggaatcttttaagattgattggtttctgtacaacacaaacagagcgcctacttgtttatcctttcatgcaaaatcttagtgtggcctaccgtctacgagaatttaaacctggggagccaatattagactggtccgcaaggaagcgagtggctataggcacagctcgtggactggagtatttgcacgagcactgcaatcctaagattatacatcgtgacgtcaaggctgccaatgtcttgcttgatgaaggttttgaaccggtggttggggatttcggcctggccaagctggtggacgtgcagaagacgtccgtgactacccaggtccgtggaaccatgggtcacatcgcccccgaatacctgtccactgggaagtcctccgagagaaccgatgtttttggctatggcataatgcttcttgagctagtcactggtcagcgtgccatcgacttttcacgtctggaggaagaagatgacgtgttgttacttgaccatgtcaagaagctgcagagggaagggcatctcgacgccatcgttgaccgcaacttgaacagctgttacaacgggcaggaggtggagatgatgatccagatcgcgctgctctgcacgcaggcgtcgcccgaggaccgcccgtccatgtccgaggtggtccggatgctggagggcgagggcctcgccgagaggtgggaggagtggcagcaggtggaggtgacgaggaggcaggactacgagcggatgcagcagcgcttcgactggggcgaggactccatctacaaccaggacgcgatcgaactgtccgccggcaggtgacgacgtcgggtcgtcacacggagcttgtcgtcgtcgacgtcgcagtgccgacatgtaactgtatatgtaaggcattgttgcgaagcttgttagcaaaatataatctgtgacactcacttagtgttgatacgtgcctgtattttattatttgtgtgtataaggaaggatgatttaaacgggttcaggtgtttaccggttgtccggctcccatcctgtaaagctctatataggggggtggggaccggttgaaaccacatcacatgcaagctgcaagaattggcttgacaaatatttaacgaactctattgtcgacataaaaagtaagtgataaacgaactctattgtggga

SEQ ID NO: 10828 - DNA, 2604 bp, Zea Mays
cttgcttgagcattatgatgtcaatcaatcagataaaagaatgcctaggataaatggtttcaagtttccaaggtattatggaaaatgttactaaaaaataacagagaacaattgaaacaatcaaaagtgtatatttatgagagactatccttcggtagaagtagtggaaaatacatgccctattcaaaagttgactcctttctaaagatatgtcaaatccttgggttagctggaattgatctgtttaccccttctgatgtggtcgaaaaaagaaatgttcggaaagtctgtatatgcatacgatcggtgtctaaaaagtcactcatcttgcacctaaatgtgcctgattttgatgtagtcacctacacaatatccatgccaaactatgttgttggaggtattcgtagaaatctggagcagacacagtacagctcatccagttcaagtggatacagtccatgtgcccgttctaaagtactacagcaacagataatatttggagggcagaatgaccagcacgaggacacacattatgactctgatgaagcagaaagcaaactctctcttctagaacctgaggactcagttaatgaagataattttgcggctgtgctttcacaatttaacgatgcccatgcccccaacaaagaaagcgaaggctatggagaaagtggacgtggcaagcatggagaaaaatctctagctgaatcagtgggatcacttaacattggcattattgattctgagttcatggattcaagtcctctaattcatgataaagaatcatgttttcctctagaacctgagggctccgttaatgaagataattttacagctgtgctttcacaatttaacgatgcccccaacaaagaaagtgaaggctatggagaaagtggatgtggtaagcatggagaaaaatctctagttgaatcagtgggatcacttaacattggcattgttgattctgagttcatggattcaagtcctctaattcatgataaagaatcatgttctcctctagaacctgaggactccgttaatgaagataattttacagctgtgctttcacaatttaacgatgcccccaacaaagaaagtgaagcctatggagaaagtggatgtggtaagcatggagaaaactctctagatgaatcagtgggatcacttaacattggcgttattgattctgagttcatggattcaagtcctctaattcatgataaagaatcatgttctcctctagaacctgaggactccgttaatgaagataattttgcagctgtgctttcacaatatagcgatggccccaacgaaggaaatgaaggatatggagaaagtggacattacaagcatgaagaaaagtctctagatgaatcagtgggatcactaaccattggcattattgattctgagttcatggattcaagtcgtccaattcatgataaagaatcatgttctactggttctgcagctgaccaatgttcaaggactataccggctaaatatgaattaagttcagaagagtcagattccacaggcagtcatttggtgtttgacagtggcaagaattatctggagttgaacaatcattctgtcacagatttggaaaggatttacaatggacatgccacgtctgtagatcaatatgttcggggaaatggggagacattagctgaccatccaaaaaaagaggaagctggcctccaaaaggacactggcaccatagctcaacatcgtgatacccttgcttgtgatggggagtctgtgtgttcgagttgtgaagagccgagacgtggattaaatggcgagccatcagacttcagctcggagtcacactcgagactgaccccaacacataacacaggtggcaaattgtcgatggtttctgaacatccagtgcataatatggagtcagatatgactgggatggcaagtgatagcactaacccggagctgaatcctgaagccagcaccaggaacgaaatggacggctcccgatccactgataacccagtggaaccagaaaacgtagctcaggacagcgccactcgaggaaggcctgaaggcgacgcccccagatcagggaaaggggttctgaggtcggtcgctggaggaatcacccttgtcggcgcagtgttcttcatgttccatctcagaagaagcaaggggggaagctttgcgacggtcataccatctctttcgggaaaatctgctcggagcaacgcaagggccaggaacatgggcagagaaaacgtccctgatgcgtatcccggggggcggctgaaggcttgacaagacgatggagcacagtctgcttcacagaatctggatgaactctgtcgacccaccagtcaagttgaagtcagtaccctgccttctttcatgtacagaacgacataatcatatgatttaggtgatcgattacagcaaatagtgggacagattttgtacaagtatagttgaggcatgaataaagtctagtttccaacctccaacgtttaaacctagacggtggttgaaaaccagaacggcgttgtgtttaagtcatcactaccctttcatcagtgggattatccacagaccacagatataatttatagagac

SEQ ID NO: 10829 - DNA, 4398 bp, Zea Mays
gtttcttcatgaggcctccctgcatgaataaaagtttcaagtttccaaggtattatggaaaatgttactaaaaaataacagagaacaattgaaacaatcaaaagtgtatatttatgagagactatccttcggtagaagtagtggaaaatacatgccctattcaaaagttgactcctttctaaaggtatggatctttgcacattttccttctagacgattcggttctattaatatatttttgagcgaaattcttgattttaacttcatgtgttcaatatttttgttaacttgaagtgcattaattttggtaaaagtgaacaaatacaaatctttcaaaacatttttcccatttgaggagcttgaatgaagctttctttccacgaatgcgtacgaagcatattcctagcatgaattccgttgcaagtagccagtctgatgagtttgatccgtgtaaattgtctgtggtgcatgaaatgctctgtcaatacttgtgcatgaggaaatctaaaaaaactactattgaatctgctagtgatggtgttttgtactacttccttgtgagttacatgtgctctactgactaacattgctgcaatgaaactgaagaagcattagctatagctacaaatctgtcgacctttgcctttttgctctgaacttccctgttttttccatgcttatctacctattttagatcaactgtattctgtacaagctcctagtaaaaagttgtactccctctagtaaaaaaaattacttgactcatttgactttgcacgatcttcgatgatatctttggccactaatttcttctgaaatatatcgcaaatttatgtgcttttgtaattattcttcaactcactttttatacatataactcacatgtttttcaaactaaatttttgtgttttaagctttgactagatattgtcctaaatgacatgctctgatgacggaactggtaacatacataaattggattaaattcgtttctgtgataagaataggtgcaggatcttgcttagtgtcctaatcctgcataaagccaacttttaggtgaagaaaacacccaacaaaaatattccaatggtgctaagtttggacctggtggaaatttaactgctgcaagataatggtctctcttgtatacccatggcctagacctagaagcatggcagacatagatgtgttggtgcatttatgttttcttcctacactacattggtatatttggttgatactaaaagtcttgaagcacgaagcagtcacatatactttactggcttagtttacatttcttctgaaacggttgcttgagaattagtaatctctgttcttttcagatatgtcaaatccttgggttagctggaattgatctgtttaccccttctgatgtggtcgaaaaaagaaatgttcggaaagtctgtatatgcatacgatcggtgtctaaaaagtcactcatcttgcacctaaatgtgcctgattttgatgtagtcacctacacaatatccatgccaaactatgttgttggaggtattcgtagaaatctggagcagacacagtacagctcatccagttcaagtggatacagtccatgtgcccgttctaaagtactacagcaacagaatgaccagcacgaggacacacattatgactctgatgaagcagaaagcaaactctctcttctagaacctgaggactcagttaatgaagataattttgcggctgtgctttcacaatttaacgatgcccacaacaaaggaagtgaaggctatggagaaagtggatgtggcaagcatggagaaaaatctctagctgaatcagtgggatcacttaacattggcattattgattttgagttcatggattcaactcctctaattcatgataaagaatcatgttctctcctagaacctgaggactcagttaatgaagataattttgcagctgttctttcaaaatttaatgatgctcccaacaaagaaagcaaaggctatggagaaagtggacgtggcaagcatggagaaaaatctctagctgaatcagtgggatcacttaacattggcattgttgactctgagttcatggattcaagtcctctaattcatgataaagaatcatgttctcctctagaacctgagggctccgttaatgaagataattttacagctgtgctttcacagtttaacgatgcccccaacaaagaaagtgaaggctatggagaaagtggatgtggtaagcatggagaaaaatctctagttgaatcagtgggatcacttaacattggcattgttgattctgagttcatggattcaagtcctctaattcatgataaagaatcatgttctcctctagaacctgaggactcagttaatgaagataattttgcagctgtgctttcacaatttaatgatgcccccaacaaagaaagcgaaggctatggagaaagtggacgtggcaagcatggagaaaaatctctagctgaatcagtgggatcacttaacattggcattattgattctgagttcatggattcaagtcctctaattcatgataaagaatcatgttttcctctagaacctgagggctccgttaatgaagataattttacagctgtgctttcacaatttaacgatgcccccaacaaagaaagtgaaggctatggagaaagtggatgtggtaagcatggagaaaaatctctagttgaatcagtgggatcacttaacattggcattgttgattctgagttcatggattcaagtcctctaattcatgataaagaatcatgttctcctctagaacctgaggactccgttaatgaagataattttacagctgtgctttcacaatttaacgatgcccccaacaaagaaagtgaagcctatggagaaagtggatgtggtaagcatggagaaaactctctagatgaatcagtgggatcacttaacattggcgttattgattctgagttcatggattcaagtcctctaattcatgataaagaatcatgttctcctctagaacctgaggactccgttaatgaagataattttgcagctgtgctttcacaatatagcgatggccccaacgaaggaaatgaaggatatggagaaagtggacattacaagcatgaagaaaagtctctagatgaatcagtgggatcactaaccattggcattattgattctgagttcatggattcaagtcgtccaattcatgataaagaatcatgttctactggttctgcagctgaccaatgttcaaggactataccggctaaatatgaattaagttcagaagagtcagattccacaggcagtcatttggtgtttgacagtggcaagaattatctggagttgaacaatcattctgtcacagatttggaaaggatttacaatggacatgccacgtctgtagatcaatatgttcggggaaatggggagacattagctgaccatccaaaaaaagaggaagctggcctccaaaaggacactggcaccatagctcaacatcgtgatacccttgcttgtgatggggagtctgtgtgttcgagttgtgaagagccgagacgtggattaaatggcgagccatcagacttcagctcggagtcacactcgagactgaccccaacacataacacaggtggcaaattgtcgatggtttctgaacatccagtgcataatatggagtcagatatgactgggatggcaagtgatagcactaacccggagctgaatcctgaagccagcaccaggaacgaaatggacggctcccgatccactgataacccagtggaaccagaaaacgtagctcaggacagcgccactcgaggaaggcctgaaggcgacgcccccagatcagggaaaggggttctgaggtcggtcgctggaggaatcacccttgtcggcgcagtgttcttcatgttccatctcagtgccgcgctgctgcagaagaagcaaggggggaagctttgcgacggtcataccatctctttcgggaaaatctgctcggagcaacgcaagggccaggaacatgggcagagaaaacgtccctgatgcgtatcccggggggcggctgaaggcttgacaagacgatggagcacagtctgcttcacagaatctggatgaactctgtcgacccaccagtcaagttgaagtcagtaccctgccttctttcatgtacagaacgacataatcatatgatttaggtgatcgattacagcaaatagtgggacagattttgtacaagtatagttgaggcatgaataaagtctagtttccaacctccaacgtttaaacctagacggtggttgaaaaccagaacggcgttgtgtttaagtcatcactaccctttcatcagtgggattatccacagaccacagatataatttatagagac

SEQ ID NO: 10830 - DNA, 3288 bp, Zea Mays
atcagtttcttcatgaggcctccctgcatgaataaaaatagttttggctctttgcaagtgtctacttgcttgagcattatgatgtcaatcaatcagataaaagaatgcctaggataaatggtttcaagtttccaaggtattatggaaaatgttactaaaaaataacagagaacaattgaaacaatcaaaagtgtatatttatgagagactatccttcggtagaagtagtggaaaatacatgccctattcaaaagttgactcctttctaaaggtgcctgattttgatgtagtcacctacacaatatccatgccaaactatgttgttggaggtattcgtagaaatctggagcagacacagtacagctcatccagttcaagtggatacagtccatgtgcccgttctaaagtactacagcaacaggcaggattttggaaagggttaattgtatttccacacttgtgcttaatgttagtcacttaatatatatttttctcagataatatttggagggcagaatgaccagcacgaggacacacattatgactctgatgaagcagaaagcaaactctctcttctagaacctgaggactcagttaatgaagataattttgcggctgtgctttcacaatttaacgatgcccacaacaaaggaagtgaaggctatggagaaagtggatgtggcaagcatggagaaaaatctctagctgaatcagtgggatcacttaacattggcattattgattttgagttcatggattcaactcctctaattcatgataaagaatcatgttctctcctagaacctgaggactcagttaatgaagataattttgcagctgttctttcaaaatttaatgatgctcccaacaaagaaagcaaaggctatggagaaagtggacgtggcaagcatggagaaaaatctctagctgaatcagtgggatcacttaacattggcattgttgactctgagttcatggattcaagtcctctaattcatgataaagaatcatgttctcctctagaacctgagggctccgttaatgaagataattttacagctgtgctttcacagtttaacgatgcccccaacaaagaaagtgaaggctatggagaaagtggatgtggtaagcatggagaaaaatctctagttgaatcagtgggatcacttaacattggcattgttgattctgagttcatggattcaagtcctctaattcatgataaagaatcatgttctcctctagaacctgaggactcagttaatgaagataattttgcagctgtgctttcacaatttaatgatgcccccaacaaagaaagcgaaggctatggagaaagtggacgtggcaagcatggagaaaaatctctagctgaatcagtgggatcacttaacattggcattattgattctgagttcatggattcaagtcctctaattcatgataaagaatcatgttttcctctagaacctgagggctccgttaatgaagataattttacagctgtgctttcacaatttaacgatgcccccaacaaagaaagtgaaggctatggagaaagtggatgtggtaagcatggagaaaaatctctagttgaatcagtgggatcacttaacattggcattgttgattctgagttcatggattcaagtcctctaattcatgataaagaatcatgttctcctctagaacctgaggactccgttaatgaagataattttacagctgtgctttcacaatttaacgatgcccccaacaaagaaagtgaagcctatggagaaagtggatgtggtaagcatggagaaaactctctagatgaatcagtgggatcacttaacattggcgttattgattctgagttcatggattcaagtcctctaattcatgataaagaatcatgttctcctctagaacctgaggactccgttaatgaagataattttgcagctgtgctttcacaatatagcgatggccccaacgaaggaaatgaaggatatggagaaagtggacattacaagcatgaagaaaagtctctagatgaatcagtgggatcactaaccattggcattattgattctgagttcatggattcaagtcgtccaattcatgataaagaatcatgttctactggttctgcagctgaccaatgttcaaggactataccggctaaatatgaattaagttcagaagagtcagattccacaggcagtcatttggtgtttgacagtggcaagaattatctggagttgaacaatcattctgtcacagatttggaaaggatttacaatggacatgccacgtctgtagatcaatatgttcggggaaatggggagacattagctgaccatccaaaaaaagaggaagctggcctccaaaaggacactggcaccatagctcaacatcgtgatacccttgcttgtgatggggagtctgtgtgttcgagttgtgaagagccgagacgtggattaaatggcgagccatcagacttcagctcggagtcacactcgagactgaccccaacacataacacaggtggcaaattgtcgatggtttctgaacatccagtgcataatatggagtcagatatgactgggatggcaagtgatagcactaacccggagctgaatcctgaagccagcaccaggaacgaaatggacggctcccgatccactgataacccagtggaaccagaaaacgtagctcaggacagcgccactcgaggaaggcctgaaggcgacgcccccagatcagggaaaggggttctgaggtcggtcgctggaggaatcacccttgtcggcgcagtgttcttcatgttccatctcagtgccgcgctgctgcagaagaagcaaggggggaagctttgcgacggtcataccatctctttcgggaaaatctgctcggagcaacgcaagggccaggaacatgggcagagaaaacgtccctgatgcgtatcccggggggcggctgaaggcttgacaagacgatggagcacagtctgcttcacagaatctggatgaactctgtcgacccaccagtcaagttgaagtcagtaccctgccttctttcatgtacagaacgacataatcatatgatttaggtgatcgattacagcaaatagtgggacagattttgtacaagtatagttgaggcatgaataaagtctagtttccaacctccaacgtttaaacctagacggtggttgaaaaccagaacggcgttgtgtttaagtcatcactaccctttcatcagtgggattatccacagaccacagatataatttatagagac

SEQ ID NO: 10831 - DNA, 4840 bp, Zea Mays
gtgtgcttgcttggacctccgaccccctcgcggtttggtggagtggcttccgccgtgcctgctgttgagacacaaacaaagatctggcttggagaagttctacatcttaggtttggtgaagacgctttagttgctgatcttcttgctgacggagaattactgtaagatcagtttcttcatgaggcctccctgcatgaataaaaatagttttggctctttgcaagtgtctacttgcttgagcattatgatgtcaatcaatcagataaaagaatgcctaggataaatggtttgtgaaagaatagaactgttttatgattaattgtgtgcttctctctctgatatttactgtattctgctgacttgttatgtttgtgctattaggtttcaagtttccaaggtattatggaaaatgttactaaaaaataacagagaacaattgaaacaatcaaaagtgtatatttatgagagactatccttcggtagaagtagtggaaaatacatgccctattcaaaagttgactcctttctaaaggtatggatctttgcacattttccttctagacgattcggttctattaatatatttttgagcgaaattcttgattttaacttcatgtgttcaatatttttgttaacttgaagtgcattaattttggtaaaagtgaacaaatacaaatctttcaaaacatttttcccatttgaggagcttgaatgaagctttctttccacgaatgcgtacgaagcatattcctagcatgaattccgttgcaagtagccagtctgatgagtttgatccgtgtaaattgtctgtggtgcatgaaatgctctgtcaatacttgtgcatgaggaaatctaaaaaaactactattgaatctgctagtgatggtgttttgtactacttccttgtgagttacatgtgctctactgactaacattgctgcaatgaaactgaagaagcattagctatagctacaaatctgtcgacctttgcctttttgctctgaacttccctgttttttccatgcttatctacctattttagatcaactgtattctgtacaagctcctagtaaaaagttgtactccctctagtaaaaaaaattacttgactcatttgactttgcacgatcttcgatgatatctttggccactaatttcttctgaaatatatcgcaaatttatgtgcttttgtaattattcttcaactcactttttatacatataactcacatgtttttcaaactaaatttttgtgttttaagctttgactagatattgtcctaaatgacatgctctgatgacggaactggtaacatacataaattggattaaattcgtttctgtgataagaataggtgcaggatcttgcttagtgtcctaatcctgcataaagccaacttttaggtgaagaaaacacccaacaaaaatattccaatggtgctaagtttggacctggtggaaatttaactgctgcaagataatggtctctcttgtatacccatggcctagacctagaagcatggcagacatagatgtgttggtgcatttatgttttcttcctacactacattggtatatttggttgatactaaaagtcttgaagcacgaagcagtcacatatactttactggcttagtttacatttcttctgaaacggttgcttgagaattagtaatctctgttcttttcagatatgtcaaatccttgggttagctggaattgatctgtttaccccttctgatgtggtcgaaaaaagaaatgttcggaaagtctgtatatgcatacgatcggtgtctaaaaagtcactcatcttgcacctaaatgtgcctgattttgatgtagtcacctacacaatatccatgccaaactatgttgttggaggtattcgtagaaatctggagcagacacagtacagctcatccagttcaagtggatacagtccatgtgcccgttctaaagtactacagcaacaggcaggattttggaaagggttaattgtatttccacacttgtgcttaatgttagtcacttaatatatatttttctcagataatatttggagggcagaatgaccagcacgaggacacacattatgactctgatgaagcagaaagcaaactctctcttctagaacctgaggactcagttaatgaagataattttgcggctgtgctttcacaatttaacgatgcccacaacaaaggaagtgaaggctatggagaaagtggatgtggcaagcatggagaaaaatctctagctgaatcagtgggatcacttaacattggcattattgattttgagttcatggattcaactcctctaattcatgataaagaatcatgttctctcctagaacctgaggactcagttaatgaagataattttgcagctgttctttcaaaatttaatgatgctcccaacaaagaaagcaaaggctatggagaaagtggacgtggcaagcatggagaaaaatctctagctgaatcagtgggatcacttaacattggcattgttgactctgagttcatggattcaagtcctctaattcatgataaagaatcatgttctcctctagaacctgagggctccgttaatgaagataattttacagctgtgctttcacagtttaacgatgcccccaacaaagaaagtgaaggctatggagaaagtggatgtggtaagcatggagaaaaatctctagttgaatcagtgggatcacttaacattggcattgttgattctgagttcatggattcaagtcctctaattcatgataaagaatcatgttctcctctagaacctgaggactcagttaatgaagataattttgcagctgtgctttcacaatttaatgatgcccccaacaaagaaagcgaaggctatggagaaagtggacgtggcaagcatggagaaaaatctctagctgaatcagtgggatcacttaacattggcattattgattctgagttcatggattcaagtcctctaattcatgataaagaatcatgttttcctctagaacctgagggctccgttaatgaagataattttacagctgtgctttcacaatttaacgatgcccccaacaaagaaagtgaaggctatggagaaagtggatgtggtaagcatggagaaaaatctctagttgaatcagtgggatcacttaacattggcattgttgattctgagttcatggattcaagtcctctaattcatgataaagaatcatgttctcctctagaacctgaggactccgttaatgaagataattttacagctgtgctttcacaatttaacgatgcccccaacaaagaaagtgaagcctatggagaaagtggatgtggtaagcatggagaaaactctctagatgaatcagtgggatcacttaacattggcgttattgattctgagttcatggattcaagtcctctaattcatgataaagaatcatgttctcctctagaacctgaggactccgttaatgaagataattttgcagctgtgctttcacaatatagcgatggccccaacgaaggaaatgaaggatatggagaaagtggacattacaagcatgaagaaaagtctctagatgaatcagtgggatcactaaccattggcattattgattctgagttcatggattcaagtcgtccaattcatgataaagaatcatgttctactggttctgcagctgaccaatgttcaaggactataccggctaaatatgaattaagttcagaagagtcagattccacaggcagtcatttggtgtttgacagtggcaagaattatctggagttgaacaatcattctgtcacagatttggaaaggatttacaatggacatgccacgtctgtagatcaatatgttcggggaaatggggagacattagctgaccatccaaaaaaagaggaagctggcctccaaaaggacactggcaccatagctcaacatcgtgatacccttgcttgtgatggggagtctgtgtgttcgagttgtgaagagccgagacgtggattaaatggcgagccatcagacttcagctcggagtcacactcgagactgaccccaacacataacacaggtggcaaattgtcgatggtttctgaacatccagtgcataatatggagtcagatatgactgggatggcaagtgatagcactaacccggagctgaatcctgaagccagcaccaggaacgaaatggacggctcccgatccactgataacccagtggaaccagaaaacgtagctcaggacagcgccactcgaggaaggcctgaaggcgacgcccccagatcagggaaaggggttctgaggtcggtcgctggaggaatcacccttgtcggcgcagtgttcttcatgttccatctcagtgccgcgctgctgcagaagaagcaaggggggaagctttgcgacggtcataccatctctttcgggaaaatctgctcggagcaacgcaagggccaggaacatgggcagagaaaacgtccctgatgcgtatcccggggggcggctgaaggcttgacaagacgatggagcacagtctgcttcacagaatctggatgaactctgtcgacccaccagtcaagttgaagtcagtaccctgccttctttcatgtacagaacgacataatcatatgatttaggtgatcgattacagcaaatagtgggacagattttgtacaagtatagttgaggcatgaataaagtctagtttccaacctccaacgtttaaacctagacggtggttgaaaaccagaacggcgttgtgtttaagtcatcactaccctttcatcagtgggattatccacagaccacagatataatttatagagac

SEQ ID NO: 10832 - DNA, 3273 bp, Zea Mays
caggtgcagcagcggcagcgccgcgctcattccggcgcagcacgcgacacgcggcttctgcctcgcctccacggctgcagcccgcgccgcccaccccaggcgcgcgcgcacgcaaacggcaacgcgtgctcacgcatcctcctcctcccgccgctgaagtggagtagccgagtagcaaactacggcacacggccatgagcttgcacgccgcgcgcggcgggccgcacgaggatctgagctggagcgccatcgggcggcgggcaccccgtgacgtggtgacattcggtgatcgagaaggaggcggcgggatgaggagtgcgcagcaggggccgggggcggtgcgggtggacgaggcgtcgtccgcgtccaccttccgtgagctcgacgaggccttcctgcagacacaaacaaagatctggcttggagaagttctacatcttaggtttggtgaagacgctttagttgctgatcttcttgctgacggagaattactgtttcaagtttccaaggtattatggaaaatgttactaaaaaataacagagaacaattgaaacaatcaaaagtgtatatttatgagagactatccttcggtagaagtagtggaaaatacatgccctattcaaaagttgactcctttctaaagatatgtcaaatccttgggttagctggaattgatctgtttaccccttctgatgtggtcgaaaaaagaaatgttcggaaagtctgtatatgcatacgatcggtgtctaaaaagtcactcatcttgcacctaaatgtgcctgattttgatgtagtcacctacacaatatccatgccaaactatgttgttggaggtattcgtagaaatctggagcagacacagtacagctcatccagttcaagtggatacagtccatgtgcccgttctaaagtactacagcaacagataatatttggagggcagaatgaccagcacgaggacacacattatgactctgatgaagcagaaagcaaactctctcttctagaacctgaggactcagttaatgaagataattttgcggctgtgctttcacaatttaacgatgcccacaacaaaggaagtgaaggctatggagaaagtggatgtggcaagcatggagaaaaatctctagctgaatcagtgggatcacttaacattggcattattgattttgagttcatggattcaactcctctaattcatgataaagaatcatgttctctcctagaacctgaggactcagttaatgaagataattttgcagctgttctttcaaaatttaatgatgctcccaacaaagaaagcaaaggctatggagaaagtggacgtggcaagcatggagaaaaatctctagctgaatcagtgggatcacttaacattggcattattgattctgagttcatggattcaagtcctctaattcatgataaagaatcatgttttcctctagaacctgagggctccgttaatgaagataattttacagctgtgctttcacaatttaacgatgcccccaacaaagaaagtgaaggctatggagaaagtggatgtggtaagcatggagaaaaatctctagttgaatcagtgggatcacttaacattggcattgttgattctgagttcatggattcaagtcctctaattcatgataaagaatcatgttctcctctagaacctgaggactccgttaatgaagataattttacagctgtgctttcacaatttaacgatgcccccaacaaagaaagtgaagcctatggagaaagtggatgtggtaagcatggagaaaactctctagatgaatcagtgggatcacttaacattggcgttattgattctgagttcatggattcaagtcctctaattcatgataaagaatcatgttctcctctagaacctgaggactccgttaatgaagataattttgcagctgtgctttcacaatatagcgatggccccaacgaaggaaatgaaggatatggagaaagtggacattacaagcatgaagaaaagtctctagatgaatcagtgggatcactaaccattggcattattgattctgagttcatggattcaagtcgtccaattcatgataaagaatcatgttctactggttctgcagctgaccaatgttcaaggactataccggctaaatatgaattaagttcagaagagtcagattccacaggcagtcatttggtgtttgacagtggcaagaattatctggagttgaacaatcattctgtcacagatttggaaaggatttacaatggacatgccacgtctgtagatcaatatgttcggggaaatggggagacattagctgaccatccaaaaaaagaggaagctggcctccaaaaggacactggcaccatagctcaacatcgtgatacccttgcttgtgatggggagtctgtgtgttcgagttgtgaagagccgagacgtggattaaatggcgagccatcagacttcagctcggagtcacactcgagactgaccccaacacataacacaggtggcaaattgtcgatggtttctgaacatccagtgcataatatggagtcagatatgactgggatggcaagtgatagcactaacccggagctgaatcctgaagccagcaccaggaacgaaatggacggctcccgatccactgataacccagtggaaccagaaaacgtagctcaggacagcgccactcgaggaaggcctgaaggcgacgcccccagatcagggaaaggggttctgaggtcggtcgctggaggaatcacccttgtcggcgcagtgttcttcatgttccatctcagtgccgcgctgctgcagaagaagcaaggggggaagctttgcgacggtcataccatctctttcgggaaaatctgctcggagcaacgcaagggccaggaacatgggcagagaaaacgtccctgatgcgtatcccggggggcggctgaaggcttgacaagacgatggagcacagtctgcttcacagaatctggatgaactctgtcgacccaccagtcaagttgaagtcagtaccctgccttctttcatgtacagaacgacataatcatatgatttaggtgatcgattacagcaaatagtgggacagattttgtacaagtatagttgaggcatgaataaagtctagtttccaacctccaacgtttaaacctagacggtggttgaaaaccagaacggcgttgtgtttaagtcatcactaccctttcatcagtgggattatccacagaccacagatataatttatagagac

SEQ ID NO: 10833 - DNA, 3125 bp, Zea Mays
caggtgcagcagcggcagcgccgcgctcattccggcgcagcacgcgacacgcggcttctgcctcgcctccacggctgcagcccgcgccgcccaccccaggcgcgcgcgcacgcaaacggcaacgcgtgctcacgcatcctcctcctcccgccgctgaagtggagtagccgagtagcaaactacggcacacggccatgagcttgcacgccgcgcgcggcgggccgcacgaggatctgagctggagcgccatcgggcggcgggcaccccgtgacgtggtgacattcggtgatcgagaaggaggcggcgggatgaggagtgcgcagcaggggccgggggcggtgcgggtggacgaggcgtcgtccgcgtccaccttccgtgagctcgacgaggccttcctgcagacacaaacaaagatctggcttggagaagttctacatcttaggtttggtgaagacgctttagttgctgatcttcttgctgacggagaattactgtttcaagtttccaaggtattatggaaaatgttactaaaaaataacagagaacaattgaaacaatcaaaagtgtatatttatgagagactatccttcggtagaagtagtggaaaatacatgccctattcaaaagttgactcctttctaaaggtgcctgattttgatgtagtcacctacacaatatccatgccaaactatgttgttggaggtattcgtagaaatctggagcagacacagtacagctcatccagttcaagtggatacagtccatgtgcccgttctaaagtactacagcaacagataatatttggagggcagaatgaccagcacgaggacacacattatgactctgatgaagcagaaagcaaactctctcttctagaacctgaggactcagttaatgaagataattttgcggctgtgctttcacaatttaacgatgcccacaacaaaggaagtgaaggctatggagaaagtggatgtggcaagcatggagaaaaatctctagctgaatcagtgggatcacttaacattggcattattgattttgagttcatggattcaactcctctaattcatgataaagaatcatgttctctcctagaacctgaggactcagttaatgaagataattttgcagctgttctttcaaaatttaatgatgctcccaacaaagaaagcaaaggctatggagaaagtggacgtggcaagcatggagaaaaatctctagctgaatcagtgggatcacttaacattggcattgttgactctgagttcatggattcaagtcctctaattcatgataaagaatcatgttttcctctagaacctgagggctccgttaatgaagataattttacagctgtgctttcacaatttaacgatgcccccaacaaagaaagtgaaggctatggagaaagtggatgtggtaagcatggagaaaaatctctagttgaatcagtgggatcacttaacattggcattgttgattctgagttcatggattcaagtcctctaattcatgataaagaatcatgttctcctctagaacctgaggactccgttaatgaagataattttacagctgtgctttcacaatttaacgatgcccccaacaaagaaagtgaagcctatggagaaagtggatgtggtaagcatggagaaaactctctagatgaatcagtgggatcacttaacattggcgttattgattctgagttcatggattcaagtcctctaattcatgataaagaatcatgttctcctctagaacctgaggactccgttaatgaagataattttgcagctgtgctttcacaatatagcgatggccccaacgaaggaaatgaaggatatggagaaagtggacattacaagcatgaagaaaagtctctagatgaatcagtgggatcactaaccattggcattattgattctgagttcatggattcaagtcgtccaattcatgataaagaatcatgttctactggttctgcagctgaccaatgttcaaggactataccggctaaatatgaattaagttcagaagagtcagattccacaggcagtcatttggtgtttgacagtggcaagaattatctggagttgaacaatcattctgtcacagatttggaaaggatttacaatggacatgccacgtctgtagatcaatatgttcggggaaatggggagacattagctgaccatccaaaaaaagaggaagctggcctccaaaaggacactggcaccatagctcaacatcgtgatacccttgcttgtgatggggagtctgtgtgttcgagttgtgaagagccgagacgtggattaaatggcgagccatcagacttcagctcggagtcacactcgagactgaccccaacacataacacaggtggcaaattgtcgatggtttctgaacatccagtgcataatatggagtcagatatgactgggatggcaagtgatagcactaacccggagctgaatcctgaagccagcaccaggaacgaaatggacggctcccgatccactgataacccagtggaaccagaaaacgtagctcaggacagcgccactcgaggaaggcctgaaggcgacgcccccagatcagggaaaggggttctgaggtcggtcgctggaggaatcacccttgtcggcgcagtgttcttcatgttccatctcagaagaagcaaggggggaagctttgcgacggtcataccatctctttcgggaaaatctgctcggagcaacgcaagggccaggaacatgggcagagaaaacgtccctgatgcgtatcccggggggcggctgaaggcttgacaagacgatggagcacagtctgcttcacagaatctggatgaactctgtcgacccaccagtcaagttgaagtcagtaccctgccttctttcatgtacagaacgacataatcatatgatttaggtgatcgattacagcaaatagtgggacagattttgtacaagtatagttgaggcatgaataaagtctagtttccaacctccaacgtttaaacctagacggtggttgaaaaccagaacggcgttgtgtttaagtcatcactaccctttcatcagtgggattatccacagaccacagatataatttatagagac

SEQ ID NO: 10834 - DNA, 3776 bp, Zea Mays
gaaaaatccaatcatgtcctcgtcgttcgccgcgagaaaaacgcgccagtaaatgcgcgcaggtgcagcagcggcagcgccgcgctcattccggcgcagcacgcgacacgcggcttctgcctcgcctccacggctgcagcccgcgccgcccaccccaggcgcgcgcgcacgcaaacggcaacgcgtgctcacgcatcctcctcctcccgccgctgaagtggagtagccgagtagcaaactacggcacacggccatgagcttgcacgccgcgcgcggcgggccgcacgaggatctgagctggagcgccatcgggcggcgggcaccccgtgacgtggtgacattcggtgatcgagaaggaggcggcgggatgaggagtgcgcagcaggggccgggggcggtgcgggtggacgaggcgtcgtccgcgtccaccttccgtgagctcgacgaggccttcctgcagacacaaacaaagatctggcttggagaagttctacatcttaggtttggtgaagacgctttagttgctgatcttcttgctgacggagaattactgtttcaagtttccaaggtattatggaaaatgttactaaaaaataacagagaacaattgaaacaatcaaaagtgtatatttatgagagactatccttcggtagaagtagtggaaaatacatgccctattcaaaagttgactcctttctaaagatatgtcaaatccttgggttagctggaattgatctgtttaccccttctgatgtggtcgaaaaaagaaatgttcggaaagtctgtatatgcatacgatcggtgtctaaaaagtcactcatcttgcacctaaatgtgcctgattttgatgtagtcacctacacaatatccatgccaaactatgttgttggaggtattcgtagaaatctggagcagacacagtacagctcatccagttcaagtggatacagtccatgtgcccgttctaaagtactacagcaacagataatatttggagggcagaatgaccagcacgaggacacacattatgactctgatgaagcagaaagcaaactctctcttctagaacctgaggactcagttaatgaagataattttgcggctgtgctttcacaatttaacgatgcccacaacaaaggaagtgaaggctatggagaaagtggatgtggcaagcatggagaaaaatctctagctgaatcagtgggatcacttaacattggcattattgattttgagttcatggattcaactcctctaattcatgataaagaatcatgttctctcctagaacctgaggactcagttaatgaagataattttgcagctgttctttcaaaatttaatgatgctcccaacaaagaaagcaaaggctatggagaaagtggacgtggcaagcatggagaaaaatctctagctgaatcagtgggatcacttaacattggcattgttgactctgagttcatggattcaagtcctctaattcatgataaagaatcatgttctcctctagaacctgagggctccgttaatgaagataattttacagctgtgctttcacagtttaacgatgcccccaacaaagaaagtgaaggctatggagaaagtggatgtggtaagcatggagaaaaatctctagttgaatcagtgggatcacttaacattggcattgttgattctgagttcatggattcaagtcctctaattcatgataaagaatcatgttctcctctagaacctgaggactcagttaatgaagataattttgcagctgtgctttcacaatttaatgatgcccccaacaaagaaagcgaaggctatggagaaagtggacgtggcaagcatggagaaaaatctctagctgaatcagtgggatcacttaacattggcattattgattctgagttcatggattcaagtcctctaattcatgataaagaatcatgttttcctctagaacctgagggctccgttaatgaagataattttacagctgtgctttcacaatttaacgatgcccccaacaaagaaagtgaaggctatggagaaagtggatgtggtaagcatggagaaaaatctctagttgaatcagtgggatcacttaacattggcattgttgattctgagttcatggattcaagtcctctaattcatgataaagaatcatgttctcctctagaacctgaggactccgttaatgaagataattttacagctgtgctttcacaatttaacgatgcccccaacaaagaaagtgaagcctatggagaaagtggatgtggtaagcatggagaaaactctctagatgaatcagtgggatcacttaacattggcgttattgattctgagttcatggattcaagtcctctaattcatgataaagaatcatgttctcctctagaacctgaggactccgttaatgaagataattttgcagctgtgctttcacaatatagcgatggccccaacgaaggaaatgaaggatatggagaaagtggacattacaagcatgaagaaaagtctctagatgaatcagtgggatcactaaccattggcattattgattctgagttcatggattcaagtcgtccaattcatgataaagaatcatgttctactggttctgcagctgaccaatgttcaaggactataccggctaaatatgaattaagttcagaagagtcagattccacaggcagtcatttggtgtttgacagtggcaagaattatctggagttgaacaatcattctgtcacagatttggaaaggatttacaatggacatgccacgtctgtagatcaatatgttcggggaaatggggagacattagctgaccatccaaaaaaagaggaagctggcctccaaaaggacactggcaccatagctcaacatcgtgatacccttgcttgtgatggggagtctgtgtgttcgagttgtgaagagccgagacgtggattaaatggcgagccatcagacttcagctcggagtcacactcgagactgaccccaacacataacacaggtggcaaattgtcgatggtttctgaacatccagtgcataatatggagtcagatatgactgggatggcaagtgatagcactaacccggagctgaatcctgaagccagcaccaggaacgaaatggacggctcccgatccactgataacccagtggaaccagaaaacgtagctcaggacagcgccactcgaggaaggcctgaaggcgacgcccccagatcagggaaaggggttctgaggtcggtcgctggaggaatcacccttgtcggcgcagtgttcttcatgttccatctcagtgccgcgctgctgcagaagaagcaaggggggaagctttgcgacggtcataccatctctttcgggaaaatctgctcggagcaacgcaagggccaggaacatgggcagagaaaacgtccctgatgcgtatcccggggggcggctgaaggcttgacaagacgatggagcacagtctgcttcacagaatctggatgaactctgtcgacccaccagtcaagttgaagtcagtaccctgccttctttcatgtacagaacgacataatcatatgatttaggtgatcgattacagcaaatagtgggacagattttgtacaagtatagttgaggcatgaataaagtctagtttccaacctccaacgtttaaacctagacggtggttgaaaaccagaacggcgttgtgtttaagtcatcactaccctttcatcagtgggattatccacagaccacagatataatttatagagac

SEQ ID NO: 10835 - DNA, 3836 bp, Zea Mays
gaaaaatccaatcatgtcctcgtcgttcgccgcgagaaaaacgcgccagtaaatgcgcgcaggtgcagcagcggcagcgccgcgctcattccggcgcagcacgcgacacgcggcttctgcctcgcctccacggctgcagcccgcgccgcccaccccaggcgcgcgcgcacgcaaacggcaacgcgtgctcacgcatcctcctcctcccgccgctgaagtggagtagccgagtagcaaactacggcacacggccatgagcttgcacgccgcgcgcggcgggccgcacgaggatctgagctggagcgccatcgggcggcgggcaccccgtgacgtggtgacattcggtgatcgagaaggaggcggcgggatgaggagtgcgcagcaggggccgggggcggtgcgggtggacgaggcgtcgtccgcgtccaccttccgtgagctcgacgaggccttcctgcagacacaaacaaagatctggcttggagaagttctacatcttaggtttggtgaagacgctttagttgctgatcttcttgctgacggagaattactgtttcaagtttccaaggtattatggaaaatgttactaaaaaataacagagaacaattgaaacaatcaaaagtgtatatttatgagagactatccttcggtagaagtagtggaaaatacatgccctattcaaaagttgactcctttctaaagatatgtcaaatccttgggttagctggaattgatctgtttaccccttctgatgtggtcgaaaaaagaaatgttcggaaagtctgtatatgcatacgatcggtgtctaaaaagtcactcatcttgcacctaaatgtgcctgattttgatgtagtcacctacacaatatccatgccaaactatgttgttggaggtattcgtagaaatctggagcagacacagtacagctcatccagttcaagtggatacagtccatgtgcccgttctaaagtactacagcaacaggcaggattttggaaagggttaattgtatttccacacttgtgcttaatgttagtcacttaatatatatttttctcagataatatttggagggcagaatgaccagcacgaggacacacattatgactctgatgaagcagaaagcaaactctctcttctagaacctgaggactcagttaatgaagataattttgcggctgtgctttcacaatttaacgatgcccacaacaaaggaagtgaaggctatggagaaagtggatgtggcaagcatggagaaaaatctctagctgaatcagtgggatcacttaacattggcattattgattttgagttcatggattcaactcctctaattcatgataaagaatcatgttctctcctagaacctgaggactcagttaatgaagataattttgcagctgttctttcaaaatttaatgatgctcccaacaaagaaagcaaaggctatggagaaagtggacgtggcaagcatggagaaaaatctctagctgaatcagtgggatcacttaacattggcattgttgactctgagttcatggattcaagtcctctaattcatgataaagaatcatgttctcctctagaacctgagggctccgttaatgaagataattttacagctgtgctttcacagtttaacgatgcccccaacaaagaaagtgaaggctatggagaaagtggatgtggtaagcatggagaaaaatctctagttgaatcagtgggatcacttaacattggcattgttgattctgagttcatggattcaagtcctctaattcatgataaagaatcatgttctcctctagaacctgaggactcagttaatgaagataattttgcagctgtgctttcacaatttaatgatgcccccaacaaagaaagcgaaggctatggagaaagtggacgtggcaagcatggagaaaaatctctagctgaatcagtgggatcacttaacattggcattattgattctgagttcatggattcaagtcctctaattcatgataaagaatcatgttttcctctagaacctgagggctccgttaatgaagataattttacagctgtgctttcacaatttaacgatgcccccaacaaagaaagtgaaggctatggagaaagtggatgtggtaagcatggagaaaaatctctagttgaatcagtgggatcacttaacattggcattgttgattctgagttcatggattcaagtcctctaattcatgataaagaatcatgttctcctctagaacctgaggactccgttaatgaagataattttacagctgtgctttcacaatttaacgatgcccccaacaaagaaagtgaagcctatggagaaagtggatgtggtaagcatggagaaaactctctagatgaatcagtgggatcacttaacattggcgttattgattctgagttcatggattcaagtcctctaattcatgataaagaatcatgttctcctctagaacctgaggactccgttaatgaagataattttgcagctgtgctttcacaatatagcgatggccccaacgaaggaaatgaaggatatggagaaagtggacattacaagcatgaagaaaagtctctagatgaatcagtgggatcactaaccattggcattattgattctgagttcatggattcaagtcgtccaattcatgataaagaatcatgttctactggttctgcagctgaccaatgttcaaggactataccggctaaatatgaattaagttcagaagagtcagattccacaggcagtcatttggtgtttgacagtggcaagaattatctggagttgaacaatcattctgtcacagatttggaaaggatttacaatggacatgccacgtctgtagatcaatatgttcggggaaatggggagacattagctgaccatccaaaaaaagaggaagctggcctccaaaaggacactggcaccatagctcaacatcgtgatacccttgcttgtgatggggagtctgtgtgttcgagttgtgaagagccgagacgtggattaaatggcgagccatcagacttcagctcggagtcacactcgagactgaccccaacacataacacaggtggcaaattgtcgatggtttctgaacatccagtgcataatatggagtcagatatgactgggatggcaagtgatagcactaacccggagctgaatcctgaagccagcaccaggaacgaaatggacggctcccgatccactgataacccagtggaaccagaaaacgtagctcaggacagcgccactcgaggaaggcctgaaggcgacgcccccagatcagggaaaggggttctgaggtcggtcgctggaggaatcacccttgtcggcgcagtgttcttcatgttccatctcagaagaagcaaggggggaagctttgcgacggtcataccatctctttcgggaaaatctgctcggagcaacgcaagggccaggaacatgggcagagaaaacgtccctgatgcgtatcccggggggcggctgaaggcttgacaagacgatggagcacagtctgcttcacagaatctggatgaactctgtcgacccaccagtcaagttgaagtcagtaccctgccttctttcatgtacagaacgacataatcatatgatttaggtgatcgattacagcaaatagtgggacagattttgtacaagtatagttgaggcatgaataaagtctagtttccaacctccaacgtttaaacctagacggtggttgaaaaccagaacggcgttgtgtttaagtcatcactaccctttcatcagtgggattatccacagaccacagatataatttatagagac

SEQ ID NO: 10836 - DNA, 4286 bp, Zea Mays
ccctcggtctcggcacccgcaaacgggaaaaatccaatcatgtcctcgtcgttcgccgcgagaaaaacgcgccagtaaatgcgcgcaggtgcagcagcggcagcgccgcgctcattccggcgcagcacgcgacacgcggcttctgcctcgcctccacggctgcagcccgcgccgcccaccccaggcgcgcgcgcacgcaaacggcaacgcgtgctcacgcatcctcctcctcccgccgctgaagtggagtagccgagtagcaaactacggcacacggccatgagcttgcacgccgcgcgcggcgggccgcacgaggatctgagctggagcgccatcgggcggcgggcaccccgtgacgtggtgacattcggtgatcgagaaggaggcggcgggatgaggagtgcgcagcaggggccgggggcggtgcgggtggacgaggcgtcgtccgcgtccaccttccgtgagctcgacgaggccttcctgcagacacaaacaaagatctggcttggagaagttctacatcttaggtttggtgaagacgctttagttgctgatcttcttgctgacggagaattactgtttcaagtttccaaggtattatggaaaatgttactaaaaaataacagagaacaattgaaacaatcaaaagtgtatatttatgagagactatccttcggtagaagtagtggaaaatacatgccctattcaaaagttgactcctttctaaaggtatggatctttgcacattttccttctagacgattcggttctattaatatatttttgagcgaaattcttgattttaacttcatgtgttcaatatttttgttaacttgaagtgcattaattttggtaaaagtgaacaaatacaaatctttcaaaacatttttcccatttgaggagcttgaatgaagctttctttccacgaatgcgtacgaagcatattcctagcatgaattccgttgcaagtagccagtctgatgagtttgatccgtgtaaattgtctgtggtgcatgaaatgctctgtcaatacttgtgcatgaggaaatctaaaaaaactactattgaatctgctagtgatggtgttttgtactacttccttgtgagttacatgtgctctactgactaacattgctgcaatgaaactgaagaagcattagctatagctacaaatctgtcgacctttgcctttttgctctgaacttccctgttttttccatgcttatctacctattttagatcaactgtattctgtacaagctcctagtaaaaagttgtactccctctagtaaaaaaaattacttgactcatttgactttgcacgatcttcgatgatatctttggccactaatttcttctgaaatatatcgcaaatttatgtgcttttgtaattattcttcaactcactttttatacatataactcacatgtttttcaaactaaatttttgtgttttaagctttgactagatattgtcctaaatgacatgctctgatgacggaactggtaacatacataaattggattaaattcgtttctgtgataagaataggtgcaggatcttgcttagtgtcctaatcctgcataaagccaacttttaggtgaagaaaacacccaacaaaaatattccaatggtgctaagtttggacctggtggaaatttaactgctgcaagataatggtctctcttgtatacccatggcctagacctagaagcatggcagacatagatgtgttggtgcatttatgttttcttcctacactacattggtatatttggttgatactaaaagtcttgaagcacgaagcagtcacatatactttactggcttagtttacatttcttctgaaacggttgcttgagaattagtaatctctgttcttttcagatatgtcaaatccttgggttagctggaattgatctgtttaccccttctgatgtggtcgaaaaaagaaatgttcggaaagtctgtatatgcatacgatcggtgtctaaaaagtcactcatcttgcacctaaatgtgcctgattttgatgtagtcacctacacaatatccatgccaaactatgttgttggaggtattcgtagaaatctggagcagacacagtacagctcatccagttcaagtggatacagtccatgtgcccgttctaaaataatatttggagggcagaatgaccagcacgaggacacacattatgactctgatgaagcagaaagcaaactctctcttctagaacctgaggactcagttaatgaagataattttgcggctgtgctttcacaatttaacgatgcccatgcccccaacaaagaaagcgaaggctatggagaaagtggacgtggcaagcatggagaaaaatctctagctgaatcagtgggatcacttaacattggcattattgattctgagttcatggattcaagtcctctaattcatgataaagaatcatgttttcctctagaacctgagggctccgttaatgaagataattttacagctgtgctttcacaatttaacgatgcccccaacaaagaaagtgaaggctatggagaaagtggatgtggtaagcatggagaaaaatctctagttgaatcagtgggatcacttaacattggcattgttgattctgagttcatggattcaagtcctctaattcatgataaagaatcatgttctcctctagaacctgaggactccgttaatgaagataattttacagctgtgctttcacaatttaacgatgcccccaacaaagaaagtgaagcctatggagaaagtggatgtggtaagcatggagaaaactctctagatgaatcagtgggatcacttaacattggcgttattgattctgagttcatggattcaagtcctctaattcatgataaagaatcatgttctcctctagaacctgaggactccgttaatgaagataattttgcagctgtgctttcacaatatagcgatggccccaacgaaggaaatgaaggatatggagaaagtggacattacaagcatgaagaaaagtctctagatgaatcagtgggatcactaaccattggcattattgattctgagttcatggattcaagtcgtccaattcatgataaagaatcatgttctactggttctgcagctgaccaatgttcaaggactataccggctaaatatgaattaagttcagaagagtcagattccacaggcagtcatttggtgtttgacagtggcaagaattatctggagttgaacaatcattctgtcacagatttggaaaggatttacaatggacatgccacgtctgtagatcaatatgttcggggaaatggggagacattagctgaccatccaaaaaaagaggaagctggcctccaaaaggacactggcaccatagctcaacatcgtgatacccttgcttgtgatggggagtctgtgtgttcgagttgtgaagagccgagacgtggattaaatggcgagccatcagacttcagctcggagtcacactcgagactgaccccaacacataacacaggtggcaaattgtcgatggtttctgaacatccagtgcataatatggagtcagatatgactgggatggcaagtgatagcactaacccggagctgaatcctgaagccagcaccaggaacgaaatggacggctcccgatccactgataacccagtggaaccagaaaacgtagctcaggacagcgccactcgaggaaggcctgaaggcgacgcccccagatcagggaaaggggttctgaggtcggtcgctggaggaatcacccttgtcggcgcagtgttcttcatgttccatctcagtgccgcgctgctgcagaagaagcaaggggggaagctttgcgacggtcataccatctctttcgggaaaatctgctcggagcaacgcaagggccaggaacatgggcagagaaaacgtccctgatgcgtatcccggggggcggctgaaggcttgacaagacgatggagcacagtctgcttcacagaatctggatgaactctgtcgacccaccagtcaagttgaagtcagtaccctgccttctttcatgtacagaacgacataatcatatgatttaggtgatcgattacagcaaatagtgggacagattttgtacaagtatagttgaggcatgaataaagtctagtttccaacctccaacgtttaaacctagacggtggttgaaaaccagaacggcgttgtgtttaagtcatcactaccctttcatcagtgggattatccacagaccacagatataatttatagagac

SEQ ID NO: 10837 - DNA, 2271 bp, Zea Mays
acacgccatacccttctcgcaagcagtcaagctcctcccccaatccttccccgatgctgcggcgcaacagcgtgtgcgaaaccgagtccgaatcccgacgcgctccggctcccatggagcttagattttaggtgtgagctgctccccctgtatggacccgtccacacccgccgacgaaacctcgccgattgcgcgggcggtctcggcgcccggtgctcagccgactcgctccttccctgcccccattcccgaggagtcactccactcttcgcctgcttccaccgccaccgagtcggcggaggagcctaccgttgcggcgcccgaggagtcacccaacgctgcccctgcctctgctgtcgtggctcccgtcgggggtttgcccctgccttcgccaaggaggggaggcggggaggtagggatacggggtgcacggccgcctttactctccccgcctccgccaattggtgcactagctcctccgccagttaggaggtccttcgttgacaatgacatgactgggtccgcttgggacattgtgcagtcgtttgctcccagggatcagggaagtgaactgggactgggaggaagtgtcgacagtcgttgcaattcggacaaagaggaagagaatgatgttgaggatggggacgcagcggtggagggcgagctgaaggaattgaggataggagagactttcgaggggttcactggaacttcttcattgtcgacgacgaatgatgatgacgcgtccagtacaaccacggaggccatgttcatcatttcaccgaatggcaagttcaagcggaacattaaatcatggatgcgtggtgctcttctgggaagcggctcatttgggatggtgtacgaggggatcagtgatgagggtgcattttttgctgtgaaggaagtatctttgcttgaccaaggaagcaacgcacaacaatctattgttgcacttgagcaggaaattgcactcctcagtcagtttgaacatgaaaatatagtccagtattatggaactgacaaggaagaatccaaactctatatttttattgagcttgtcacacaagggtctctttcatccctctatcaaaagtataaactacgagaatcacaagtctctgcatacacaaggcagattcttaatggattggtttatctccatgagagaaatgtggtccacagagatatcaaatgcgccaatatattggtccatgcaaatggatctgtaaagcttgcagattttggattggcaaaggagatgtcaaaaattaatatgctaaggtcatgcaaaggaagtgtttactggatggcacctgaggtaactaagtggcgttcttgcaaaagacaagaaaccattggaaactctgccatagccccctgaacattcttattactttttgtgtgattagcattctttgtattgaaaactatctattttgatatcatttttcacaagataatacttgtgtatctcttgtgtgcaacatactcagtactcaccttcgcattttcaggttattaatcctaaaaagatgtatgggccttcagctgatatatggagccttggctgcaccgtgttggaaatgctaacccggcaaataccatttcctaatgtcgaacaaatgctttcttcatgattggaagaggggaacagcctactattcccaactacctgtctaaggaggcacaagattttattggccagtgcgtaagagttgatcctgagagccggccttctgcgtcacaacttctggagcacccatttgttaacagaccactgcgagcttcatttgaatcttcgtctccaccagccatctgattctagtattgatataatggggtgtttctcgttgaggccaatgctcaggtcacgtactcacgtgttgatcttcatgatctacactactggttccagaatggaattacgtgggcttgtttaggatgtagtttagtagctgtagtccgtagggttggtgggcagcattgctctgtggttttgtattctttggggtgttcttcattgggcaaagggttttcttcctggttattacgtagatttgtgtaaacttgtaggtaaaagggctgcaattgcctctgggctctggtgtaggtttagccgatgtttgtgaatgtttgacatcgccattctttacgtaaatggttttgttgctcaaaaaagcatccggagcattgaatccccctggtgttacttttttcttcgtcgcatcggaaactgtttttttccttctaatttatcatccacgggattat

SEQ ID NO: 10838 - DNA, 2496 bp, Zea Mays
acacgccatacccttctcgcaagcagtcaagctcctcccccaatccttccccgatgctgcggcgcaacagcgtgtgcgaaaccgagtccgaatcccgacgcgctccggctcccatggagcttagattttaggtgtgagctgctccccctgtatggatccagatgttctcgtggagccgtaagcagtcctcctccggctcgtcctccggccgccgccgcggcggggcggacgcctccatggactccagcagccgcggcggcggcgggagcgggagccgcggacggagcccgcggttggatcgccgcaacgcagtgaagcgcatcgagtacgaggcgagcgcgggggcgtccgcgtcgtggtcgtcctcgtcctccgcggagcagcagcgctcgccggggctccggccctcgcgctccctggaccttgcccccggcgcggacctccgaatcagcgggagcgtggagggggaggtcgacgagctctgccgcagcctggggctctcggggcccgaggatttcgccgtccccgtcgcggcctgggaggcgcgcaagtcgcggtctaactccgacctcctcccgcgctcccgcctcgacccgtccacacccgccgacgaaacctcgccgattgcgcgggcggtctcggcgcccggtgctcagccgactcgctccttccctgcccccattcccgaggagtcactccactcttcgcctgcttccaccgccaccgagtcggcggaggagcctaccgttgcggcgcccgaggagtcacccaacgctgcccctgcctctgctgtcgtggctcccgtcgggggtttgcccctgccttcgccaaggaggggaggcggggaggtagggatacggggtgcacggccgcctttactctccccgcctccgccaattggtgcactagctcctccgccagttaggaggtccttcgttgacaatgacatgactgggtccgcttgggacattgtgcagtcgtttgctcccagggatcagggaagtgaactgggactgggaggaagtgtcgacagtcgttgcaattcggacaaagaggaagagaatgatgttgaggatggggacgcagcggtggagggcgagctgaaggaattgaggataggagagactttcgaggggttcactggaacttcttcattgtcgacgacgaatgatgatgacgcgtccagtacaaccacggaggccatgttcatcatttcaccgaatggcaagttcaagcggaacattaaatcatggatgcgtggtgctcttctgggaagcggctcatttgggatggtgtacgaggggatcagtgatgagggtgcattttttgctgtgaaggaagtatctttgcttgaccaaggaagcaacgcacaacaatctattgttgcacttgagcaggaaattgcactcctcagtcagtttgaacatgaaaatatagtccagtattatggaactgacaaggaagaatccaaactctatatttttattgagcttgtcacacaagggtctctttcatccctctatcaaaagtataaactacgagaatcacaagtctctgcatacacaaggcagattcttaatggattggtttatctccatgagagaaatgtggtccacagagatatcaaatgcgccaatatattggtccatgcaaatggatctgtaaagcttgcagattttggattggcaaaggagatgtcaaaaattaatatgctaaggtcatgcaaaggaagtgtttactggatggcacctgaggttattaatcctaaaaagatgtatgggccttcagctgatatatggagccttggctgcaccgtgttggaaatgctaacccggcaaataccatttcctaatgtcgagtggacaaatgctttcttcatgattggaagaggggaacagcctactattcccaactacctgtctaaggaggcacaagattttattggccagtgcgtaagagttgatcctgagagccggccttctgcgtcacaacttctggagcacccatttgttaacagaccactgcgagcttcatttgaatcttcgtctccaccagccatctgattctagtattgatataatggggtgtttctcgttgaggccaatgctcagatcttcatgatctacactactggttccagaatggaattacgtgggcttgtttaggatgtagtttagtagctgtagtccgtagggttggtgggcagcattgctctgtggttttgtattctttggggtgttcttcattgggcaaagggttttcttcctggttattacgtagatttgtgtaaacttgtaggtaaaagggctgcaattgcctctgggctctggtgtaggtttagccgatgtttgtgaatgtttgacatcgccattctttacgtaaatggttttgttgctcaaaaaagcatccggagcattgaatccccctggtgttacttttttcttcgtcgcatcggaaactgtttttttccttctaatttatcatccacgggattat

SEQ ID NO: 10839 - DNA, 2022 bp, Zea Mays
gcggcccacctagcatagacccgaaagagtgttcgccgcttgtgcagtgtattgtagaatgaaatttcacttccaaccacgatgccaaggcacacgccatacccttctcgcaagcagtcaagctcctcccccaatccttccccgatgctgcggcgcaacagcgtgtgcgaaaccgagtccgaatcccgacgcgctccggctcccatggagcttagattttaggtgtgagctgctccccctgtatggacccgtccacacccgccgacgaaacctcgccgattgcgcgggcggtctcggcgcccggtgctcagccgactcgctccttccctgcccccattcccgaggagtcactccactcttcgcctgcttccaccgccaccgagtcggcggaggagcctaccgttgcggcgcccgaggagtcacccaacgctgcccctgcctctgctgtcgtggctcccgtcgggggtttgcccctgccttcgccaaggaggggaggcggggagtcgtttgctcccagggatcagggaagtgaactgggactgggaggaagtgtcgacagtcgttgcaattcggacaaagaggaagagaatgatgttgaggatggggacgcagcggtggagggcgagctgaaggaattgaggataggagagactttcgaggggttcactggaacttcttcattgtcgacgacgaatgatgatgacgcgtccagtacaaccacggaggccatgttcatcatttcaccgaatggcaagttcaagcggaacattaaatcatggatgcgtggtgctcttctgggaagcggctcatttgggatggtgtacgaggggatcagtgatgagggtgcattttttgctgtgaaggaagtatctttgcttgaccaaggaagcaacgcacaacaatctattgttgcacttgagcaggaaattgcactcctcagtcagtttgaacatgaaaatatagtccagtattatggaactgacaaggaagaatccaaactctatatttttattgagcttgtcacacaagggtctctttcatccctctatcaaaagtataaactacgagaatcacaagtctctgcatacacaaggcagattcttaatggattggtttatctccatgagagaaatgtggtccacagagatatcaaatgcgccaatatattggtccatgcaaatggatctgtaaagcttgcagattttggattggcaaaggagatgtcaaaaattaatatgctaaggtcatgcaaaggaagtgtttactggatggcacctgaggttattaatcctaaaaagatgtatgggccttcagctgatatatggagccttggctgcaccgtgttggaaatgctaacccggcaaataccatttcctaatgtcgagtggacaaatgctttcttcatgattggaagaggggaacagcctactattcccaactacctgtctaaggaggcacaagattttattggccagtgcgtaagagttgatcctgagagccggccttctgcgtcacaacttctggagcacccatttgttaacagaccactgcgagcttcatttgaatcttcgtctccaccagccatctgattctagtattgatataatggggtgtttctcgttgaggccaatgctcagatcttcatgatctacactactggttccagaatggaattacgtgggcttgtttaggatgtagtttagtagctgtagtccgtagggttggtgggcagcattgctctgtggttttgtattctttggggtgttcttcattgggcaaagggttttcttcctggttattacgtagatttgtgtaaacttgtaggtaaaagggctgcaattgcctctgggctctggtgtaggtttagccgatgtttgtgaatgtttgacatcgccattctttacgtaaatggttttgttgctcaaaaaagcatccggagcattgaatccccctggtgttacttttttcttcgtcgcatcggaaactgtttttttccttctaatttatcatccacgggattat

SEQ ID NO: 10840 - DNA, 1638 bp, Zea Mays
cgcccgcatcccgccccgcatcccgcgaccttcttcctctgctgcctcctgcccgcatcctgccggcggacgcaccccgccccgcatcccgcgaccttcttcctctgttgcctccacgggagccttctcacctccacgcgtcgttgcgtcagatccgtctgtcgctagagaaaaccctacccaatgaccacatgcattcttactgggacgacgccactattggcgcagaggagcagatatggcgcatcgcatgtactccgtcgctgtcctcctcgaatccgcctctaatttctccaacgccataggcaaggagatgcctgcccaccgccccggcaccccccgccctcgccgcgcacaccccaagccccgcggatcacagtcgcctctaccctagcgggagccgcgcccgcacccacattacccgcacgatggcaagaggcagcggcacaaggccacggcgactcctcgagcagaggaacccgaccgagcgcagcaacgcaaatcttcaatctcaaatccgtgctgcgagaaaagtttcactcctctggctgctccttgtgtgtgtgtgtccactaatgcgttcagcattgcaactgctgctgccaaatgctgaggcagcagtatacataactggttcaatttgtgcagcattcgttgccaacatagatggtcactctgataaaactgtcaccttcaatgggaggatgctcagaaatttggtggctggtggatctacttaagaatcaaaagtcagacaaggtggacatcaccatccaaccggaggagcaggaagccatgaatgatgttctagcagccagccatgaccgcgtccacgtcatcaactttgacatcaagcaggggctacagtggccgggcctcctccagaaaaagaggaattgaagcagtatctgactcgaacatttacgatgttacaatagaaagcccttctgattacctgcagtatgtgagatcatccattgactgcctctgtttgctcatgtttgatccgatcaaacctgcacttggtgctattgtctcgtctctgaaggagaccaacctgtcaaaaagggcccaaagtttgagaatggttccaccggttgacctgatggagactcagccagaggatctcaggacgcaggagcaacagctcaatgagctcgtggacatccaaatcgaggagattgatggggtcgccaagaacgtcacttcacgtggcaaggataagatggcagagctggcggttcaatgaatctgggtgaggttcctacttcaaacgatgttaaaatgttgtcgtagcttatctggtgaggtctcttttacgagttggcttcttggtagaaagggaatgtcacggcataggcactgagtagattgtcacgacagattattatatacttcaattctggaatatttgatggaaatgctattttagattgcttggtaagtgggaaccgcctcaaatcacagaagtagaagcagcttccgattcagccggaaccatttcttcaaaaatgttctattatagaataaacaaggcttaggagatagaaaacattatttacaatataaatatgtaatattattataaatgtaccgactcaaataaaatgaactggtattgaacaaacattataaaag

SEQ ID NO: 10841 - DNA, 1844 bp, Zea Mays
cgcccgcatcccgccccgcatcccgcgaccttcttcctctgctgcctcctgcccgcatcctgccggcggacgcaccccgccccgcatcccgcgaccttcttcctctgttgcctccacgggagccttctcacctccacgcgtcgttgcgtcagatccgtctgtcgctagagaaaaccctacccaatgaccacatgcattcttactgggacgacgccactattggcgcagaggagcagatatggcgcatcgcatgtactccgtcgctgtcctcctcgaatccgcctctaatttctccaacgccataggcaaggagatgcctgcccaccgccccggcaccccccgccctcgccgcgcacaccccaagccccgcggatcacagtcgcctctaccctagcgggagccgcgcccgcacccacattacccgcacgatggcaagaggcagcggcacaaggccacggcgactcctcgagcagaggaacccgaccgagcgcagcaacgcaaatcttcaatctcaaatccgtgctgcgagaaaagtttcactcctctggctgctccttgtgtgtgtgtgtccactaatgcgttcagcattgcaactgctgctgccaaatgctgagcattcgttgccaacatagatggtcactctgataaaactgtcaccttcaatgggaggatgctcaggttttgagaccgaacctatatgtaccaccaaaacaatatcctaattgcaagaagcatgatatggttactttctcttactgctacagaactgcagtgacaaatggtagtgccattaagcatgatggctcatatgaatcagatcctgcagttgagattgttcgagttgaactccaaggtgctgctgcatttcttttattctcgtctggttccacgcctatatatattggagaacatggatgggaaatgcttctggtagtaaaaaaggcaacacaagaggctggttcaaaatttgaactgctaggttttgcatctgtgcataacttctatcattatcctgagagtattcgcttacgaatcagccagatacttgtgttgccaccttatcagggtgaaggccatggtcttggtcttcttgaagcaatcaattatattgcacagtctgagaacatttacgatgttacaatagaaagcccttctgattacctgcagtatgtgagatcatccattgactgcctctgtttgctcatgtttgatccgatcaaacctgcacttggtgctattgtctcgtctctgaaggagaccaacctgtcaaaaagggcccaaagtttgagaatggttccaccggttgacctgatggagactcagccagaggatctcaggacgcaggagcaacagctcaatgagctcgtggacatccaaatcgaggagattgatggggtcgccaagaacgtcacttcacgtggcaaggataagatggcagagctggcggttcaatgaatctgggtgaggttcctacttcaaacgatgttaaaatgttgtcgtagcttatctggtgaggtctcttttacgagttggcttcttggtagaaagggaatgtcacggcataggcactgagtagattgtcacgacagattattatatacttcaattctggaatatttgatggaaatgctattttagattgcttggtaagtgggaaccgcctcaaatcacagaagtagaagcagcttccgattcagccggaaccatttcttcaaaaatgttctattatagaataaacaaggcttaggagatagaaaacattatttacaatataaatatgtaatattattataaatgtaccgactcaaataaaatgaactggtattgaacaaacattataaaag

SEQ ID NO: 10842 - DNA, 2297 bp, Zea Mays
cgcccgcatcccgccccgcatcccgcgaccttcttcctctgctgcctcctgcccgcatcctgccggcggacgcaccccgccccgcatcccgcgaccttcttcctctgttgcctccacgggagccttctcacctccacgcgtcgttgcgtcagatccgtctgtcgctagagaaaaccctacccaatgaccacatgcattcttactgggacgacgccactattggcgcagaggagcagatatggcgcatcgcatgtactccgtcgctgtcctcctcgaatccgcctctaatttctccaacgccataggcaaggagatgcctgcccaccgccccggcaccccccgccctcgccgcgcacaccccaagccccgcggatcacagtcgcctctaccctagcgggagccgcgcccgcacccacattacccgcacgatggcaagaggcagcggcacaaggccacggcgactcctcgagcagaggaacccgaccgagcgcagcaacgcaaatcttcaatctcaaatccgtgctgcgagaaaagtttcactcctctggctgctccttgtgtgtgtgtgtccactaatgcgttcagcattgcaactgctgctgccaaatgctgagcattcgttgccaacatagatggtcactctgataaaactgtcaccttcaatgggaggatgctcaggttttgagaccgaacctatatgtaccaccaaaacaatatcctaattgcaaggaaggtgaccttcctctcatcatcgcgattgactagcaaccaatggccctgataggtgttatgcaagtgtagggcgacatcactaatgctcggacaacggatgtggcatttcgatggatgcaaagcagacttggttgtttgcgatggaggcttcggatagtaagatatcatatgagtgcaagagaactactctcaccattaactataacaaattttgtcaccaaaatttggtggctggtggatctacttaagaatcaaaagtcagacaaggtggacatcaccatccaaccggaggagcaggaagccatgaatgatgttctagcagccagccatgaccgcgtccacgtcatcaactttgacatcaagcaggggctacagtggccgggcctcctccagaaaaagaggaattgaagcagtatctgactcgaaaacttggtagaaaaagaggaattcctgcatacattttcgaaggaatgtgaatatatcagaactgcagtgacaaatggtagtgccattaagcatgatggctcatatgaatcagatcctgcagttgagattgttcgagttgaactccaaggtgctgctgcatttcttttattctcgtctggttccacgcctatatatattggagaacatggatgggaaatgcttctggtagtaaaaaaggcaacacaagaggctggttcaaaatttgaactgctaggttttgcatctgtgcataacttctatcattatcctgagagtattcgcttacgaatcagccagatacttgtgttgccaccttatcagggtgaaggccatggtcttggtcttcttgaagcaatcaattatattgcacagtctgagaacatttacgatgttacaatagaaagcccttctgattacctgcagtatgtgagatcatccattgactgcctctgtttgctcatgtttgatccgatcaaacctgcacttggtgctattgtctcgtctctgaaggagaccaacctgtcaaaaagggcccaaagtttgagaatggttccaccggttgacctgatggagactcagccagaggatctcaggacgcaggagcaacagctcaatgagctcgtggacatccaaatcgaggagattgatggggtcgccaagaacgtcacttcacgtggcaaggataagatggcagagctggcggttcaatgaatctgggtgaggttcctacttcaaacgatgttaaaatgttgtcgtagcttatctggtgaggtctcttttacgagttggcttcttggtagaaagggaatgtcacggcataggcactgagtagattgtcacgacagattattatatacttcaattctggaatatttgatggaaatgctattttagattgcttggtaagtgggaaccgcctcaaatcacagaagtagaagcagcttccgattcagccggaaccatttcttcaaaaatgttctattatagaataaacaaggcttaggagatagaaaacattatttacaatataaatatgtaatattattataaatgtaccgactcaaataaaatgaactggtattgaacaaacattataaaag

SEQ ID NO: 10843 - DNA, 2344 bp, Zea Mays
cgcccgcatcccgccccgcatcccgcgaccttcttcctctgctgcctcctgcccgcatcctgccggcggacgcaccccgccccgcatcccgcgaccttcttcctctgttgcctccacgggagccttctcacctccacgcgtcgttgcgtcagatccgtctgtcgctagagaaaaccctacccaatgaccacatgcattcttactgggacgacgccactattggcgcagaggagcagatatggcgcatcgcatgtactccgtcgctgtcctcctcgaatccgcctctaatttctccaacgccataggcaaggagatgcctgcccaccgccccggcaccccccgccctcgccgcgcacaccccaagccccgcggatcacagtcgcctctaccctagcgggagccgcgcccgcacccacattacccgcacgatggcaagaggcagcggcacaaggccacggcgactcctcgagcagaggaacccgaccgagcgcagcaacgcaaatcttcaatctcaaatccgtgctgcgagaaaagtttcactcctctggctgctccttgtgtgtgtgtgtccactaatgcgttcagcattgcaactgctgctgccaaatgctgaggcagcagtatacataactggttcaatttgtgcagcattcgttgccaacatagatggtcactctgataaaactgtcaccttcaatgggaggatgctcaggttttgagaccgaacctatatgtaccaccaaaacaatatcctaattgcaaggaaggtgaccttcctctcatcatcgcgattgactagcaaccaatggccctgataggtgttatgcaagtgtagggcgacatcactaatgctcggacaacggatgtggcatttcgatggatgcaaagcagacttggttgtttgcgatggaggcttcggatagtaagatatcatatgagtgcaagagaactactctcaccattaactataacaaattttgtcaccaaaatttggtggctggtggatctacttaagaatcaaaagtcagacaaggtggacatcaccatccaaccggaggagcaggaagccatgaatgatgttctagcagccagccatgaccgcgtccacgtcatcaactttgacatcaagcaggggctacagtggccgggcctcctccagaaaaagaggaattgaagcagtatctgactcgaacatttttgtagaaaacttggtagaaaaagaggaattcctgcatacattttcgaaggaatgtgaatatatcagaactgcagtgacaaatggtagtgccattaagcatgatggctcatatgaatcagatcctgcagttgagattgttcgagttgaactccaaggtgctgctgcatttcttttattctcgtctggttccacgcctatatatattggagaacatggatgggaaatgcttctggtagtaaaaaaggcaacacaagaggctggttcaaaatttgaactgctaggttttgcatctgtgcataacttctatcattatcctgagagtattcgcttacgaatcagccagatacttgtgttgccaccttatcagggtgaaggccatggtcttggtcttcttgaagcaatcaattatattgcacagtctgagaacatttacgatgttacaatagaaagcccttctgattacctgcagtatgtgagatcatccattgactgcctctgtttgctcatgtttgatccgatcaaacctgcacttggtgctattgtctcgtctctgaaggagaccaacctgtcaaaaagggcccaaagtttgagaatggttccaccggttgacctgatggagactcagccagaggatctcaggacgcaggagcaacagctcaatgagctcgtggacatccaaatcgaggagattgatggggtcgccaagaacgtcacttcacgtggcaaggataagatggcagagctggcggttcaatgaatctgggtgaggttcctacttcaaacgatgttaaaatgttgtcgtagcttatctggtgaggtctcttttacgagttggcttcttggtagaaagggaatgtcacggcataggcactgagtagattgtcacgacagattattatatacttcaattctggaatatttgatggaaatgctattttagattgcttggtaagtgggaaccgcctcaaatcacagaagtagaagcagcttccgattcagccggaaccatttcttcaaaaatgttctattatagaataaacaaggcttaggagatagaaaacattatttacaatataaatatgtaatattattataaatgtaccgactcaaataaaatgaactggtattgaacaaacattataaaag

SEQ ID NO: 10844 - DNA, 1878 bp, Zea Mays
cgcccgcatcccgccccgcatcccgcgaccttcttcctctgctgcctcctgcccgcatcctgccggcggacgcaccccgccccgcatcccgcgaccttcttcctctgttgcctccacgggagccttctcacctccacgcgtcgttgcgtcagatccgtctgtcgctagagaaaaccctacccaatgaccacatgcattcttactgggacgacgccactattggcgcagaggagcagatatggcgcatcgcatgtactccgtcgctgtcctcctcgaatccgcctctaatttctccaacgccataggcaaggagatgcctgcccaccgccccggcaccccccgccctcgccgcgcacaccccaagccccgcggatcacagtcgcctctaccctagcgggagccgcgcccgcacccacattacccgcacgatggcaagaggcagcggcacaaggccacggcgactcctcgagcagaggaacccgaccgagcgcagcaacgcaaatcttcaatctcaaatccgtgctgcgagaaaagtttcactcctctggctgctccttgtgtgtgtgtgtccactaatgcgttcagcattgcaactgctgctgccaaatgctgaggcagcagtatacataactggttcaatttgtgcagcattcgttgccaacatagatggtcactctgataaaactgtcaccttcaatgggaggatgctcaggttttgagaccgaacctatatgtaccaccaaaacaatatcctaattgcaagaagcatgatatggttactttctcttactgctacagaactgcagtgacaaatggtagtgccattaagcatgatggctcatatgaatcagatcctgcagttgagattgttcgagttgaactccaaggtgctgctgcatttcttttattctcgtctggttccacgcctatatatattggagaacatggatgggaaatgcttctggtagtaaaaaaggcaacacaagaggctggttcaaaatttgaactgctaggttttgcatctgtgcataacttctatcattatcctgagagtattcgcttacgaatcagccagatacttgtgttgccaccttatcagggtgaaggccatggtcttggtcttcttgaagcaatcaattatattgcacagtctgagaacatttacgatgttacaatagaaagcccttctgattacctgcagtatgtgagatcatccattgactgcctctgtttgctcatgtttgatccgatcaaacctgcacttggtgctattgtctcgtctctgaaggagaccaacctgtcaaaaagggcccaaagtttgagaatggttccaccggttgacctgatggagactcagccagaggatctcaggacgcaggagcaacagctcaatgagctcgtggacatccaaatcgaggagattgatggggtcgccaagaacgtcacttcacgtggcaaggataagatggcagagctggcggttcaatgaatctgggtgaggttcctacttcaaacgatgttaaaatgttgtcgtagcttatctggtgaggtctcttttacgagttggcttcttggtagaaagggaatgtcacggcataggcactgagtagattgtcacgacagattattatatacttcaattctggaatatttgatggaaatgctattttagattgcttggtaagtgggaaccgcctcaaatcacagaagtagaagcagcttccgattcagccggaaccatttcttcaaaaatgttctattatagaataaacaaggcttaggagatagaaaacattatttacaatataaatatgtaatattattataaatgtaccgactcaaataaaatgaactggtattgaacaaacattataaaag

SEQ ID NO: 10845 - DNA, 2310 bp, Zea Mays
cgcccgcatcccgccccgcatcccgcgaccttcttcctctgctgcctcctgcccgcatcctgccggcggacgcaccccgccccgcatcccgcgaccttcttcctctgttgcctccacgggagccttctcacctccacgcgtcgttgcgtcagatccgtctgtcgctagagaaaaccctacccaatgaccacatgcattcttactgggacgacgccactattggcgcagaggagcagatatggcgcatcgcatgtactccgtcgctgtcctcctcgaatccgcctctaatttctccaacgccataggcaaggagatgcctgcccaccgccccggcaccccccgccctcgccgcgcacaccccaagccccgcggatcacagtcgcctctaccctagcgggagccgcgcccgcacccacattacccgcacgatggcaagaggcagcggcacaaggccacggcgactcctcgagcagaggaacccgaccgagcgcagcaacgcaaatcttcaatctcaaatccgtgctgcgagaaaagtttcactcctctggctgctccttgtgtgtgtgtgtccactaatgcgttcagcattgcaactgctgctgccaaatgctgagcattcgttgccaacatagatggtcactctgataaaactgtcaccttcaatgggaggatgctcaggttttgagaccgaacctatatgtaccaccaaaacaatatcctaattgcaaggaaggtgaccttcctctcatcatcgcgattgactagcaaccaatggccctgataggtgttatgcaagtgtagggcgacatcactaatgctcggacaacggatgtggcatttcgatggatgcaaagcagacttggttgtttgcgatggaggcttcggatagtaagatatcatatgagtgcaagagaactactctcaccattaactataacaaattttgtcaccaaaatttggtggctggtggatctacttaagaatcaaaagtcagacaaggtggacatcaccatccaaccggaggagcaggaagccatgaatgatgttctagcagccagccatgaccgcgtccacgtcatcaactttgacatcaagcaggggctacagtggccgggcctcctccagaaaaagaggaattgaagcagtatctgactcgaacatttttgtagaaaacttggtagaaaaagaggaattcctgcatacattttcgaaggaatgtgaatatatcagaactgcagtgacaaatggtagtgccattaagcatgatggctcatatgaatcagatcctgcagttgagattgttcgagttgaactccaaggtgctgctgcatttcttttattctcgtctggttccacgcctatatatattggagaacatggatgggaaatgcttctggtagtaaaaaaggcaacacaagaggctggttcaaaatttgaactgctaggttttgcatctgtgcataacttctatcattatcctgagagtattcgcttacgaatcagccagatacttgtgttgccaccttatcagggtgaaggccatggtcttggtcttcttgaagcaatcaattatattgcacagtctgagaacatttacgatgttacaatagaaagcccttctgattacctgcagtatgtgagatcatccattgactgcctctgtttgctcatgtttgatccgatcaaacctgcacttggtgctattgtctcgtctctgaaggagaccaacctgtcaaaaagggcccaaagtttgagaatggttccaccggttgacctgatggagactcagccagaggatctcaggacgcaggagcaacagctcaatgagctcgtggacatccaaatcgaggagattgatggggtcgccaagaacgtcacttcacgtggcaaggataagatggcagagctggcggttcaatgaatctgggtgaggttcctacttcaaacgatgttaaaatgttgtcgtagcttatctggtgaggtctcttttacgagttggcttcttggtagaaagggaatgtcacggcataggcactgagtagattgtcacgacagattattatatacttcaattctggaatatttgatggaaatgctattttagattgcttggtaagtgggaaccgcctcaaatcacagaagtagaagcagcttccgattcagccggaaccatttcttcaaaaatgttctattatagaataaacaaggcttaggagatagaaaacattatttacaatataaatatgtaatattattataaatgtaccgactcaaataaaatgaactggtattgaacaaacattataaaag

SEQ ID NO: 10846 - DNA, 2280 bp, Zea Mays
cgcccgcatcccgccccgcatcccgcgaccttcttcctctgctgcctcctgcccgcatcctgccggcggacgcaccccgccccgcatcccgcgaccttcttcctctgttgcctccacgggagccttctcacctccacgcgtcgttgcgtcagatccgtctgtcgctagagaaaaccctacccaatgaccacatgcattcttactgggacgacgccactattggcgcagaggagcagatatggcgcatcgcatgtactccgtcgctgtcctcctcgaatccgcctctaatttctccaacgccataggcaaggagatgcctgcccaccgccccggcaccccccgccctcgccgcgcacaccccaagccccgcggatcacagtcgcctctaccctagcgggagccgcgcccgcacccacattacccgcacgatggcaagaggcagcggcacaaggccacggcgactcctcgagcagaggaacccgaccgagcgcagcaacgcaaatcttcaatctcaaatccgtgctgcgagaaaagtttcactcctctggctgctccttgtgtgtgtgtgtccactaatgcgttcagcattgcaactgctgctgccaaatgctgaggcagcagtatacataactggttcaatttgtgcagcattcgttgccaacatagatggtcactctgataaaactgtcaccttcaatgggaggatgctcaggttttgagaccgaacctatatgtaccaccaaaacaatatcctaattgcaaggaaggtgaccttcctctcatcatcgcgattgactagcaaccaatggccctgataggtgttatgcaagtgtagggcgacatcactaatgctcggacaacggatgtggcatttcgatggatgcaaagcagacttggttgtttgcgatggaggcttcggataaaatttggtggctggtggatctacttaagaatcaaaagtcagacaaggtggacatcaccatccaaccggaggagcaggaagccatgaatgatgttctagcagccagccatgaccgcgtccacgtcatcaactttgacatcaagcaggggctacagtggccgggcctcctccagaaaaagaggaattgaagcagtatctgactcgaacatttttgtagaaaacttggtagaaaaagaggaattcctgcatacattttcgaaggaatgtgaatatatcagaactgcagtgacaaatggtagtgccattaagcatgatggctcatatgaatcagatcctgcagttgagattgttcgagttgaactccaaggtgctgctgcatttcttttattctcgtctggttccacgcctatatatattggagaacatggatgggaaatgcttctggtagtaaaaaaggcaacacaagaggctggttcaaaatttgaactgctaggttttgcatctgtgcataacttctatcattatcctgagagtattcgcttacgaatcagccagatacttgtgttgccaccttatcagggtgaaggccatggtcttggtcttcttgaagcaatcaattatattgcacagtctgagaacatttacgatgttacaatagaaagcccttctgattacctgcagtatgtgagatcatccattgactgcctctgtttgctcatgtttgatccgatcaaacctgcacttggtgctattgtctcgtctctgaaggagaccaacctgtcaaaaagggcccaaagtttgagaatggttccaccggttgacctgatggagactcagccagaggatctcaggacgcaggagcaacagctcaatgagctcgtggacatccaaatcgaggagattgatggggtcgccaagaacgtcacttcacgtggcaaggataagatggcagagctggcggttcaatgaatctgggtgaggttcctacttcaaacgatgttaaaatgttgtcgtagcttatctggtgaggtctcttttacgagttggcttcttggtagaaagggaatgtcacggcataggcactgagtagattgtcacgacagattattatatacttcaattctggaatatttgatggaaatgctattttagattgcttggtaagtgggaaccgcctcaaatcacagaagtagaagcagcttccgattcagccggaaccatttcttcaaaaatgttctattatagaataaacaaggcttaggagatagaaaacattatttacaatataaatatgtaatattattataaatgtaccgactcaaataaaatgaactggtattgaacaaacattataaaag

SEQ ID NO: 10847 - DNA, 1870 bp, Zea Mays
cgcccgcatcccgccccgcatcccgcgaccttcttcctctgctgcctcctgcccgcatcctgccggcggacgcaccccgccccgcatcccgcgaccttcttcctctgttgcctccacgggagccttctcacctccacgcgtcgttgcgtcagatccgtctgtcgctagagaaaaccctacccaatgaccacatgcattcttactgggacgacgccactattggcgcagaggagcagatatggcgcatcgcatgtactccgtcgctgtcctcctcgaatccgcctctaatttctccaacgccataggcaaggagatgcctgcccaccgccccggcaccccccgccctcgccgcgcacaccccaagccccgcggatcacagtcgcctctaccctagcgggagccgcgcccgcacccacattacccgcacgatggcaagaggcagcggcacaaggccacggcgactcctcgagcagaggaacccgaccgagcgcagcaacgcaaatcttcaatctcaaatccgtgctgcgagaaaagtttcactcctctggctgctccttgtgtgtgtgtgtccactaatgcgttcagcattgcaactgctgctgccaaatgctgaggcagcagtatacataactggttcaatttgtgcagcattcgttgccaacatagatggtcactctgataaaactgtcaccttcaatgggaggatgctcagttggaaaaagttagattcgcaggttttgagaccgaacctatatgtaccaccaaaacaatatcctaattgcaagaagcatgatatggttactttctcttactgctacagaactgcagtgacaaatggtagtgccattaagcatgatggctcatatgaatcagatcctgcagttgagattgttcgagttgaactccaaggttccacgcctatatatattggagaacatggatgggaaatgcttctggtagtaaaaaaggcaacacaagaggctggttcaaaatttgaactgctaggttttgcatctgtgcataacttctatcattatcctgagagtattcgcttacgaatcagccagatacttgtgttgccaccttatcagggtgaaggccatggtcttggtcttcttgaagcaatcaattatattgcacagtctgagaacatttacgatgttacaatagaaagcccttctgattacctgcagtatgtgagatcatccattgactgcctctgtttgctcatgtttgatccgatcaaacctgcacttggtgctattgtctcgtctctgaaggagaccaacctgtcaaaaagggcccaaagtttgagaatggttccaccggttgacctgatggagactcagccagaggatctcaggacgcaggagcaacagctcaatgagctcgtggacatccaaatcgaggagattgatggggtcgccaagaacgtcacttcacgtggcaaggataagatggcagagctggcggttcaatgaatctgggtgaggttcctacttcaaacgatgttaaaatgttgtcgtagcttatctggtgaggtctcttttacgagttggcttcttggtagaaagggaatgtcacggcataggcactgagtagattgtcacgacagattattatatacttcaattctggaatatttgatggaaatgctattttagattgcttggtaagtgggaaccgcctcaaatcacagaagtagaagcagcttccgattcagccggaaccatttcttcaaaaatgttctattatagaataaacaaggcttaggagatagaaaacattatttacaatataaatatgtaatattattataaatgtaccgactcaaataaaatgaactggtattgaacaaacattataaaag

SEQ ID NO: 10848 - DNA, 1277 bp, Zea Mays
cgcccgcatcccgccccgcatcccgcgaccttcttcctctgctgcctcctgcccgcatcctgccggcggacgcaccccgccccgcatcccgcgaccttcttcctctgttgcctccacgggagccttctcacctccacgcgtcgttgcgtcagatccgtctgtcgctagagaaaaccctacccaatgaccacatgcattcttactgggacgacgccactattggcgcagaggagcagatatggcgcatcgcatgtactccgtcgctgtcctcctcgaatccgcctctaatttctccaacgccataggcaaggagatgcctgcccaccgccccggcaccccccgccctcgccgcgcacaccccaagccccgcggatcacagtcgcctctaccctagcgggagccgcgcccgcacccacattacccgcacgatggcaagaggcagcggcacaaggccacggcgactcctcgagcagaggaacccgaccgagcgcagcaacgcaaatcttcaatctcaaatccgtgctgcgagaaaagtttcactcctctggctgctccttgtgtgtgtgtgtccactaatgcgttcagcattgcaactgctgctgccaaatgctgaggtatgacctttatttttcaacaaaaagtgtctttgtgactacaaaacaagttaacgttcagcattgcagtaatgtagcaaattttgttctgaatttttttatcttcaatgtctggtccgtccgtccgtataaaaaaaatgtatgcattcttctatcttcaggcagcagtatacataactggttcaatttgtgcagcattcgttgccaacatagatggtcactctgataaaactgtcaccttcaatgggaggatgctcaggttttgagaccgaacctatatgtaccaccaaaacaatatcctaattgcaaggaaggtgaccttcctctcatcatcgcgattgactagcaaccaatggccctgataggtgttatgcaagtgtagggcgacatcactaatgctcggacaacggatgtggcatttcgatggatgcaaagcagacttggttgtttgcgatggaggcttcggatagtaagatatcatatgagtgcaagagaactactctcaccattaactataacaaattttgtcaccaaaatttggtggctggtggatctacttaagaatcaaaagtcagacaaggtggacatcaccatccaaccggaggagcaggaagccatgaatgatgttctagcagccagaacggtctttcttgtacgtgtatt

SEQ ID NO: 10849 - DNA, 804 bp, Zea Mays
gtccattctatcctgtaaataatctcagccgtccacgtcccacggtgcacgttctgtcgcccgcatcccgccccgcatcccgcgaccttcttcctctgctgcctcctgcccgcatcctgccggcggacgcaccccgccccgcatcccgcgaccttcttcctctgttgcctccacgggagccttctcacctccacgcgtcgttgcgtcagatccgtctgtcgctagagaaaaccctacccaatgaccacatgcattcttactgggacgacgccactattggcgcagaggagcagatatggcgcatcgcatgtactccgtcgctgtcctcctcgaatccgcctctaatttctccaacgccataggcaaggagatgcctgcccaccgccccggcaccccccgccctcgccgcgcacaccccaagccccgcggatcacagtcgcctctaccctagcgggagccgcgcccgcacccacattacccgcacgatggcaagaggcagcggcacaaggccacggcgactcctcgagcagaggaacccgaccgagcgcagcaacgcaaatcttcaatctcaaatccgtgctgcgagaaaagggagctcccacaagtggtatggctcgatagaggttatttggatctgtgatgcgatagaaattcatggtttaaagataggggtgacgagcagccgcgggtggctgagcacttgctgtcttgcatcaaggctgaaggcagctgcagggattacgtggctataaagatggatggctcgagtattctgcgacttctttagagtaaagtgctttcggc

SEQ ID NO: 10850 - DNA, 2699 bp, Zea Mays
ctagtggccactgcactggtagtagtagcccagtactggcaccgctctagcccagatcaaagctcgggagaagagggagaggaggtagtgcaacataaatcccgagtcccaccaaatcgcaagtcctagcagcttccggtctgcaactgcaacgccgcgggcttgagtgcgagagtgcgcgtgggggatgaggcgggtggcaccggcgatgaccgccgccagcagcgctgctggcggcgaggagacggcggtggtggagaagacgctgctcaacggggacgtctaccgcggcggctcgccgcacgggaagggcaggtacgtgtgggccgacggctgcatgtacgaggggaactggcggcggggcaaggcgtccgggaagggccgcttctcgtggccgtcgggcgccacgttcgaggggcagttccgcaggggccgcatcgacgggcagggcgtgttcgtcggcccagacggcgccacctaccgcggcgcgtgggtggcggaccgtcgccacggcctgggcaacaagacctacgccaacggggactgctacgagggccagtggcgccgcaacctccaggacggccacggccggtacgtctgggccaacggcaaccagtacatcggggagtggcgcgccggggtgctctccggccgcggcgcgcttatctgtgccaatggcagccgctacgacggcgtctgggagaacggcgtgcccaaagggtcaggggtcttcacgtggcccaccggcggctcctggcctgggagctcggtagacctgccggccatgagcgccactttcttcgcgcctcctggtgctgttgctgtgagtaggaggtcttctgtggagggcgtgggggacaaggcgaccccgcggatctgcatatgggagtcggagggcgaggctggagacattacctgcgacatcgtcgacgcgctcgaggcgtctatgcctatgctcttcaaggaagccgcggctatcgcgggtggagcaacttacatgcgatcagccagcggagtcccacgctgggcgtcggcggtggcaaccacgccgcagagtaaacgacccgggcggaccatatccaagcgacacaagaattacgagcttatgctgcagctgcaattaggcatcatgcattccgtggggaagtcttcggctgtgccgatgcgagaactggaacagggagattttgatccaagggaaaatgctttgtcctggacagagttcccaccagagggttcgaaggccacactgccgcattcaactgggtacttctgctggaaggactactgccccatggtgttcaggcatttgaggaagttgtttgctgtggatacaggggattacatgctttcgatctgtggcaatgatcctctgagggagctgtcttcgcctgggaaaagcgggagcttcttttaccttacccaagacgaccaattcatgattaagacagtgaagaaatcagaagtcaagctgctacttaagatgttaaatagctactgcaaacatgtcgatcgatacaagaactcattaatcacgaggttctatggtgtacactgtgtgaagcgccataatggacagaaggtccgattcattgtcatgggtaatctgttctgttctgaataccagattcatcgccgttttgatttgaaaggttcatcatatggacgaacagcagacaagtttgaagatgagattgatgagacaactacactcaaggacttggacctcaattttgtcttccggttgcagaaatcttggtacaccgatctccatgaacaattgagacgagactgcgatttcttggaatcagaagggattatggattacagtttcttgataggaattcacttttgtgatgacatctctgcctcaaagatgggatcctctacttttactgcttctccaagaaatctttgattagactgggcgcacacatgccaggccgggcagagcaagcatccagaaggagcggcgtcaaaaagcggctcgagcatagttacaagtcattgcagacagaccccaactcgatctctgccgtggaacccaagctctactcgaggaggtttcaagagttcatcggcagaattttcgtggaagatggctaacacgcattgggtacagattaaccggtggagcagcagctcatcggcggctaggtaactaaccgtgaagcctcgggtcagcggtgaaggggatctgagttcgaagcaaacttgccccgaattctctccgaaaaccattcgagtggctggatttttgaagcgcagccatgggatcggatggttttgtctgtaaattatgtgattggttcttccggctacattatagcagcagtttgtttgtcctccttaatttagttggaggtttttttatcttcaccccccccccccccccccccccttccccttctgtatatcggtccgatgtgaagaatcgggcagtgagttttgtttccagaaaggattatttaagggctttatagggtgcatgggattgatggacatataatccatggattatatgatacttacaaggcattatatgtcccttgatcccatccaatctgcatgtaaccaaagtcataaggctgcggcaggcagtgaataataagatcgtgtacagatacaccttgatcctgggaatgggtggattagaattcaattcagcgtcgtcatgacccgtgggtcccagatcacgg

SEQ ID NO: 10851 - DNA, 2719 bp, Zea Mays
ctcttccctcctccacccacttcacctggcacactagtggccactgcactggtagtagtagcccagtactggcaccgctctagcccagatcaaagctcgggagaagagggagaggaggtagtgcaacataaatcccgagtcccaccaaatcgcaagtcctagcagcttccggtctgcaactgcaacgccgcgggcttgagtgcgagagtgcgcgtgggggatgaggcgggtggcaccggcgatgaccgccgccagcagcgctgctggcggcgaggagacggcggtggtggagaagacgctgctcaacggggacgtctaccgcggcggctcgccgcacgggaagggcaggtacgtgtgggccgacggctgcatgtacgaggggaactggcggcggggcaaggcgtccgggaagggccgcttctcgtggccgtcgggcgccacgttcgaggggcagttccgcaggggccgcatcgacgggcagggcgtgttcgtcggcccagacggcgccacctaccgcggcgcgtgggtggcggaccgtcgccacggcctgggcaacaagacctacgccaacggggactgctacgagggccagtggcgccgcaacctccaggacggccacggccggtacgtctgggccaacggcaaccagtacatcggggagtggcgcgccggggtgctctccggccgcggcgcgcttatctgtgccaatggcagccgctacgacggcgtctgggagaacggcgtgcccaaagggtcaggggtcttcacgtggcccaccggcggctcctggcctgggagctcggtagacctgccggccatgagcgccactttcttcgcgcctcctggtgctgttgctgtgagtaggaggtcttctgtggagggcgtgggggacaaggcgaccccgcggatctgcatatgggagtcggagggcgaggctggagacattacctgcgacatcgtcgacgcgctcgaggcgtctatgcctatgctcttcaaggaagccgcggctatcgcgggtggagcaacttacatgcgatcagccagcggagtcccacgctgggcgtcggcggtggcaaccacgccgcagagtaaacgacccgggcggaccatatccaagcgacacaagaattacgagcttatgctgcagctgcaattaggcatcatgcattccgtggggaagtcttcggctgtgccgatgcgagaactggaacagggagattttgatccaagggaaaatgctttgtcctggacagagttcccaccagagggttcgaaggccacactgccgcattcaactgggtacttctgctggaaggactactgccccatggtgttcaggggattacatgctttcgatctgtggcaatgatcctctgagggagctgtcttcgcctgggaaaagcgggagcttcttttaccttacccaagacgaccaattcatgattaagacagtgaagaaatcagaagtcaagctgctacttaagatgttaaatagctactgcaaacatgtcgatcgatacaagaactcattaatcacgaggttctatggtgtacactgtgtgaagcgccataatggacagaagattcatcgccgttttgatttgaaaggttcatcatatggacgaacagcagacaagtttgaagatgagattgatgagacaactacactcaaggacttggacctcaattttgtcttccggttgcagaaatcttggtacaccgatctccatgaacaattgagacgagactgcgatttcttggaatcagaagggattatggattacagtttcttgataggaattcacttttgtgatgacatctctgcctcaaagatgggatcctctacttttactgcttctccaagtggtggcacaacagagctttgcttctcagatgatgcttttgatatggtacctgattgcagccggaaatctttgattagactgggcgcacacatgccaggccgggcagagcaagcatccagaaggagcggcgtcaaaaagcggctcgagcatagttacaagtcattgcagacagaccccaactcgatctctgccgtggaacccaagctctactcgaggaggtttcaagagttcatcggcagaattttcgtggaagatggctaacacgcattgggtacagattaaccggtggagcagcagctcatcggcggctaggtaactaaccgtgaagcctcgggtcagcggtgaaggggatctgagttcgaagcaaacttgccccgaattctctccgaaaaccattcgagtggctggatttttgaagcgcagccatgggatcggatggttttgtctgtaaattatgtgattggttcttccggctacattatagcagcagtttgtttgtcctccttaatttagttggaggtttttttatcttcaccccccccccccccccccccccttccccttctgtatatcggtccgatgtgaagaatcgggcagtgagttttgtttccagaaaggattatttaagggctttatagggtgcatgggattgatggacatataatccatggattatatgatacttacaaggcattatatgtcccttgatcccatccaatctgcatgtaaccaaagtcataaggctgcggcaggcagtgaataataagatcgtgtacagatacaccttgatcctgggaatgggtggattagaattcaattcagcgtcgtcatgacccgtgggtcccagatcacgg

SEQ ID NO: 10852 - DNA, 2794 bp, Zea Mays
ctcttccctcctccacccacttcacctggcacactagtggccactgcactggtagtagtagcccagtactggcaccgctctagcccagatcaaagctcgggagaagagggagaggaggtagtgcaacataaatcccgagtcccaccaaatcgcaagtcctagcagcttccggtctgcaactgcaacgccgcgggcttgagtgcgagagtgcgcgtgggggatgaggcgggtggcaccggcgatgaccgccgccagcagcgctgctggcggcgaggagacggcggtggtggagaagacgctgctcaacggggacgtctaccgcggcggctcgccgcacgggaagggcaggtacgtgtgggccgacggctgcatgtacgaggggaactggcggcggggcaaggcgtccgggaagggccgcttctcgtggccgtcgggcgccacgttcgaggggcagttccgcaggggccgcatcgacgggcagggcgtgttcgtcggcccagacggcgccacctaccgcggcgcgtgggtggcggaccgtcgccacggcctgggcaacaagacctacgccaacggggactgctacgagggccagtggcgccgcaacctccaggacggccacggccggtacgtctgggccaacggcaaccagtacatcggggagtggcgcgccggggtgctctccggccgcggcgcgcttatctgtgccaatggcagccgctacgacggcgtctgggagaacggcgtgcccaaagggtcaggggtcttcacgtggcccaccggcggctcctggcctgggagctcggtagacctgccggccatgagcgccactttcttcgcgcctcctggtgctgttgctgtgagtaggaggtcttctgtggagggcgtgggggacaaggcgaccccgcggatctgcatatgggagtcggagggcgaggctggagacattacctgcgacatcgtcgacgcgctcgaggcgtctatgcctatgctcttcaaggaagccgcggctatcgcgggtggagcaacttacatgcgatcagccagcggagtcccacgctgggcgtcggcggtggcaaccacgccgcagagtaaacgacccgggcggaccatatccaagcgacacaagaattacgagcttatgctgcagctgcaattaggcatcatgcattccgtggggaagtcttcggctgtgccgatgcgagaactggaacagggagattttgatccaagggaaaatgctttgtcctggacagagttcccaccagagggttcgaaggccacactgccgcattcaactgggtacttctgctggaaggactactgccccatggtgttcaggggattacatgctttcgatctgtggcaatgatcctctgagggagctgtcttcgcctgggaaaagcgggagcttcttttaccttacccaagacgaccaattcatgattaagacagtgaagaaatcagaagtcaagctgctacttaagatgttaaatagctactgcaaacatgtcgatcgatacaagaactcattaatcacgaggttctatggtgtacactgtgtgaagcgccataatggacagaaggtccgattcattgtcatgggtaatctgttctgttctgaataccagattcatcgccgttttgatttgaaaggttcatcatatggacgaacagcagacaagtttgaagatgagattgatgagacaactacactcaaggacttggacctcaattttgtcttccggttgcagaaatcttggtacaccgatctccatgaacaattgagacgagactgcgatttcttggaatcagaagggattatggattacagtttcttgataggaattcacttttgtgatgacatctctgcctcaaagatgggatcctctacttttactgcttctccaaagcgtttaatcaagagtgaatcatttcaaggtggtggcacaacagagctttgcttctcagatgatgcttttgatatggtacctgattgcagccggaaatctttgattagactgggcgcacacatgccaggccgggcagagcaagcatccagaaggagcggcgtcaaaaagcggctcgagcatagttacaagtcattgcagacagaccccaactcgatctctgccgtggaacccaagctctactcgaggaggtttcaagagttcatcggcagaattttcgtggaagatggctaacacgcattgggtacagattaaccggtggagcagcagctcatcggcggctaggtaactaaccgtgaagcctcgggtcagcggtgaaggggatctgagttcgaagcaaacttgccccgaattctctccgaaaaccattcgagtggctggatttttgaagcgcagccatgggatcggatggttttgtctgtaaattatgtgattggttcttccggctacattatagcagcagtttgtttgtcctccttaatttagttggaggtttttttatcttcaccccccccccccccccccccccttccccttctgtatatcggtccgatgtgaagaatcgggcagtgagttttgtttccagaaaggattatttaagggctttatagggtgcatgggattgatggacatataatccatggattatatgatacttacaaggcattatatgtcccttgatcccatccaatctgcatgtaaccaaagtcataaggctgcggcaggcagtgaataataagatcgtgtacagatacaccttgatcctgggaatgggtggattagaattcaattcagcgtcgtcatgacccgtgggtcccagatcacgg

SEQ ID NO: 10853 - DNA, 2873 bp, Zea Mays
cctctcgctcctcttccattgtataatcctcttccctcctccacccacttcacctggcacactagtggccactgcactggtagtagtagcccagtactggcaccgctctagcccagatcaaagctcgggagaagagggagaggaggtagtgcaacataaatcccgagtcccaccaaatcgcaagtcctagcagcttccggtctgcaactgcaacgccgcgggcttgagtgcgagagtgcgcgtgggggatgaggcgggtggcaccggcgatgaccgccgccagcagcgctgctggcggcgaggagacggcggtggtggagaagacgctgctcaacggggacgtctaccgcggcggctcgccgcacgggaagggcaggtacgtgtgggccgacggctgcatgtacgaggggaactggcggcggggcaaggcgtccgggaagggccgcttctcgtggccgtcgggcgccacgttcgaggggcagttccgcaggggccgcatcgacgggcagggcgtgttcgtcggcccagacggcgccacctaccgcggcgcgtgggtggcggaccgtcgccacggcctgggcaacaagacctacgccaacggggactgctacgagggccagtggcgccgcaacctccaggacggccacggccggtacgtctgggccaacggcaaccagtacatcggggagtggcgcgccggggtgctctccggccgcggcgcgcttatctgtgccaatggcagccgctacgacggcgtctgggagaacggcgtgcccaaagggtcaggggtcttcacgtggcccaccggcggctcctggcctgggagctcggtagacctgccggccatgagcgccactttcttcgcgcctcctggtgctgttgctgtgagtaggaggtcttctgtggagggcgtgggggacaaggcgaccccgcggatctgcatatgggagtcggagggcgaggctggagacattacctgcgacatcgtcgacgcgctcgaggcgtctatgcctatgctcttcaaggaagccgcggctatcgcgggtggagcaacttacatgcgatcagccagcggagtcccacgctgggcgtcggcggtggcaaccacgccgcagagtaaacgacccgggcggaccatatccaagcgacacaagaattacgagcttatgctgcagctgcaattaggcatcatgtgaggttttggtagctccgtgttctcacaatgtggtctggtttttggagaggatgtgcaaatggaggttttattatggttctgcatcctgcaggcattccgtggggaagtcttcggctgtgccgatgcgagaactggaacagggagattttgatccaagggaaaatgctttgtcctggacagagttcccaccagagggttcgaaggccacactgccgcattcaactgggtacttctgctggaaggactactgccccatggtgttcaggcatttgaggaagttgtttgctgtggatacaggggattacatgctttcgatctgtggcaatgatcctctgagggagctgtcttcgcctgggaaaagcgggagcttcttttaccttacccaagacgaccaattcatgattaagacagtgaagaaatcagaagtcaagctgctacttaagatgttaaatagctactgcaaacatgtcgatcgatacaagaactcattaatcacgaggttctatggtgtacactgtgtgaagcgccataatggacagaagattcatcgccgttttgatttgaaaggttcatcatatggacgaacagcagacaagtttgaagatgagattgatgagacaactacactcaaggacttggacctcaattttgtcttccggttgcagaaatcttggtacaccgatctccatgaacaattgagacgagactgcgatttcttggaatcagaagggattatggattacagtttcttgataggaattcacttttgtgatgacatctctgcctcaaagatgggatcctctacttttactgcttctccaagtggtggcacaacagagctttgcttctcagatgatgcttttgatatggtacctgattgcagccggaaatctttgattagactgggcgcacacatgccaggccgggcagagcaagcatccagaaggagcggcgtcaaaaagcggctcgagcatagttacaagtcattgcagacagaccccaactcgatctctgccgtggaacccaagctctactcgaggaggtttcaagagttcatcggcagaattttcgtggaagatggctaacacgcattgggtacagattaaccggtggagcagcagctcatcggcggctaggtaactaaccgtgaagcctcgggtcagcggtgaaggggatctgagttcgaagcaaacttgccccgaattctctccgaaaaccattcgagtggctggatttttgaagcgcagccatgggatcggatggttttgtctgtaaattatgtgattggttcttccggctacattatagcagcagtttgtttgtcctccttaatttagttggaggtttttttatcttcaccccccccccccccccccccccttccccttctgtatatcggtccgatgtgaagaatcgggcagtgagttttgtttccagaaaggattatttaagggctttatagggtgcatgggattgatggacatataatccatggattatatgatacttacaaggcattatatgtcccttgatcccatccaatctgcatgtaaccaaagtcataaggctgcggcaggcagtgaataataagatcgtgtacagatacaccttgatcctgggaatgggtggattagaattcaattcagcgtcgtcatgacccgtgggtcccagatcacgg

SEQ ID NO: 10854 - DNA, 2835 bp, Zea Mays
gtaaaagccacccccctcgggcctcggcctctcgctcctcttccattgtataatcctcttccctcctccacccacttcacctggcacactagtggccactgcactggtagtagtagcccagtactggcaccgctctagcccagatcaaagctcgggagaagagggagaggaggtagtgcaacataaatcccgagtcccaccaaatcgcaagtcctagcagcttccggtctgcaactgcaacgccgcgggcttgagtgcgagagtgcgcgtgggggatgaggcgggtggcaccggcgatgaccgccgccagcagcgctgctggcggcgaggagacggcggtggtggagaagacgctgctcaacggggacgtctaccgcggcggctcgccgcacgggaagggcaggtacgtgtgggccgacggctgcatgtacgaggggaactggcggcggggcaaggcgtccgggaagggccgcttctcgtggccgtcgggcgccacgttcgaggggcagttccgcaggggccgcatcgacgggcagggcgtgttcgtcggcccagacggcgccacctaccgcggcgcgtgggtggcggaccgtcgccacggcctgggcaacaagacctacgccaacggggactgctacgagggccagtggcgccgcaacctccaggacggccacggccggtacgtctgggccaacggcaaccagtacatcggggagtggcgcgccggggtgctctccggccgcggcgcgcttatctgtgccaatggcagccgctacgacggcgtctgggagaacggcgtgcccaaagggtcaggggtcttcacgtggcccaccggcggctcctggcctgggagctcggtagacctgccggccatgagcgccactttcttcgcgcctcctggtgctgttgctgtgagtaggaggtcttctgtggagggcgtgggggacaaggcgaccccgcggatctgcatatgggagtcggagggcgaggctggagacattacctgcgacatcgtcgacgcgctcgaggcgtctatgcctatgctcttcaaggaagccgcggctatcgcgggtggagcaacttacatgcgatcagccagcggagtcccacgctgggcgtcggcggtggcaaccacgccgcagagtaaacgacccgggcggaccatatccaagcgacacaagaattacgagcttatgctgcagctgcaattaggcatcattcttcggctgtgccgatgcgagaactggaacagggagattttgatccaagggaaaatgctttgtcctggacagagttcccaccagagggttcgaaggccacactgccgcattcaactgggtacttctgctggaaggactactgccccatggtgttcaggcatttgaggaagttgtttgctgtggatacaggggattacatgctttcgatctgtggcaatgatcctctgagggagctgtcttcgcctgggaaaagcgggagcttcttttaccttacccaagacgaccaattcatgattaagacagtgaagaaatcagaagtcaagctgctacttaagatgttaaatagctactgcaaacatgtcgatcgatacaagaactcattaatcacgaggttctatggtgtacactgtgtgaagcgccataatggacagaaggtccgattcattgtcatgggtaatctgttctgttctgaataccagattcatcgccgttttgatttgaaaggttcatcatatggacgaacagcagacaagtttgaagatgagattgatgagacaactacactcaaggacttggacctcaattttgtcttccggttgcagaaatcttggtacaccgatctccatgaacaattgagacgagactgcgatttcttggaatcagaagggattatggattacagtttcttgataggaattcacttttgtgatgacatctctgcctcaaagatgggatcctctacttttactgcttctccaagtggtggcacaacagagctttgcttctcagatgatgcttttgatatggtacctgattgcagccggaaatctttgattagactgggcgcacacatgccaggccgggcagagcaagcatccagaaggagcggcgtcaaaaagcggctcgagcatagttacaagtcattgcagacagaccccaactcgatctctgccgtggaacccaagctctactcgaggaggtttcaagagttcatcggcagaattttcgtggaagatggctaacacgcattgggtacagattaaccggtggagcagcagctcatcggcggctaggtaactaaccgtgaagcctcgggtcagcggtgaaggggatctgagttcgaagcaaacttgccccgaattctctccgaaaaccattcgagtggctggatttttgaagcgcagccatgggatcggatggttttgtctgtaaattatgtgattggttcttccggctacattatagcagcagtttgtttgtcctccttaatttagttggaggtttttttatcttcaccccccccccccccccccccccttccccttctgtatatcggtccgatgtgaagaatcgggcagtgagttttgtttccagaaaggattatttaagggctttatagggtgcatgggattgatggacatataatccatggattatatgatacttacaaggcattatatgtcccttgatcccatccaatctgcatgtaaccaaagtcataaggctgcggcaggcagtgaataataagatcgtgtacagatacaccttgatcctgggaatgggtggattagaattcaattcagcgtcgtcatgacccgtgggtcccagatcacgg

SEQ ID NO: 10855 - DNA, 2851 bp, Zea Mays
gtaaaagccacccccctcgggcctcggcctctcgctcctcttccattgtataatcctcttccctcctccacccacttcacctggcacactagtggccactgcactggtagtagtagcccagtactggcaccgctctagcccagatcaaagctcgggagaagagggagaggaggtagtgcaacataaatcccgagtcccaccaaatcgcaagtcctagcagcttccggtctgcaactgcaacgccgcgggcttgagtgcgagagtgcgcgtgggggatgaggcgggtggcaccggcgatgaccgccgccagcagcgctgctggcggcgaggagacggcggtggtggagaagacgctgctcaacggggacgtctaccgcggcggctcgccgcacgggaagggcaggtacgtgtgggccgacggctgcatgtacgaggggaactggcggcggggcaaggcgtccgggaagggccgcttctcgtggccgtcgggcgccacgttcgaggggcagttccgcaggggccgcatcgacgggcagggcgtgttcgtcggcccagacggcgccacctaccgcggcgcgtgggtggcggaccgtcgccacggcctgggcaacaagacctacgccaacggggactgctacgagggccagtggcgccgcaacctccaggacggccacggccggtacgtctgggccaacggcaaccagtacatcggggagtggcgcgccggggtgctctccggccgcggcgcgcttatctgtgccaatggcagccgctacgacggcgtctgggagaacggcgtgcccaaagggtcaggggtcttcacgtggcccaccggcggctcctggcctgggagctcggtagacctgccggccatgagcgccactttcttcgcgcctcctggtgctgttgctgtgagtaggaggtcttctgtggagggcgtgggggacaaggcgaccccgcggatctgcatatgggagtcggagggcgaggctggagacattacctgcgacatcgtcgacgcgctcgaggcgtctatgcctatgctcttcaaggaagccgcggctatcgcgggtggagcaacttacatgcgatcagccagcggagtcccacgctgggcgtcggcggtggcaaccacgccgcagagtaaacgacccgggcggaccatatccaagcgacacaagaattacgagcttatgctgcagctgcaattaggcatcatgcattccgtggggaagtcttcggctgtgccgatgcgagaactggaacagggagattttgatccaagggaaaatgctttgtcctggacagagttcccaccagagggttcgaaggccacactgccgcattcaactgggtacttctgctggaaggactactgccccatggtgttcaggcatttgaggaagttgtttgctgtggatacaggggattacatgctttcgatctgtggcaatgatcctctgagggagctgtcttcgcctgggaaaagcgggagcttcttttaccttacccaagacgaccaattcatgattaagacagtgaagaaatcagaagtcaagctgctacttaagatgttaaatagctactgcaaacatgtcgatcgatacaagaactcattaatcacgaggttctatggtgtacactgtgtgaagcgccataatggacagaaggtccgattcattgtcatgggtaatctgttctgttctgaataccagattcatcgccgttttgatttgaaaggttcatcatatggacgaacagcagacaagtttgaagatgagattgatgagacaactacactcaaggacttggacctcaattttgtcttccggttgcagaaatcttggtacaccgatctccatgaacaattgagacgagactgcgatttcttggaatcagaagggattatggattacagtttcttgataggaattcacttttgtgatgacatctctgcctcaaagatgggatcctctacttttactgcttctccaagtggtggcacaacagagctttgcttctcagatgatgcttttgatatggtacctgattgcagccggaaatctttgattagactgggcgcacacatgccaggccgggcagagcaagcatccagaaggagcggcgtcaaaaagcggctcgagcatagttacaagtcattgcagacagaccccaactcgatctctgccgtggaacccaagctctactcgaggaggtttcaagagttcatcggcagaattttcgtggaagatggctaacacgcattgggtacagattaaccggtggagcagcagctcatcggcggctaggtaactaaccgtgaagcctcgggtcagcggtgaaggggatctgagttcgaagcaaacttgccccgaattctctccgaaaaccattcgagtggctggatttttgaagcgcagccatgggatcggatggttttgtctgtaaattatgtgattggttcttccggctacattatagcagcagtttgtttgtcctccttaatttagttggaggtttttttatcttcaccccccccccccccccccccccttccccttctgtatatcggtccgatgtgaagaatcgggcagtgagttttgtttccagaaaggattatttaagggctttatagggtgcatgggattgatggacatataatccatggattatatgatacttacaaggcattatatgtcccttgatcccatccaatctgcatgtaaccaaagtcataaggctgcggcaggcagtgaataataagatcgtgtacagatacaccttgatcctgggaatgggtggattagaattcaattcagcgtcgtcatgacccgtgggtcccagatcacgg

SEQ ID NO: 10856 - DNA, 2881 bp, Zea Mays
gtaaaagccacccccctcgggcctcggcctctcgctcctcttccattgtataatcctcttccctcctccacccacttcacctggcacactagtggccactgcactggtagtagtagcccagtactggcaccgctctagcccagatcaaagctcgggagaagagggagaggaggtagtgcaacataaatcccgagtcccaccaaatcgcaagtcctagcagcttccggtctgcaactgcaacgccgcgggcttgagtgcgagagtgcgcgtgggggatgaggcgggtggcaccggcgatgaccgccgccagcagcgctgctggcggcgaggagacggcggtggtggagaagacgctgctcaacggggacgtctaccgcggcggctcgccgcacgggaagggcaggtacgtgtgggccgacggctgcatgtacgaggggaactggcggcggggcaaggcgtccgggaagggccgcttctcgtggccgtcgggcgccacgttcgaggggcagttccgcaggggccgcatcgacgggcagggcgtgttcgtcggcccagacggcgccacctaccgcggcgcgtgggtggcggaccgtcgccacggcctgggcaacaagacctacgccaacggggactgctacgagggccagtggcgccgcaacctccaggacggccacggccggtacgtctgggccaacggcaaccagtacatcggggagtggcgcgccggggtgctctccggccgcggcgcgcttatctgtgccaatggcagccgctacgacggcgtctgggagaacggcgtgcccaaagggtcaggggtcttcacgtggcccaccggcggctcctggcctgggagctcggtagacctgccggccatgagcgccactttcttcgcgcctcctggtgctgttgctgtgagtaggaggtcttctgtggagggcgtgggggacaaggcgaccccgcggatctgcatatgggagtcggagggcgaggctggagacattacctgcgacatcgtcgacgcgctcgaggcgtctatgcctatgctcttcaaggaagccgcggctatcgcgggtggagcaacttacatgcgatcagccagcggagtcccacgctgggcgtcggcggtggcaaccacgccgcagagtaaacgacccgggcggaccatatccaagcgacacaagaattacgagcttatgctgcagctgcaattaggcatcatgcattccgtggggaagtcttcggctgtgccgatgcgagaactggaacagggagattttgatccaagggaaaatgctttgtcctggacagagttcccaccagagggttcgaaggccacactgccgcattcaactgggtacttctgctggaaggactactgccccatggtgttcaggcatttgaggaagttgtttgctgtggatacaggggattacatgctttcgatctgtggcaatgatcctctgagggagctgtcttcgcctgggaaaagcgggagcttcttttaccttacccaagacgaccaattcatgattaagacagtgaagaaatcagaagtcaagctgctacttaagatgttaaatagctactgcaaacatgtcgatcgatacaagaactcattaatcacgaggttctatggtgtacactgtgtgaagcgccataatggacagaaggtccgattcattgtcatgggtaatctgttctgttctgaataccagattcatcgccgttttgatttgaaaggttcatcatatggacgaacagcagacaagtttgaagatgagattgatgagacaactacactcaaggacttggacctcaattttgtcttccggttgcagaaatcttggtacaccgatctccatgaacaattgagacgagactgcgatttcttggaatcagaagggattatggattacagtttcttgataggaattcacttttgtgatgacatctctgcctcaaagatgggatcctctacttttactgcttctccaaagcgtttaatcaagagtgaatcatttcaaggtggtggcacaacagagctttgcttctcagatgatgcttttgatatggtacctgattgcagccggaaatctttgattagactgggcgcacacatgccaggccgggcagagcaagcatccagaaggagcggcgtcaaaaagcggctcgagcatagttacaagtcattgcagacagaccccaactcgatctctgccgtggaacccaagctctactcgaggaggtttcaagagttcatcggcagaattttcgtggaagatggctaacacgcattgggtacagattaaccggtggagcagcagctcatcggcggctaggtaactaaccgtgaagcctcgggtcagcggtgaaggggatctgagttcgaagcaaacttgccccgaattctctccgaaaaccattcgagtggctggatttttgaagcgcagccatgggatcggatggttttgtctgtaaattatgtgattggttcttccggctacattatagcagcagtttgtttgtcctccttaatttagttggaggtttttttatcttcaccccccccccccccccccccccttccccttctgtatatcggtccgatgtgaagaatcgggcagtgagttttgtttccagaaaggattatttaagggctttatagggtgcatgggattgatggacatataatccatggattatatgatacttacaaggcattatatgtcccttgatcccatccaatctgcatgtaaccaaagtcataaggctgcggcaggcagtgaataataagatcgtgtacagatacaccttgatcctgggaatgggtggattagaattcaattcagcgtcgtcatgacccgtgggtcccagatcacgg

SEQ ID NO: 10857 - DNA, 1422 bp, Zea Mays
tatatacagatgacctcgaagtctccaacatgctgtaagaagccttgctgtgggcggacagaagaacagagaggaaagaggtaggtgtggcatactgccagtgggatacataaattataaactatgtcagctatatactgcaatacgaggaacaggcccagcagcattcatatgcagttccatgtactccagagctcagctatggtgctacattcatcagatagaagctgcagcggttttgtgaagtgaaccaaatgaagaagttacacttccatgggtagatgacagcaacacaaagcttaatgtatatatgttaattaaaatgatatatcctgtgcaatcacttattatttggtgcaatcatgctattaaaccatccaacggtttcatatgaaaggggttaatataaaataggtactaggttttagatgaaagaggttaaatataaaatagcagccactgttgaattttaatcggatgcactaggttgctagattgtatatgcttgcactaatatgattgattgcataggacatgactgctaggcgttgcttgtatcatgatatatagtagaccttctgaatcattgttttttgtttataacatatggcaccgatgatatttcgcttagtgaaagagtgtactaagcactagctagcagctgcttgttttttgtttatgccatatcgttttatccttttagatcttttccactactaacatttgaaagggatcggagtactaataatctactgataaatcatttgtgcttctcaacaacgaaatgaagaaatatacatcttgtgccagcatattattcatgtataggtaataatttgacattgttgtcggtttgtgtaacataaaactatgtatttctccgttcttctgcagattgagttgtttccttcggtggtccgcgctatatatactgcattcaagtgggggtgtgtgcaggcgcagctggtatcacgctcgtgtataggctggctgcagaacgcacagttcttcggcactgtgcgctgctcaatgtacgtattgatattgatgtgtggtacgtacgaatatgccttgttgcatagatacaacttctttggtcgtttttaatttttttttaaaattcaaagtactactacttcagaatgacaagactagatacatgtgcacacactgtttatcctaagccttgcggtacaacatgtgacctttgagatgtttcatggcgtggggtggattttaatcgatgtacaatttacgtgcacaacagttactattactgctagggcctgctgtcgcggtcacacgtcaactgcagttccttgttatggtagcgaagaggtggccaatgaaggactacgacataaagacaataggtgggctttcccacgcatcaccattgtttttttatttgtgaaattgcag

SEQ ID NO: 10858 - DNA, 1276 bp, Zea Mays
gtaaggtgcttgtcgactagttaacctactattgacatgataagaataccaataactctcaaactttgataaatgtctgtatggacaagctacacccggaaaatctgttaaaagattcaaatgtttggttctctacaacactatgcctgctttgcatcacataatgcaaatttgatctttgtcaaattatagtacccagccaattcaacactatatcatcatcatatgtaatatatggagccaagcatcagatttctcatgtgagagctcctagctaaccattacatatatatgacttagcctacaacgtccacatcatgcatgaaagtgctaggcaacttgtgcatttgttcgtatggtttaagattggaccaatcaatacttgactaattccttccctatctttttcaggtgaacgcctcagacaactcatgagttatgagataatttgtaacccatttacagttcggatttgactgccacgctaactgtttaagatctgttcaggagccctattaaggaaacttttatatacagatgacctcgaagtctccaacatgctgtaagaagccttgctgtgggcggacagaagaacagagaggaaagaggtaggtgtggcatactgccagtgggatacataaattataaactatgtcagctatatactgcaatacgaggaacaggcccagcagcattcatatgcagttccatgtactccagagctcagctatggtgctacattcatcagattgagttgtttccttcggtggtccgcgctatatatactgcattcaagtgggggtgtgtgcaggcgcagctggtatcacgctcgtgtataggctggctgcagaacgcacagttcttcggcactgtgcgctgctcaatgtacgtattgatattgatgtgtggtacgtacgaatatgccttgttgcatagatacaacttctttggtcgtttttaatttttttttaaaattcaaagtactactacttcagaatgacaagactagatacatgtgcacacactgtttatcctaagccttgcggtacaacatgtgacctttgagatgtttcatggcgtggggtggattttaatcgatgtacaatttacgtgcacaacagttactattactgctagggcctgctgtcgcggtcacacgtcaactgcagttccttgttatggtagcgaagaggtggccaatgaaggactacgacataaagacaataggtgggctttcccacgcatcaccattgtttttttatttgtgaaattgcag

SEQ ID NO: 10859 - DNA, 2377 bp, Zea Mays
aaaagttgtcctcatccagtcgtcctctttttatccaaagccaagcgaacgcgcgttgtggagggaatgcatttggtttggtcttcctttattttcttccatggagaagaaaggaatattttgcagcctttcgctacagcaactctgaatcatttcgtcgagaaagcaggaagcatcagtccgtcgagagtgcagtggtggtgggaaggagatcaatgtcaatcttctccaagcctccgggcagttggaggctgcgtgctacagcggcgtcgagttctagaccgtgccgacgttgatctgggcgatgcttaatgtaccggccgggtgaggcgatatggtgaggggtgaccgcgctggggtacgactacggactacggggaggcggagctccccaccgccggcgggtgcgccttctcgccatgaaatgcactgggaacagctcgcttgggacgcgattagctccccggccaacgcagcgaggccaatcccgcaacgctcctcgatctcaaggacgctggtgaacgcctcagacaactcatgagttatgagataatttgtaacccatttacagttcggatttgactgccacgctaactgtttaagatctgttcaggagccctattaaggaaacttttatatacagatgacctcgaagtctccaacatgctgtaagaagccttgctgtgggcggacagaagaacagagaggaaagaggtaggtgtggcatactgccagtgggatacataaattataaactatgtcagctatatactgcaatacgaggaacaggcccagcagcattcatatgcagttccatgtactccagagctcagctatggtgctacattcatcaggtcagatatgtatcgtactgctatttttgttctgaaaaaacctctggtactacattgctcaggtcagatatgtatggtactgctatttttttccggatacccttggacagctgtatgccttttgagcagctataacaggagtatgtcggattacttacccttggacggcagcttggaacttcaacctgatctgagcagtcagctggctttgcaaaactgagttgattgagtatttataataatggtcatggccaatgccaaggcattaacaactttcggcttataccaaacgtgctgagaactaacttattccgactcaagatagaagctgcagcggttttgtgaagtgaaccaaatgaagaagttacacttccatgggtagatgacagcaacacaaagcttaatgtatatatgttaattaaaatgatatatcctgtgcaatcacttattatttggtgcaatcatgctattaaaccatccaacggtttcatatgaaaggggttaatataaaataggtactaggttttagatgaaagaggttaaatataaaatagcagccactgttgaattttaatcggatgcactaggttgctagattgtatatgcttgcactaatatgattgattgcataggacatgactgctaggcgttgcttgtatcatgatatatagtagaccttctgaatcattgttttttgtttataacatatggcaccgatgatatttcgcttagtgaaagagtgtactaagcactagctagcagctgcttgttttttgtttatgccatatcgttttatccttttagatcttttccactactaacatttgaaagggatcggagtactaataatctactgataaatcatttgtgcttctcaacaacgaaatgaagaaatatacatcttgtgccagcatattattcatgtataggtaataatttgacattgttgtcggtttgtgtaacataaaactatgtatttctccgttcttctgcagattgagttgtttccttcggtggtccgcgctatatatactgcattcaagtgggggtgtgtgcaggcgcagctggtatcacgctcgtgtataggctggctgcagaacgcacagttcttcggcactgtgcgctgctcaatgtacgtattgatattgatgtgtggtacgtacgaatatgccttgttgcatagatacaacttctttggtcgtttttaatttttttttaaaattcaaagtactactacttcagaatgacaagactagatacatgtgcacacactgtttatcctaagccttgcggtacaacatgtgacctttgagatgtttcatggcgtggggtggattttaatcgatgtacaatttacgtgcacaacagttactattactgctagggcctgctgtcgcggtcacacgtcaactgcagttccttgttatggtagcgaagaggtggccaatgaaggactacgacataaagacaataggtgggctttcccacgcatcaccattgtttttttatttgtgaaattgcag

SEQ ID NO: 10860 - DNA, 1382 bp, Zea Mays
aaaagttgtcctcatccagtcgtcctctttttatccaaagccaagcgaacgcgcgttgtggagggaatgcatttggtttggtcttcctttattttcttccatggagaagaaaggaatattttgcagcctttcgctacagcaactctgaatcatttcgtcgagaaagcaggaagcatcagtccgtcgagagtgcagtggtggtgggaaggagatcaatgtcaatcttctccaagcctccgggcagttggaggctgcgtgctacagcggcgtcgagttctagaccgtgccgacgttgatctgggcgatgcttaatgtaccggccgggtgaggcgatatggtgaggggtgaccgcgctggggtacgactacggactacggggaggcggagctccccaccgccggcgggtgcgccttctcgccatgaaatgcactgggaacagctcgcttgggacgcgattagctccccggccaacgcagcgaggccaatcccgcaacgctcctcgatctcaaggacgctggtgaacgcctcagacaactcatgagttatgagataatttgtaacccatttacagttcggatttgactgccacgctaactgtttaagatctgttcaggagccctattaaggaaacttttatatacagatgacctcgaagtctccaacatgctgtaagaagccttgctgtgggcggacagaagaacagagaggaaagaggtaggtgtggcatactgccagtgggatacataaattataaactatgtcagctatatactgcaatacgaggaacaggcccagcagcattcatatgcagttccatgtactccagagctcagctatggtgctacattcatcagattgagttgtttccttcggtggtccgcgctatatatactgcattcaagtgggggtgtgtgcaggcgcagctggtatcacgctcgtgtataggctggctgcagaacgcacagttcttcggcactgtgcgctgctcaatgtacgtattgatattgatgtgtggtacgtacgaatatgccttgttgcatagatacaacttctttggtcgtttttaatttttttttaaaattcaaagtactactacttcagaatgacaagactagatacatgtgcacacactgtttatcctaagccttgcggtacaacatgtgacctttgagatgtttcatggcgtggggtggattttaatcgatgtacaatttacgtgcacaacagttactattactgctagggcctgctgtcgcggtcacacgtcaactgcagttccttgttatggtagcgaagaggtggccaatgaaggactacgacataaagacaataggtgggctttcccacgcatcaccattgtttttttatttgtgaaattgcag

SEQ ID NO: 10861 - DNA, 669 bp, Zea Mays
aaaagttgtcctcatccagtcgtcctctttttatccaaagccaagcgaacgcgcgttgtggagggaatgcatttggtttggtcttcctttattttcttccatggagaagaaaggaatattttgcagcctttcgctacagcaactctgaatcatttcgtcgagaaagcaggaagcatcagtccgtcgagagtgcagtggtggtgggaaggagatcaatgtcaatcttctccaagcctccgggcagttggaggctgcgtgctacagcggcgtcgagttctagaccgtgccgacgttgatctgggcgatgcttaatgtaccggccgggtgaggcgatatggtgaggggtgaccgcgctggggtacgactacggactacggggaggcggagctccccaccgccggcgggtgcgccttctcgccatgaaatgcactgggaacagctcgcttgggacgcgattagctccccggccaacgcagcgaggccaatcccgcaacgctcctcgatctcaaggacgctggtgaggttaccgtcaaattccctcctctacatccaacccattggtgaacgcctcagacaactcatgagttatgagataatttgtaacccatttacagttcggatttgactgccacgctaactgtttaagatctgttcaggagccctattaag

SEQ ID NO: 10862 - DNA, 2352 bp, Zea Mays
ccgatccctctccttctctccttctctgacccgacccgaccaatccaatccatcccctctccatctcccatgaccatgaacagcggctcggcaatatactactgctaggttatgctactccattacgaaaaagcgcagagagaacgcagaatggaatcgtcgctcttatcatactccatgactccatcactagactagagagagaaacccttgtaccctttgttctgtttatcccccatttctccgagtcacccacccatcgccgaacttcgagtccaaggaagcggagccaccggagaaggggatatttgcctttcccgtcggggggtctagggagcaggagagatgcagcggcggcgggggcacacgtgggcgggggtggggaagacggcccaggcggcgtcggcgcacgccgcgctcttctgcttcactctcctcctcgcgctcagggtcgacggacgcaccacatactcctggtggataatattcattccactatggctctttcatggtattgttgcgcgtggaaggttttcaatgcctgccccttcattacctcatggccgtcattgggcaccatgtcattcgattgttgcagcgcctttactaattgcgttcgagctgcttctctgcatatatcttgaaagcataagagttagaaatcatccatcttttgatctgaagattgtgttccttcctctgttggcctttgaagcaattatccttattgacaattttagaatgtgtagagctttaatgcctggagatgaagaaagcatgagtgatgaagctatttgggagacgcttcctcatttttgggttgcaatttcaatggtgtttcttatagctgctacaacattcacccttctcaagctgtctggtgatgttggtgctttgggctggtgggatttgtttataaattatgggattgcggaatgctttgcatttcttgtctgtacaagatggtttaatcccatgattcataagtcccccactcatggggaggctagctcatcatcagcggcaattaggtaccgtgattgggaaagtggtcttgtcctcccatcactagaagatcacgaacaagagaagctttgtggtctacctgacattgggggccatgtaatgaaaatacctcttgtggctttccaagtattgctttgtatgcggttggagggcacaccaccaagcgctcgctacatcccaatatttgctcttttctcgccactatttattctgcaaggcttcttggttggtggtctattgatgaagggagcaaggaagaacaagcccggttattttatactgaatctactgggtacaataccttttgtggctatccgccagaggtggttaggaaaatgcctaaaaaggaccttgcagaagaggtttggaggctacaggcagctttgggagaacaatctgaaatcaccaagtgtaccaaacaggaatatgaaaggcttcaaaatgagaaggttctttgtaggatttgttatgagggggagatatgcatggtgctacttccctgccggcacagaactttatgcaaatcttgtgctgagaaatgcaagaagtgtccaatctgccgtgtgccaattgaagagcgcatgcctgtatatgatgtttaaacctcactaactcagcttaacaatacaaatttgtgcatgtgggttctgtcatgctgtgcatttagtctcgatcacaactttaagctgattgaggtttgcacttcagaaagggtctgcaatatatgggggaaatacaagtatatcatgtctaaccaaaagcatggatatgtggttgatgagcattgtcgttttggaccagttatctactgtaagtatgtggtcagtgtatttcccttccctcttgtgattggtagatgagtcagatagtcttgttcgcgtagcagcattttctcagggatatgcagttgttgagaagaaagtgaaacaaaaacagactgtaaataaaaacactgccttgtttgaatctagtccttgtttgagaagaaagtggaacaaaaaaaatgtaaacatctctgttgtattattttgtagtagaaaaatgtctgccgaaatttgtgaccgcaatgcttcgtcggcggcttggtggcttttcacaatgtgaagggtcagcgagagcatgtaagggttgtggaagcgtgcctggacaagaaaactcgtgtccgatctttgaccaagaatcacgggagatatgatttcaagccgtactgaggcgattggaaccaattttatgtatgtttgcgatactgtggacttatgtctcttttttttttaaaaaaaagagtacaattctaacatagcgctcgtcaaactattttaagttcca

SEQ ID NO: 10863 - DNA, 2403 bp, Zea Mays
ccgatccctctccttctctccttctctgacccgacccgaccaatccaatccatcccctctccatctcccatgaccatgaacagcggctcggcaatatactactgctaggttatgctactccattacgaaaaagcgcagagagaacgcagaatggaatcgtcgctcttatcatactccatgactccatcactagactagagagagaaacccttgtaccctttgttctgtttatcccccatttctccgagtcacccacccatcgccgaacttcgagtccaaggaagcggagccaccggagaaggggatatttgcctttcccgtcggggggtctagggagcaggagagatgcagcggcggcgggggcacacgtgggcgggggtggggaagacggcccaggcggcgtcggcgcacgccgcgctcttctgcttcactctcctcctcgcgctcagggtcgacggacgcaccacatactcctggtggataatattcattccactatggctctttcatggtattgttgcgcgtggaaggttttcaatgcctgccccttcattacctcatggccgtcattgggcaccatgtcattcgattgttgcagcgcctttactaattgcgttcgagctgcttctctgcatatatcttgaaagcataagagttagaaatcatccatcttttgatctgaagattgtgttccttcctctgttggcctttgaagcaattatccttattgacaattttagaatgtgtagagctttaatgcctggagatgaagaaagcatgagtgatgaagctatttgggagacgcttcctcatttttgggttgcaatttcaatggtgtttcttatagctgctacaacattcacccttctcaagctgtctggtgatgttggtgctttgggctggtgggatttgtttataaattatgggattgcggaatgctttgcatttcttgtctgtacaagatggtttaatcccatgattcataagtcccccactcatggggaggctagctcatcatcagcggcaattaggtaccgtgattgggaaagtggtcttgtcctcccatcactagaagatcacgaacaagagaagctttgtggtctacctgacattgggggccatgtaatgaaaatacctcttgtggctttccaagtattgctttgtatgcggttggagggcacaccaccaagcgctcgctacatcccaatatttgctcttttctcgccactatttattctgcaaggtcctcatcaaaagttcgcgattgctttgcttttcttcatcatggttcaaggcttcttggttggtggtctattgatgaagggagcaaggaagaacaagcccggttattttatactgaatctactgggtacaataccttttgtggctatccgccagaggtggttaggaaaatgcctaaaaaggaccttgcagaagaggtttggaggctacaggcagctttgggagaacaatctgaaatcaccaagtgtaccaaacaggaatatgaaaggcttcaaaatgagaaggttctttgtaggatttgttatgagggggagatatgcatggtgctacttccctgccggcacagaactttatgcaaatcttgtgctgagaaatgcaagaagtgtccaatctgccgtgtgccaattgaagagcgcatgcctgtatatgatgtttaaacctcactaactcagcttaacaatacaaatttgtgcatgtgggttctgtcatgctgtgcatttagtctcgatcacaactttaagctgattgaggtttgcacttcagaaagggtctgcaatatatgggggaaatacaagtatatcatgtctaaccaaaagcatggatatgtggttgatgagcattgtcgttttggaccagttatctactgtaagtatgtggtcagtgtatttcccttccctcttgtgattggtagatgagtcagatagtcttgttcgcgtagcagcattttctcagggatatgcagttgttgagaagaaagtgaaacaaaaacagactgtaaataaaaacactgccttgtttgaatctagtccttgtttgagaagaaagtggaacaaaaaaaatgtaaacatctctgttgtattattttgtagtagaaaaatgtctgccgaaatttgtgaccgcaatgcttcgtcggcggcttggtggcttttcacaatgtgaagggtcagcgagagcatgtaagggttgtggaagcgtgcctggacaagaaaactcgtgtccgatctttgaccaagaatcacgggagatatgatttcaagccgtactgaggcgattggaaccaattttatgtatgtttgcgatactgtggacttatgtctcttttttttttaaaaaaaagagtacaattctaacatagcgctcgtcaaactattttaagttcca

SEQ ID NO: 10864 - DNA, 2309 bp, Zea Mays
gtcagtctcaaacaccaggcgcgcgttgttggcccccgggacccgatccctctccttctctccttctctgacccgacccgaccaatccaatccatcccctctccatctcccatgaccatgaacagcggctcggcaatatactactgctaggttatgctactccattacgaaaaagcgcagagagaacgcagaatggaatcgtcgctcttatcatactccatgactccatcactagactagagagagaaacccttgtaccctttgttctgtttatcccccatttctccgagtcacccacccatcgccgaacttcgagtccaaggaagcggagccaccggagaaggggatatttgcctttcccgtcggggggtctagggagcaggagagatgcagcggcggcgggggcacacgtgggcgggggtggggaagacggcccaggcggcgtcggcgcacgccgcgctcttctgcttcactctcctcctcgcgctcagggtcgacggacgcaccacatactcctggtggataatattcattccactatggctctttcatggtattgttgcgcgtggaaggttttcaatgcctgccccttcattacctcatggccgtcattgggcaccatgtcattcgattgttgcagcgcctttactaattgcgttcgagctgcttctctgcatatatcttgaaagcataagagttagaaatcatccatcttttgatctgaagattgtgttccttcctctgttggcctttgaagcaattatccttattgacaattttagaatgtgtagagctttaatgcctggagatgaagaaagcatgagtgatgaagctatttgggagacgcttcctcatttttgggttgcaatttcaatggtgtttcttatagctgctacaacattcacccttctcaagctgtctggtgatgttggtgctttgggctggtgggatttgtttataaattatgggattgcggaatgctttgcatttcttgtctgtacaagatggtttaatcccatgattcataagtcccccactcatggggaggctagctcatcatcagcggcaattaggtaccgtgattgggaaagtggtcttgtcctcccatcactagaagatcacgaacaagagaagctttgtggtctacctgacattgggggccatgtaatgaaaatacctcttgtggctttccaagtattgctttgtatgcggttggagggcacaccaccaagcgctcgctacatcccaatatttgctcttttctcgccactatttattctgcaaggtgctggtgttcttttctctctagcaagattagtggagaaggttgttctgctattgcgtaatggaccagttagtcctaattaccttacagcctcatcaaaagttcgcgattgctttgcttttcttcatcatggttcaaggcttcttggttggtggtctattgatgaagggagcaaggaagaacaagcccggttattttatactgaatctactgggtacaataccttttgtggctatccgccagaggtggttaggaaaatgcctaaaaaggaccttgcagaagaggtttggaggctacaggcagctttgggagaacaatctgaaatcaccaagtgtaccaaacaggaatatgaaaggcttcaaaatgagaaggttctttgtaggatttgttatgagggggagatatgcatggtgctacttccctgccggcacagaactttatgcaaatcttgtgctgagaaatgcaagaagtgtccaatctgccgtgtgccaattgaagagcgcatgcctgtatatgatgtttaaacctcactaactcagcttaacaatacaaatttgtgcatgtgggttctgtcatgctgtgcatttagtctcgatcacaactttaagctgattgaggtttgcacttcagaaagggtctgcaatatatgggggaaatacaagtatatcatgtctaaccaaaagcatggatatgtggttgatgagcattgtcgttttggaccagttatctacttagaaaaatgtctgccgaaatttgtgaccgcaatgcttcgtcggcggcttggtggcttttcacaatgtgaagggtcagcgagagcatgtaagggttgtggaagcgtgcctggacaagaaaactcgtgtccgatctttgaccaagaatcacgggagatatgatttcaagccgtactgaggcgattggaaccaattttatgtatgtttgcgatactgtggacttatgtctcttttttttttaaaaaaaagagtacaattctaacatagcgctcgtcaaactattttaagttcca

SEQ ID NO: 10865 - DNA, 2022 bp, Zea Mays
gtcagtctcaaacaccaggcgcgcgttgttggcccccgggacccgatccctctccttctctccttctctgacccgacccgaccaatccaatccatcccctctccatctcccatgaccatgaacagcggctcggcaatatactactgctaggttatgctactccattacgaaaaagcgcagagagaacgcagaatggaatcgtcgctcttatcatactccatgactccatcactagactagagagagaaacccttgtaccctttgttctgtttatcccccatttctccgagtcacccacccatcgccgaacttcgagtccaaggaagcggagccaccggagaaggggatatttgcctttcccgtcggggggtctagggagcaggagagatgcagcggcggcgggggcacacgtgggcgggggtggggaagacggcccaggcggcgtcggcgcacgccgcgctcttctgcttcactctcctcctcgcgctcagggtcgacggacgcaccacatactcctggtggataatattcattccactatggctctttcatggtattgttgcgcgtggaaggttttcaatgcctgccccttcattacctcatggccgtcattgggcaccatgtcattcgattgttgcagcgcctttactaattgcgttcgagctgcttctctgcatatatcttgaaagcataagagttagaaatcatccatcttttgatctgaagattgtgttccttcctctgttggcctttgaagcaattatccttattgacaattttagaatgtgtagagctttaatgcctggagatgaagaaagcatgagtgatgaagctatttgggagacgcttcctcatttttgggttgcaatttcaatggtgtttcttatagctgctacaacattcacccttctcaagctgtctggtgatgttggtgctttgggctggtgggatttgtttataaattatgggattgcggaatgctttgcatttcttgtctgtacaagatggtttaatcccatgattcataagtcccccactcatggggaggctagctcatcatcagcggcaattaggtaccgtgattgggaaagtggtcttgtcctcccatcactagaagatcacgaacaagagaagctttgtggtctacctgacattgggggccatgtaatgaaaatacctcttgtggctttccaagtattgctttgtatgcggttggagggcacaccaccaagcgctcgctacatcccaatatttgctcttttctcgccactatttattctgcaaggtgctggtgttcttttctctctagcaagattagtggagaaggttgttctgctattgcgtaatggaccagttagtcctaattaccttacagcctcatcaaaagttcgcgattgctttgcttttcttcatcatggttcaaggcttcttggttggtggtctattgatgaagggagcaaggaagaacaagcccggttattttatactgaatctactgggtacaataccttttgtggctatccgccagaggtggttaggaaaatgcctaaaaaggaccttgcagaagaggtttggaggctacaggcagctttgggagaacaatctgaaatcaccaagtgtaccaaacaggaatatgaaaggcttcaaaatgagaaggttctttgtaggatttgttatgagggggagatatgcatggtgctacttccctgccggcacagaactttatgcaatagaaaaatgtctgccgaaatttgtgaccgcaatgcttcgtcggcggcttggtggcttttcacaatgtgaagggtcagcgagagcatgtaagggttgtggaagcgtgcctggacaagaaaactcgtgtccgatctttgaccaagaatcacgggagatatgatttcaagccgtactgaggcgattggaaccaattttatgtatgtttgcgatactgtggacttatgtctcttttttttttaaaaaaaagagtacaattctaacatagcgctcgtcaaactattttaagttcca

SEQ ID NO: 10866 - DNA, 1597 bp, Zea Mays
tagcattcaggccttcgcatgctgtggtttccaatagtggtgtcattcctgttgcacctagcctggacactataggttggtttgcaaaggatccaagtgttttgcatcgtgttgggcatcttcttcttagacttccttatgctggtattcgccaaccgagaattttttacatagcagatgattgctttgatctttcaaagatacctgctaggagacttactcaggtggtgacaaaatctgtggagaagctctttggaagcaggaattcaaagataagcatatggagtggataaattcagttaagcctgctgtggatgcacgcatagtcagtgatttgtctgaggatggtgattcagatattgatggctgccaaaatgtgaggaaagaagcgcgctctgctctaagtggacttcttaaggatgatgggattctggtgattccaactgctttggggtgccccccgaagcttaacgctaaggaactctcgtctgaaagctacaattctcagacactacgccttttgtctttagctagcatgtcagggtgttgccaggtttccattcctttgggtacacatgataagtgccccatttcagtttcgttgattgctaggcatggtggtgatcggtttttgttggacaccacacaaaccatgtatacaaccatccaagagcaagtggagatactagcgaaatctagtgtttcaagtaaacaggcgatgaatgaagaagcagctgaagctgctaaagagaaaggtaatgctgcatttaaggaaaaacaatggcaaaaggcagtaaatttctacactgaagcaataaagttaaatggaaaagtggctacatactacagcaacagagctgctgcctttctagaactaactagctaccgtcaggctgaggcagattgcacaagtgccatcgaacttgattccaagagcgtgaaagcttatttacggagaggcactgcaagggagatgctaggttattataaggaggccgttgatgatttcaaccacgcccttgttctagaaccaatgaacaagacggctggtgttgccatcaacaggttaaagaagctgtttccttgaatatgaagctgcatgaagatatgataacctcatattttgtgcacacacaaggggtgggattgaagtacctgagttcaaccgacggatgctgatcacagtttgagctagtgggaacggatttcaacactgagatcaggttaagggtcaatttagcggtttctctccccacccaaagttttggaaaagcaaaataaagaaggttttttgggaaccggaaagcagtttacgggtgtccgccatccccaccatgtataatatagtttcgccaattatttgttcagacgctttgccaatcgaactttttctgccatgcttacctgtacccatctctccttgccgttctgagcggcagcttttttgcgggctcgctctgaaaacggctgccaccagtgaggtcgctcgtggaggctgttaggcggccatgtgctgacgcgcagtcgcttcgccggctgaacctttcagccctttcagtttcggttgtttgctagttgctgtcagcgtcactgaaat

SEQ ID NO: 10867 - DNA, 1637 bp, Zea Mays
tagcattcaggccttcgcatgctgtggtttccaatagtggtgtcattcctgttgcacctagcctggacactatagatgattgctttgatctttcaaagatacctgctaggagacttactcaggtggtgacaaaatctgtggagaagctctttggaagacaagtccggcatgtgaatctcgaaaattatttgagttcaagaatatccagcctgggtaactattcaaatgggcataagaatggggattcaaagttccctctgttgctagcactttgtaactccatgatatcacttcacaagcaggaattcaaagataagcatatggagtggataaattcagttaagcctgctgtggatgcacgcatagtcagtgatttgtctgaggatggtgattcagatattgatggctgccaaaatgtgaggaaagaagcgcgctctgctctaagtggacttcttaaggatgatgggattctggtgattccaactgctttggggtgccccccgaagcttaacgctaaggaactctcgtctgaaagctacaattctcagacactacgccttttgtctttagctagcatgtcagggtgttgccaggtttccattcctttgggtacacatgataagtgccccatttcagtttcgttgattgctaggcatggtggtgatcggtttttgttggacaccacacaaaccatgtatacaaccatccaagagcaagtggagatactagcgaaatctagtgtttcaagtaaacaggcgatgaatgaagaagcagctgaagctgctaaagagaaaggtaatgctgcatttaaggaaaaacaatggcaaaaggcagtaaatttctacactgaagcaataaagttaaatggaaaagtggctacatactacagcaacagagctgctgcctttctagaactaactagctaccgtcaggctgaggcagattgcacaagtgccatcgaacttgattccaagagcgtgaaagcttatttacggagaggcactgcaagggagatgctaggttattataaggaggccgttgatgatttcaaccacgcccttgttctagaaccaatgaacaagacggctggtgttgccatcaacaggttaaagaagctgtttccttgaatatgaagctgcatgaagatatgataacctcatattttgtgcacacacaaggggtgggattgaagtacctgagttcaaccgacggatgctgatcacagtttgagctagtgggaacggatttcaacactgagatcaggttaagggtcaatttagcggtttctctccccacccaaagttttggaaaagcaaaataaagaaggttttttgggaaccggaaagcagtttacgggtgtccgccatccccaccatgtataatatagtttcgccaattatttgttcagacgctttgccaatcgaactttttctgccatgcttacctgtacccatctctccttgccgttctgagcggcagcttttttgcgggctcgctctgaaaacggctgccaccagtgaggtcgctcgtggaggctgttaggcggccatgtgctgacgcgcagtcgcttcgccggctgaacctttcagccctttcagtttcggttgtttgctagttgctgtcagcgtcactgaaat

SEQ ID NO: 10868 - DNA, 1737 bp, Zea Mays
  misc_feature (1)..(2): n is a, c, g, or t
nntagcattcaggccttcgcatgctgtggtttccaatagtggtgtcattcctgttgcacctagcctggacactataggttggtttgcaaaggatccaagtgttttgcatcgtgttgggcatcttcttcttagacttccttatgctggtattcgccaaccgagaattttttacatagcagatgattgctttgatctttcaaagatacctgctaggagacttactcaggtggtgacaaaatctgtggagaagctctttggaagacaagtccggcatgtgaatctcgaaaattatttgagttcaagaatatccagcctgggtaactattcaaatgggcataagaatggggattcaaagttccctctgttgctagcactttgtaactccatgatatcacttcacaagaattcaaagataagcatatggagtggataaattcagttaagcctgctgtggatgcacgcatagtcagtgatttgtctgaggatggtgattcagatattgatggctgccaaaatgtgaggaaagaagcgcgctctgctctaagtggacttcttaaggatgatgggattctggtgattccaactgctttggggtgccccccgaagcttaacgctaaggaactctcgtctgaaagctacaattctcagacactacgccttttgtctttagctagcatgtcagggtgttgccaggtttccattcctttgggtacacatgataagtgccccatttcagtttcgttgattgctaggcatggtggtgatcggtttttgttggacaccacacaaaccatgtatacaaccatccaagagcaagtggagatactagcgaaatctagtgtttcaagtaaacaggcgatgaatgaagaagcagctgaagctgctaaagagaaaggtaatgctgcatttaaggaaaaacaatggcaaaaggcagtaaatttctacactgaagcaataaagttaaatggaaaagtggctacatactacagcaacagagctgctgcctttctagaactaactagctaccgtcaggctgaggcagattgcacaagtgccatcgaacttgattccaagagcgtgaaagcttatttacggagaggcactgcaagggagatgctaggttattataaggaggccgttgatgatttcaaccacgcccttgttctagaaccaatgaacaagacggctggtgttgccatcaacaggttaaagaagctgtttccttgaatatgaagctgcatgaagatatgataacctcatattttgtgcacacacaaggggtgggattgaagtacctgagttcaaccgacggatgctgatcacagtttgagctagtgggaacggatttcaacactgagatcaggttaagggtcaatttagcggtttctctccccacccaaagttttggaaaagcaaaataaagaaggttttttgggaaccggaaagcagtttacgggtgtccgccatccccaccatgtataatatagtttcgccaattatttgttcagacgctttgccaatcgaactttttctgccatgcttacctgtacccatctctccttgccgttctgagcggcagcttttttgcgggctcgctctgaaaacggctgccaccagtgaggtcgctcgtggaggctgttaggcggccatgtgctgacgcgcagtcgcttcgccggctgaacctttcagccctttcagtttcggttgtttgctagttgctgtcagcgtcactgaaat

SEQ ID NO: 10869 - DNA, 1126 bp, Zea Mays
cttggactatgtgcaaatagctgtacttcattcaccgacttattttagtgtttttgtagataaaaggcatatggagatgatggatgcttgaaacagccgaaagaactttcaattaataaagttgggcatgcattacatgaacttgatccggtgttcaaaaagttttctttctcagagagtgttgcaagcttgttctcttctttaggctacaagaggcctgcagtcattcaatctatgtacatatttaagcaaccaggtattggtggtgaggtcgtgccgcaccaggataatacattcctttacacggaacctcgtacatgcacagggctgtggcttgcacttgaagatgcaacaatcaacaatggttgcctgtgggcaattccaggatcacataaaaagggtttggtgagacgtatggtcagagatgaaaatggtacacattttgatcggccctccccagtctatgatcagaaagaatttgtaccgctggaagtaaaatctggtgctttggtggttatacatggagatcttatacatcagagttttgagaacctttctccagcgtcaagacatgcattcagcttacatgtagtggatactgaaggatgtaaatggtccgaagacaactggatacaaaggaaaacggcccctgaaccgctctatgtgtcttagcaaaaccagtaactagtgccgtaaaacaatagagattcccagcaagtgatttgtggatcgcttctctgcacaataaaatgggggaatcaagctgcgccatgctgtttccgtttcacctgtaaacatatgagggcttgttcggttatttccaatacacatggattggatgggattgaaaaaaattgagaagaagtttgacttgtttgggattcaaactcattcaatcccactcaatccacatggattgagagctaaccgaacaagccctaaactgtaaatactattgctactgtaataccataaaaaatctctctcggctgggtaggagaaagactgcctctacgatattatattaaaaagaagctcaatcggagtcctaactgagaatgtctactaaatgtgtcatcccatgcagcaggagagttcgtccctataggtcagatctttactcgtg

SEQ ID NO: 10870 - DNA, 1290 bp, Zea Mays
cttgtccgcactcaggcctattctctcgtcctcgcgctcctgggtacctcgtgatggactcgttctcgagcgcggaggaggtgcgggagatgcgggaccgcatggccgaccttgtcgctgggttcgatggcgccaactccgcggtgttctccaccaaggatcatcggcagttaaaggacgactacttctttaagagtgctgagaatatctcattcttctttgaggaaaaggcatatggagatgatggatgcttgaaacagccgaaagaactttcaattaataaagttgggcatgcattacatgaacttgatccggtgttcaaaaagttttctttctcagagagtgttgcaagcttgttctcttctttaggctacaagaggcctgcagtcattcaatctatgtacatatttaagcaaccaggtattggtggtgaggtcgtgccgcaccaggataatacattcctttacacggaacctcgtacatgcacagggctgtggcttgcacttgaagatgcaacaatcaacaatggttgcctgtgggcaattccaggatcacataaaaagggtttggtgagacgtatggtcagagatgaaaatggtacacattttgatcggccctccccagtctatgatcagaaagaatttgtaccgctggaagtaaaatctggtgctttggtggttatacatggagatcttatacatcagagttttgagaacctttctccagcgtcaagacatgcattcagcttacatgtagtggatactgaaggatgtaaatggtccgaagacaactggatacaaaggaaaacggcccctgaaccgctctatgtgtcttagcaaaaccagtaactagtgccgtaaaacaatagagattcccagcaagtgatttgtggatcgcttctctgcacaataaaatgggggaatcaagctgcgccatgctgtttccgtttcacctgtaaacatatgagggcttgttcggttatttccaatacacatggattggatgggattgaaaaaaattgagaagaagtttgacttgtttgggattcaaactcattcaatcccactcaatccacatggattgagagctaaccgaacaagccctaaactgtaaatactattgctactgtaataccataaaaaatctctctcggctgggtaggagaaagactgcctctacgatattatattaaaaagaagctcaatcggagtcctaactgagaatgtctactaaatgtgtcatcccatgcagcaggagagttcgtccctataggtcagatctttactcgtg

SEQ ID NO: 10871 - DNA, 1229 bp, Zea Mays
cttgtccgcactcaggcctattctctcgtcctcgcgctcctgggtacctcgtgatggactcgttctcgagcgcggaggaggtgcgggagatgcgggaccgcatggccgaccttgtcgctgggttcgatggcgccaactccgcggtgttctccaccaaggatcataaaaggcatatggagatgatggatgcttgaaacagccgaaagaactttcaattaataaagttgggcatgcattacatgaacttgatccggtgttcaaaaagttttctttctcagagagtgttgcaagcttgttctcttctttaggctacaagaggcctgcagtcattcaatctatgtacatatttaagcaaccaggtattggtggtgaggtcgtgccgcaccaggataatacattcctttacacggaacctcgtacatgcacagggctgtggcttgcacttgaagatgcaacaatcaacaatggttgcctgtgggcaattccaggatcacataaaaagggtttggtgagacgtatggtcagagatgaaaatggtacacattttgatcggccctccccagtctatgatcagaaagaatttgtaccgctggaagtaaaatctggtgctttggtggttatacatggagatcttatacatcagagttttgagaacctttctccagcgtcaagacatgcattcagcttacatgtagtggatactgaaggatgtaaatggtccgaagacaactggatacaaaggaaaacggcccctgaaccgctctatgtgtcttagcaaaaccagtaactagtgccgtaaaacaatagagattcccagcaagtgatttgtggatcgcttctctgcacaataaaatgggggaatcaagctgcgccatgctgtttccgtttcacctgtaaacatatgagggcttgttcggttatttccaatacacatggattggatgggattgaaaaaaattgagaagaagtttgacttgtttgggattcaaactcattcaatcccactcaatccacatggattgagagctaaccgaacaagccctaaactgtaaatactattgctactgtaataccataaaaaatctctctcggctgggtaggagaaagactgcctctacgatattatattaaaaagaagctcaatcggagtcctaactgagaatgtctactaaatgtgtcatcccatgcagcaggagagttcgtccctataggtcagatctttactcgtg

SEQ ID NO: 10872 - DNA, 1289 bp, Zea Mays
gtcatatgtaccaacggtccaaccccaagcagcgtctcgagaagaagttccgtacccttcactccactattccggtcaacccatccctttcctccgcctccgcttccgcgtccgcccgccgctatgccgccagccagtagcctcaccgccgaccagctcagcttcttcgaggccaatgggtacctcgtgatggactcgttctcgagcgcggaggaggtgcgggagatgcgggaccgcatggccgaccttgtcgctgggttcgatggcgccaactccgcggtgttctccaccaaggatcatcggcagttaaaggacgactacttctttaagagtgctgagaatatctcattcttctttgaggaaaaggcatatggagatgatggatgcttgaaacagccgaaagaactttcaattaataaagttgggcatgcattacatgaacttgatccggtgttcaaaaagttttctttctcagagagtgttgcaagcttgttctcttctttaggctacaagaggcctgcagtcattcaatctatgtacatatttaagcaaccaggtattggtggtgaggtcgtgccgcaccaggataatacattcctttacacggaacctcgtacatgcacagggctgtggcttgcacttgaagatgcaacaatcaacaatggttgcctgtgggcaattccaggatcacataaaaagggtttggtgagacgtatggtcagagatgaaaatggtacacattttgatcggccctccccagtctatgatcagaaagaatttgtaccgctggaagtaaaatctggtgctttggtggttatacatggagatcttatacatcagagttttgagaacctttctccagcgtcaagacatgcattcagcttacatgtagtggatactgaaggatgtaaatggtccgaagacaactggatacaaaggaaaacggcccctgaaccgctctatgtgtcttagcaaaaccagtaactagtgccgtaaaacaatagagattcccagcaagtgatttgtggatcgcttctctgcacaataaaatgggggaatcaagctgcgccatgctgtttccgtttcacctgtaaacaagccctaaactgtaaatactattgctactgtaataccataaaaaatctctctcggctgggtaggagaaagactgcctctacgatattatattaaaaagaagctcaatcggagtcctaactgagaatgtctactaaatgtgtcatcccatgcagcaggagagttcgtccctataggtcagatctttactcgtg

SEQ ID NO: 10873 - DNA, 1810 bp, Zea Mays
atttgcttgcaaccgaacaacatcgggtccatattgtcatatgtaccaacggtccaaccccaagcagcgtctcgagaagaagttccgtacccttcactccactattccggtcaacccatccctttcctccgcctccgcttccgcgtccgcccgccgctatgccgccagccagtagcctcaccgccgaccagctcagcttcttcgaggccaatgggtacctcgtgatggactcgttctcgagcgcggaggaggtgcgggagatgcgggaccgcatggccgaccttgtcgctgggttcgatggcgccaactccgcggtgttctccaccaaggatcatgtatgccatccacttcgattgggctagtctcgatccatgcgtttgttacgctcctttccttcttctcatacaaaccctgttgccgaaacacctacatctttatctttttgaaaattccattgcttggtggaaataataggaattttgccacttgaaacgttgcctgttataattatgcttgttataattacgcctgtgtctatgaattgtgggtccatgagtccatgagtccatctgtgtatatgaaatgtggggtctgatggcagttttacaaacttgtttcggggtgatggcaaatatcagttgtgcatgctcagatttagcaatggtaagttgttttccattgcagcggcagttaaaggacgactacttctttaagagtgctgagaatatctcattcttctttgaggaaaaggcatatggagatgatggatgcttgaaacagccgaaagaactttcaattaataaagttgggcatgcattacatgaacttgatccggtgttcaaaaagttttctttctcagagagtgttgcaagcttgttctcttctttaggctacaagaggcctgcagtcattcaatctatgtacatatttaagcaaccaggtattggtggtgaggtcgtgccgcaccaggataatacattcctttacacggaacctcgtacatgcacagggctgtggcttgcacttgaagatgcaacaatcaacaatggttgcctgtgggcaattccaggatcacataaaaagggtttggtgagacgtatggtcagagatgaaaatggtacacattttgatcggccctccccagtctatgatcagaaagaatttgtaccgctggaagtaaaatctggtgctttggtggttatacatggagatcttatacatcagagttttgagaacctttctccagcgtcaagacatgcattcagcttacatgtagtggatactgaaggatgtaaatggtccgaagacaactggatacaaaggaaaacggcccctgaaccgctctatgtgtcttagcaaaaccagtaactagtgccgtaaaacaatagagattcccagcaagtgatttgtggatcgcttctctgcacaataaaatgggggaatcaagctgcgccatgctgtttccgtttcacctgtaaacatatgagggcttgttcggttatttccaatacacatggattggatgggattgaaaaaaattgagaagaagtttgacttgtttgggattcaaactcattcaatcccactcaatccacatggattgagagctaaccgaacaagccctaaactgtaaatactattgctactgtaataccataaaaaatctctctcggctgggtaggagaaagactgcctctacgatattatattaaaaagaagctcaatcggagtcctaactgagaatgtctactaaatgtgtcatcccatgcagcaggagagttcgtccctataggtcagatctttactcgtg

SEQ ID NO: 10874 - DNA, 1420 bp, Zea Mays
cgcgcccttagtttcctccaatttgcttgcaaccgaacaacatcgggtccatattgtcatatgtaccaacggtccaaccccaagcagcgtctcgagaagaagttccgtacccttcactccactattccggtcaacccatccctttcctccgcctccgcttccgcgtccgcccgccgctatgccgccagccagtagcctcaccgccgaccagctcagcttcttcgaggccaatgggtacctcgtgatggactcgttctcgagcgcggaggaggtgcgggagatgcgggaccgcatggccgaccttgtcgctgggttcgatggcgccaactccgcggtgttctccaccaaggatcataaaaggcatatggagatgatggatgcttgaaacagccgaaagaactttcaattaataaagttgggcatgcattacatgaacttgatccggtgttcaaaaagttttctttctcagagagtgttgcaagcttgttctcttctttaggctacaagaggcctgcagtcattcaatctatgtacatatttaagcaaccaggtattggtggtgaggtcgtgccgcaccaggataatacattcctttacacggaacctcgtacatgcacagggctgtggcttgcacttgaagatgcaacaatcaacaatggttgcctgtgggcaattccaggatcacataaaaagggtttggtgagacgtatggtcagagatgaaaatggtacacattttgatcggccctccccagtctatgatcagaaagaatttgtaccgctggaagtaaaatctggtgctttggtggttatacatggagatcttatacatcagagttttgagaacctttctccagcgtcaagacatgcattcagcttacatgtagtggatactgaaggatgtaaatggtccgaagacaactggatacaaaggaaaacggcccctgaaccgctctatgtgtcttagcaaaaccagtaactagtgccgtaaaacaatagagattcccagcaagtgatttgtggatcgcttctctgcacaataaaatgggggaatcaagctgcgccatgctgtttccgtttcacctgtaaacatatgagggcttgttcggttatttccaatacacatggattggatgggattgaaaaaaattgagaagaagtttgacttgtttgggattcaaactcattcaatcccactcaatccacatggattgagagctaaccgaacaagccctaaactgtaaatactattgctactgtaataccataaaaaatctctctcggctgggtaggagaaagactgcctctacgatattatattaaaaagaagctcaatcggagtcctaactgagaatgtctactaaatgtgtcatcccatgcagcaggagagttcgtccctataggtcagatctttactcgtg

SEQ ID NO: 10875 - DNA, 1356 bp, Zea Mays
ctcttttctcctatccgttcaacgcttccctcctacccgttcaacgcttcccgccacccagccgctaaacaaaacgccgcgcgctgcacgtccatttctctttctccattaatccgacagtttgatttatcgatcgagaaaaccggtttctcagtgatttctcatcccggacggctgcgggaagcatttcatggtgattcgggctcatcgcgcactatgacaaaccaaaaccctaataaaacaagcccggagcccgtgaacacaacaaaacgtttattctccgccgaaaggaaccatccccaaagacaaagagggcatcggtccggcccatagctctggttctgtgcatggtgcgctggcgcaccttgtggtgcatgcacagcagagagcgcggcgtctcttctccctgccgcccgtgagcatccactcacgggacgaatacgaccaaaacgcgcacgcccccctcccaccaccctggcctgtaaatcagcgccgccaggcagtcacagcggcaagtccgcaccgcaactgcagttggaaaaccagctcgccgccactagataatctcgtctcgccagggacgggaacggcaggccgtgccgtcacgagactcctagcgaccgagagagagagagagcgcgcacgcgcgtggtggaagagacttcgttctagagctcccgcgaggatggagcgcggcagttcctggcgactcccggcggtggtcgtcggcatccttgtctgcgcggccctcttctcgccgcccgccgccgcgctcaacatcggcatccagtccgccggcgacggggtgtggactacctgagcacggcttgcaacgaggccctgctggactgcctggccaggctgcgggagggcacgtccacgttcaacgggaacaagtgcatgatcgacgaggtcatcgacgtgatctcgctcgtcatagaggccgccgtcgtcgccggcagggtactgcacaagccgtagccgcgccgcgcgcagggacatgtgaacagcagcctgcggttggtgggcgatacatctttttcgtgcttggtttagggcgtcctttccggctggccggggcccgggctctgcgtcggctcacatggcggcatgtgtgctactagctggcgagctcccaggctcccaacccggccaaaactgacgacaaggtatatggagattattaaagatatagcttgtttggttttgagcatctcgtgttcctatcactgtattaccgtacaaaataagtataagaaagtttcctcatgctgcttttcgcttcttggacaatgtaatctacactcgtgtagcttacgttgttgcaaatgacgaataatacagactacactcgtg

SEQ ID NO: 10876 - DNA, 945 bp, Zea Mays
gctcggccttcttatataacctacgacctgattcctctctagcagctatgttggatattctggtaaagatgtggaatctgtaatctacaaacttctagaagtacttgataaacatttatctatggtccaaagggataatgaacaaaaatcccatattgttgaacgtcaaataaaagaataccttcccaatctagttcaaattctcagaacaatacttcaggtactacttaattaaagaactggttttcaaacttaatatttacagttctatgtactactgttctaaagttcatgtactgattttcataatagatacatttgcagagtaattcatgacggaatcccattgatcctttcacgcatctcgttagagcaattaggacgatgctagcgctggtggtagtgtttggtactgccagagaaattgagaacaccgaaacagaatcaaaggccagggcacagtaattactcccctagatccccaaacagtgtccttctaatcacaaaacactaatggagaggatacaatagattggcagaggcagaggtagaggtaccgttcacctaaccttagtggcgaacccaagatcctccgacgccgttgtcctgtcccgatctctcctagcctcctccatgttcagcgtcatcgacttcctcgatccagagctcctccatgtctacctcatgcaagacatgaagaactaaataatgataaatcccactcccgtaaggaactgtaagaaaggggcgagaggtcaggggtggctttcgacttgaagaagatgcagtctagcgccgccatttcaccgctgccgcaggctgtggcttagatgcgagttgtggggaggctcgagaaaggcacgatggaggggagcagaggagcaagatgtcgcacttacgcagtggaccaagatcgcgtgggtggatgatccttgcggggtcgca

SEQ ID NO: 10877 - DNA, 1268 bp, Zea Mays
tgcctgagtaacactaggttagtgttgttaggtgacgtccacttgatgatcatcctttggcttggcactcgttcagattatccatcttccggtttgtccatcagcatcacctcgcgagcggctcacgcgtagcgacatcttgtggccgactcagttctggttctccgcatcgcgtggttaattcacgtgccatttcaatatttgactcgaatccgtgaggttggtaatgattttccgatccagacaatttgtcgagcgcttggcaggtactatacaaacttcacgcacatcttcatccgacgctcaacaagtttctccataaccggctaggaccttttttgtatctccccgtcatacaccacatgacgaactctcaacaccggtcgaaaataatccgagtaacccggcgaaaccaaactcaactcacagccggcgtggtcaactgaaacgacaacgtcgggggttagagaaacccgcgcgacatgggtaggggcgagctgggctaaatccgagctggagctcgcggcaactgggagcagggcgctggttctagggagcctattggtgttgccaagctgggctactactgctcctaagcatccatggccagagaagggacagaacagggaggaatgcgctgaacaggggagcacagccggaggagctcgacaacagagagcttagcagaggaacgacgccgagctgggtgcaagcagaggcgcggttcggcgaggtcacgacctgggcgagcctggtcggagcaggacgtgaggaatggcgtagcagagagagagagagcagcgtggagagagaaacgccatggggacgagcgcggcagggaacaacgccggcataggaggagctcggccggacgccatggggcgagcagagagctcggagcggagctgggacgacgcgcagaggaggagccggctgcgcgcggctgccaagacaagcgcagaggaaactccgaccgggcgccggaaagaagaggccgccggggcgaagctccatggtcaggagctgggggcgaactcgagcagaaggaagggagcaggcacggcgtaaaaattctgagcaggggaggtactgccgtgagctgagggagggagagataacgatggctgaaaggatatagggagaagaacgatggagaaggcctgcttagcggtgagatattttctgtgaaatacttcaacgacacagaaaaatcccagcggctgtcctgcttgaggataaggaagaagagagaaacagggaacacgacg

SEQ ID NO: 10878 - DNA, 928 bp, Zea Mays
aaacctatgtgaggtatgatgagttagtaacgcgaaagtaggttaaattatatgattaagtcaatgatattcccttttagtagttatatttcttggttaatagctaattaaatggcatggttggatagtacccgtttcatcgagtattaatagcgagatctcgtgtgatgctcgctaggtgcttggcaaaatatctaagatacgaaaccctgactgacttggtcgttcttgctgatatcaagaccgattcagttatagcgagttattttgctattccggtcaattagttgaattagtgtaccgagtagaattttagtaggcatgtgtgtggatgaaatattttaatcacttataaagatgtagtataatttataaagcaaaggataagtttagaatttaattaattaattgataagttgtgattaggctaattgtatttcatgtgtatagtttgtggttggtgatgtttgcgttaggttcgagaaacgtaattattgcgcttagtcatacgtcgataactagtattttcgtctaaaattgtacaacgcctcgccgctaggtgtttaattcgctatcgcgtagtactatttaggtttgaaatattccggtctatatgcattcatgtgcataatgcatttcattcaggcacgtgaattaaccacgcgatgcggagaaccagaactgagtcggccacaagatgtcgctacgcgtgagccgctcgcgaggtgatgctgatggacaaaccggaagatggataatctgaacgagtgccaagccaaaggatgatcatcaagtggacgtcacctaacaacactaacctagtgttactcaggcaagccccggtgcatgcaaccccttccttgtgtttttaaatactttttgcacacttaagtctagtgaaatgtgcattaggtttataggagttgct

SEQ ID NO: 10879 - DNA, 679 bp, Zea Mays
cactcatgtaactgctggtacttcgaggtccctcctcatcttaatttctttgaacccagctagtgcattcactttgtcccatttgcttaagagccaagctgaggagccttcgcttcccccttagttcagttcaccgtgggttgtagtggctcacgtcttcatgtctgtgttagcgttcccctagccgcacctggtgtttggctaggttcttcgcgcggtgattccctgcgtttgatgaccacgccatccagttctctgcctcatcgtggccaacacaactcgagctggtgaatgtcatctggagcagcctcactatcgcgatctgattcccgagtcagctccgcttacgtttgggtgtttggtggtgaagaaatgaaagtcttgggagctgcatagaaaaaggagaagttttattcccttacccttgggttagttacttcatgcggaggacttgaagcttagaaggtttttatatttctcttatggaaaggcttcatccttccaattattgtaataagttatgcacttcgagtactatcaggacttgtaataaatacatctctttctaccatgtaaaacttgagttttggaatgtaaagtgtactttgtaaatgtcttccgctctatctccaatgtgtgtgtatcaaatgtgattactgtaatatacctgttatgtggg

SEQ ID NO: 10880 - DNA, 1250 bp, Zea Mays
cactcatgtaactgctggtacttcgaggtccctcctcatcttaatttctttgaacccagctagtgcattcactttgtcccatttgcttaagagccaagctgaggagccttcgcttcccccttagttcagttcaccgtgggttgtagtggctcacgtcttcatgtctgtgttagcgttcccctagccgcacctggtgtttggctaggttcttcgcgcggtgattccctgcgtttgatgaccacgccatccagttctctgcctcatcgtggccaacacaactcgagctggtgaatgtcatctggagcagcctcactatcgcgatctgattcccgagtcagctccgcttacgtttgggtgtttggtggtgaagaaatgaaagtcttgggagctgcatagaaaaaggtttttttgtacttttctttccaatttcagattatagctgagacctagaaaattactgaaaaatactaaaaacgtgaaaccaattttgttgagttcaccaaggtgagtactctctgatagaaatattcattaggcttgaacaacaacttttgtgtttaggccttaattaaagtaacttgctaacgcttgttttagttatagaaatatagctccaaaaatgctgaaactttgtgggaggtttaatatatctaaagtagtgttgggtaaaagttttaatgtatttggagctggtttgtccgactaaattcagtttaggcttttagatcaaatgttaagtataggtataggtaagcttgtcatgtgcttggttagagatgtttatgttccccacctctcctttgtgagagtttgcatatcatatcattacataagcattcatgtatttgtaattgacttgtagaacacctagaagaagtggtgtttgaagaagaagcctgccccaagtactgttgatccagtggtggagtctcatctaactgtagaaaggttttggatcttctcctgcgataaggagaagttttattcccttacccttgggttagttacttcatgcggaggacttgaagcttagaaggtttttatatttctcttatggaaaggcttcatccttccaattattgtaataagttatgcacttcgagtactatcaggacttgtaataaatacatctctttctaccatgtaaaacttgagttttggaatgtaaagtgtactttgtaaatgtcttccgctctatctccaatgtgtgtgtatcaaatgtgattactgtaatatacctgttatgtggg

SEQ ID NO: 10881 - DNA, 2281 bp, Zea Mays
ctacactcatgtaactgctggtacttcgaggtccctcctcatcttaatttctttgaacccagctagtgcattcactttgtcccatttgcttaagagccaagctgaggagccttcgcttcccccttagttcagttcaccgtgggttgtagtggctcacgtcttcatgtctgtgttagcgttcccctagccgcacctggtgtttggctaggttcttcgcgcggtgattccctgcgtttgatgaccacgccatccagttctctgcctcatcgtggccaacacaactcgagctggtgaatgtcatctggagcagcctcactatcgcgatctgattcccgagtcagctccgcttacgtttgggtgtttggtggtgaagaaatgaaagtcttgggagctgcatagaaaaaggtttttttgtacttttctttccaatttcagattatagctgagacctagaaaattactgaaaaatactaaaaacgtgaaaccaattttgttgagttcaccaaggtgagtactctctgatagaaatattcattaggcttgaacaacaacttttgtgtttaggccttaattaaagtaacttgctaacgcttgttttagttatagaaatatagctccaaaaatgctgaaactttgtgggaggtttaatatatctaaagtagtgttgggtaaaagttttaatgtatttggagctggtttgtccgactaaattcagtttaggcttttagatcaaatgttaagtataggtataggtaagcttgtcatgtgcttggttagagatgtttatgttccccacctctcctttgtgagagtttgcatatcatatcattacataagcattcatgtatttgtaattgacttgtagaacacctagaagaagtggtgtttgaagaagaagcctgccccaagtactgttgatccagtggtggagtctcatctaactgtagaaaggttttggatcttctcctgcgataaggcaagccccggtgtatttgccacctcccttgtgtttacaaaattttatcacttatatgctgcattaggtgacaggagttgattgattaaacacttgatgcattaccatccttgaaaggttgattaccacaccttgtcacccgttttataaaagctagagatgcttagtcttgttgatagattaagaaaaatatttttgatctatgactcatgtttttacaaaaaagaaaatgggcttgggataatgaaggcatcaagacgttgataaattcattatccaggcatggcccctctgtcaggcgccaaatttttgaaatagtttaaaatgggaccatacgttgagcaagaaaagtcgcccgtctgtgtcgattaaggaccgtaccgattgttggcctgctgatctaggaccttttatctggccacatacctcgtcatgggcaagcctgaacccggctattccatacatgaaaagacaatcgtgcactgggagtggagagatggcgagagtggcacgtaccctcctggcaaaggaccgcctaaaaggggtggcgtgctctcgggtggcgcagacctgttcatgtgatggaggatccgtgggaatggtagacatgtgtaaaagagttaagggaagcatatgtcgtgtggttggagatccccagctgggtattaatcgactcggatcgccgaacttctcggatatgaagactagatcttcgaccttcaacgtagataacaagtgaaattaaagttgataaaatgaagctagtttaggtcaagtgaatgatctagattaggcaaatgctagattcaggctagaagattcaggtaataacctaacttgtgaagtaaaacttggcttaaggatccattattagtaagcttgcttttctgcaaaaaggagtccttgataattgatgagattttccttgagtcctaaattcagcatacccttgatagtcttttctttagtcgggtaagtcttgctgagtaattgtgtactcagggttttatcccttgttgtttttgtaggagaagttttattcccttacccttgggttagttacttcatgcggaggacttgaagcttagaaggtttttatatttctcttatggaaaggcttcatccttccaattattgtaataagttatgcacttcgagtactatcaggacttgtaataaatacatctctttctaccatgtaaaacttgagttttggaatgtaaagtgtactttgtaaatgtcttccgctctatctccaatgtgtgtgtatcaaatgtgattactgtaatatacctgttatgtggg

SEQ ID NO: 10882 - DNA, 895 bp, Zea Mays
ctcagctgcttgtgtgttttgctgtcagcacaggattaagcctccaccctttacctctctgtatattggtcctgtgtggagtggggaagtgaagccacgtgcctacactcatgtaactgctggtacttcgaggtccctcctcatcttaatttctttgaacccagctagtgcattcactttgtcccatttgcttaagagccaagctgaggagccttcgcttcccccttagttcagttcaccgtgggttgtagtggctcacgtcttcatgtctgtgttagcgttcccctagccgcacctggtgtttggctaggttcttcgcgcggtgattccctgcgtttgatgaccacgccatccagttctctgcctcatcgtggccaacacaactcgagctggtgaatgtcatctggagcagcctcactatcgcgatctgattcccgagtcagctccgcttacgtttgggtgtttggtggtgaagaaatgaaagtcttgggagctgcatagaaaaagaacacctagaagaagtggtgtttgaagaagaagcctgccccaagtactgttgatccagtggtggagtctcatctaactgtagaaaggttttggatcttctcctgcgataaggagaagttttattcccttacccttgggttagttacttcatgcggaggacttgaagcttagaaggtttttatatttctcttatggaaaggcttcatccttccaattattgtaataagttatgcacttcgagtactatcaggacttgtaataaatacatctctttctaccatgtaaaacttgagttttggaatgtaaagtgtactttgtaaatgtcttccgctctatctccaatgtgtgtgtatcaaatgtgattactgtaatatacctgttatgtggg

SEQ ID NO: 10883 - DNA, 2864 bp, Zea Mays
gcccaccagcccagaacccattcatgataaatctccgtttccagcaaaaaatcaggcccacgatccgatttccgtttctgccggatgaaacggcccaaacagggggcaagccggcaactccagatgtgaatagcgacgcttgcgccttgttttggctgtttccctaaaccgtcctccgcctcataatcgcaaaccctcctcccctctcgctgcatcggcgccgccgcgatgaagcgctcggccgacgcgatgactgagccggcgaagcctgtgttcctcaccaaggcggagcgggagcgcctcgcgctcgagcgccgccaggccgccgtctccgaccagcgccgcaccgcgctcgacctcctccagtccctgccccgggcccctcctccgccgcctcccagcggcgctcccccgtccggctccaaccccgctcctcgcgactcatccaactctcatcgcgattcctccgaccgggaccgggaccgggacagagacagagacagagacagagacagagacagagaccgggaacgccgccgcgacgacgattcccgccgcgaccgagatcgggatcgagatagggaccgcgaccgcgaccgcgaccgagatgactcctcccggcgcgaccgcgaccgagaccgagaccggcgcgaccgcgaccgtgaccgtgaccgggatatggagcgggagcgagatcgcgacagggagcgtggggatcgcggggaccgggagagggaccggctggagaagatggcggagcgggagcgcgagaaggagctcgacgcgatcaaggagcagtacctcggctccaagaagcctaagaagcgtgttatcaagccctctgagaagttccgcttctcgtttgactgggaaaacaccgaggacaccagccgcgacatgaacgcgctctaccagtcgccgcatgaggcccgactgctctttggccggggcttccttgctggcatcgaccgacgtgagcagaagaaggcggcagctgcgcatgagaaggagacccgtgcagagctgcggcgcaaggctggtgtggaggaccgtccagaggatgacgctgtagataagaagaaggccgccgctgctgaaatgtatgacgcttttgatatgcgtgtggacaggcactggtctgagaaggcgcttgaggagatgactgagcgagattggcgtattttccgtgaggatttcaatatctcctataagggttctcgcataccccgaccaatgcggaagtggagtgaaagcaagcttggcaccgagttgcttcgtgctattgacaaggctggatatgaaaaaccatcaccaatccagatggctgccattccgctaggtctacagcagcgtgatgttattggtattgctgagacaggttctggaaagactgcagcctttgtactccccatgttgtcttacattacccgattgccgcccataagtgaggagaatgaggctgagggtccctatgccgttgtgatggcacctactcgtgagcttgctcaacaaattgaggaggagactgtgaaatttgcaacctatctaggcatcaaagttgtctcaattgttggtggtcagtcaattgaggaacagggtttcaagattaggcagggctgtgagattgtaattgctacacctggtcggcttcttgattgcttggaaaggaggtatgctgttctcaaccagtgcaactatgttgtgctcgacgaggctgataggatgattgatatgggctttgagccgcaagttgttggtgtccttgacgcgatgccatcgagtaacttgaaacctgaaaatgaggatgaggaacttgatgagaagaggatttacaggactacttatatgttcagtgccaccatgcctcctgctgtggagcgtcttgctaggaagtacctccgaaacccagttgttgtgacaattggtacagctggcaaggccactgatctgatcacccagaatgtgatcatggtgaaggagtctgagaagatgccacggctccagaagatactcacagatctcggagacaaaacagccattgtgttctgcaatactaagaagacagcggacatgcgtgctaaggatctggacaagtcaggcttccgcgtcacaacccttcatggtgggaagtcacaagaccagagagagatcagccttgatggatttagaaatcgtcggttcaatgttcttgtggctactgatgttgcagggcgtggtattgatattcctgatgttgcacacgtgattaactatgagatgcctagttcagtcgacacatacacacatcgcattggaagaacaggtcgtgctggaaagaagggggtggcaacttcatttttaactttagagaacactgatattttctttgatctgaaacagatgcttatacagagcaacagtcctgtgccacctgaacttgcaaggcatgaggcatcaaaatttaagccaggctcgattcctgatcgacctccaaggcgaaatgatacagtctttgcaaatcattgaagcaatcttttggactattatgagctcaacttctaccatagagggaggaatctagattagtatttatgagtttgatttgtgttcatatatatgaatccggttttgagaccttgctgaaagtatgttaaactatacttgtgggtgttgattcttgtcaattgttgagaaaaatccatacttactggacaggatggggttgtgtaccgatacaagtggtaagttcgtggatccgttttctatctgagcaatatgattcaattttcaaaccgtaaactagagcaataataataagatgtgtactgtttgtactttgtaagaggaatctgaaattgagtgtaattttaatcggctgtttgttc

SEQ ID NO: 10884 - DNA, 4571 bp, Zea Mays
ctccctctccctctccctctcccctcttctgctgcttgttcttgtcaatagcgctcccaatcctgtcaccatcatcactagtccctcccgccccagctcctctgcctgtaaagatttcgttcgttcctctttcgaatctctgatcccgttctcggtcctcgattccgcctgcgaaagaaactcgtctttgctgcaatctatagaagtagcagggaggactttgtgcagagtttattttccttttcttcttcttcttttggtccggaggaacctagttcgccagtggttgcttgccactgacgaatcacgttcgggttgcgttctccgatccgtcccagcctaattctgggggcgcaggggaaggattcgggacggaaggaactagtttctgtgcttccttggattccacggcaaagcccggctgcgacgtcggcgtcgtctccaccgcattccggctacggttcccaagcaaccttgctgtggtggggatggtgtcgcaggctcccgtggcgggcgccagcctcgccgcgtcgctgtgcaagaagagcaaccgcgtcgcgcgggtgctcgcgtacgcgctgctcgagtggatcctcatcgcgctgctcctcgccaacggcgtcttctcctacctcatatcccggttcgccgccttcttcggcctcgcgccgccgtgcgcgctctgctcccgcctcggcgtcgacagcctcttcgagacccgcccgccgcaccaccgaggcgccgagcccctgcgccgcttgctgtgcgacgcgcacgccgccgagctgtcgcgcctcggctactgcagcgcgcaccgccggctcgcggacgccggggacatgtgcgaggactgcgccgcggcggcagcgcccgggaaggcgctgttgtcgtggatgggccggagcgagctgggtgagcgggacctcgcctgtgcctgctgcggtgtcgcgctcgagagcggcttctactcgccgcccttcttgctcaccacgtcggcgccgcgtggttcagattgtggcctcaagcaagaggaagaggcagcgatgccaaatggagacgtggtcgttgtctccaaggaaggtcctgtgatcgagctcttcgacgataagccgtttgtggaggatgactcaatcggcgtcttggctgccgaggttgttgccaatgttgagcggccggttgctcttgaatcaattgactcgttggtggtcaccatgggcaccgtgtcatctcaatccggtggcgaaggaaaggaagcagttgaccatggtgttgtaaggcagaacaacgtggacatggagaacacagttagtagcaatgaggagaaaattatgccatctgatgataaggtggatgtggttgatcggctgattgatgaacagattgttgccgtagtccttgtgccagcttgtatagaagctacacttgatggtggcataaatgcagacaaaaccgtggatgcctttgctgatcatcactcttgaggatgacagtggattggaagttaaggaccagaaaatatcatttgaagatgaggtatttgaaggtgagcaagctgaacaggttactcaacaacaggaactgtgtgctatgccaacagatcctagtgaccatgaatttgttgagaggttagatagaagtactgagttggagcattttccactggctgagtcaaagcataaaatgaactctatgccagtggaagcttctaagcacgttgctgtaactcagattgaggggaagcaggttcaacaagctgaggtaaatcaggagttggattcaataccaaaatgttccagggagcatgctgatgaagaacttcaaggagagagaactgcacaggctgggttggaacaagagtgtgactctgtgccaattgattatggggaacacggttcccttacttcatatgctcatactgatgatgagcaagatgaggcgatgcagaaagtcacttctgtaactcggattgaagagaagcaggttcaacaagctgaggtaaatcaggagttggattcaataccaaaatgttccagggagcatgctgatgaagaacttcaaggagagagaactgcgcaggctgggttggaacaagagtgtgactctgtgccaattgattctggggaacacggttgccttacttcatatgctcatactgatgatgagcaagatgaggcgaagcagaaagtcacttctgtaactcggattgaagagatgcaggttcaacaagctgaggtaaatcaggagttggattcaataccaaaacgttccagggagcatgctgatcaagaacttgaagtagagagaactgcacaggctgggttggaacaagagtgtgactctgtgccaattgattctgaggaacacggttgcctgttttcatatgctcatactgatgatgagcaagatgaggtgaagcagaaagtcacttctgaaacagcagatgttctacattatgcagcagacacttttaatgttaacacaaactcatggaaagatattgaagaggattcaactgaagctgctctaacagccatacatcaaatttgttacgaacctttgacgagcatagtcaagttctctctagatcatagtgtctccgaagaagacagagagcctgatacgccgactcatattgaaggtatatgtgattcacaggaactgctggattctaaagcagttgtttctgatgctaaatctgtagattcaagtgttgctactttgtctactgatctggaaagcactgaattggtgagtgtggatcaactaaaatctgctttggcttccacacgcaaatcattgaacaccctatattctgaacttgaaaatgagaggaacgctgctgctatagctgccgatgaaaccatggcaatgataaaccgcttgcaagaacagaaagctgcaatgcagatggaggcgattcaataccagcggcttatggaggaacagtcagagtatgaccaagaagcactgcagaggttgaatgaactagttgttaagagagagaaggagaagcaagatctggagagagagctcgagctgtatcgccacaaggttcatctctatgaggtaaaggtgaggaaattgtccaggcacaaggctgatgaccagaatggatcatcgtcaacttcatcgagtgctgaggatagtgatgacctttcacaaagtttctatgaaggtgatgaatcttcccatggtattaatggaagcaatgggagtattcctacagatgttgtgctacaagaaactgccaggcatcttgttacccttgatggctcactagctgattttgaggaagagagactatccatactggaacagcttaaagtgctagaagataaactttttgatcttgatgatgaagagtccgataacatgaagcatttctcagaagaaaaccatttaagtggtgcctcaaatggtttctctgatgatgatagctgctttaagctccatgacaagagaaagaatgtaacctacagaggaaagaaactccttccattgttcgacgatgctaccgtggaagctggaaacgtcccccaaggtaatgatgcacagcattcaacagaggtcacactggaccttgctagagagcaacataagcttgcaattgccaatgaaatcgatcaggtacacgagaggctgcatgctcttgaggcagatagggaatacataaaacagtgcgttaggactttgaagaagggagggaaagggtttgatcttcttcaggagatattacagcatcttcgggacctaagaaggattgagcaacgtgcaagtgcaaggaactctggggagctttcgcctcattacctacatcatcacacggattgaagatccctgcctatgtccagcgaatattgcttgaagatggaaatcatacaacaatgataaggggaaaaaaagattgccgactaagtagtattgtcattggagaagttttgttggttcctggagtggaaggagctcctcctggaacacccgtcacagtcggttcgaagataccattgggaaggcagatcacggagcaattctgccttccaaggtccaggattttttttgtggaccacttcccacgttctctttttgtgttggtttagttttcccggtgggttccaaacttttgcccaagggcaagagggtggttggtgagccgcccgggcccctgtggggctgtgtgtttgtggggggtgtggcggcaatcatggccttgtgcagaagctttagaattcattaacctgaagacatgccgatgccagctttgctgccagatatgttgggcttcactagtttttgttttcttctttttttctaaatcctttccctgtaaatcttctagctgtatgtaatgtgctttcggcctttggaatgatgaggtgttgggtgtgtgcatagcatgactgttgttttatgggtctttttttttctttcccttttgttctttttcgctgttattgttctggacattgcaatattttgatgcaagtgctgcttattagttattgaactctgaaagcaaccggcgtcgtgcgctgatgtatgattggtttagctgtcaagaatcatgagatgac

SEQ ID NO: 10885 - DNA, 4631 bp, Zea Mays
ctccctattagtccatccgctgccgaccgaaacggcctctttccccttccgcctcctctccctctccctctccctctcccctcttctgctgcttgttcttgtcaatagcgctcccaatcctgtcaccatcatcactagtccctcccgccccagctcctctgcctgtaaagatttcgttcgttcctctttcgaatctctgatcccgttctcggtcctcgattccgcctgcgaaagaaactcgtctttgctgcaatctatagaagtagcagggaggactttgtgcagagtttattttccttttcttcttcttcttttggtccggaggaacctagttcgccagtggttgcttgccactgacgaatcacgttcgggttgcgttctccgatccgtcccagcctaattctgggggcgcaggggaaggattcgggacggaaggaactagtttctgtgcttccttggattccacggcaaagcccggctgcgacgtcggcgtcgtctccaccgcattccggctacggttcccaagcaaccttgctgtggtggggatggtgtcgcaggctcccgtggcgggcgccagcctcgccgcgtcgctgtgcaagaagagcaaccgcgtcgcgcgggtgctcgcgtacgcgctgctcgagtggatcctcatcgcgctgctcctcgccaacggcgtcttctcctacctcatatcccggttcgccgccttcttcggcctcgcgccgccgtgcgcgctctgctcccgcctcggcgtcgacagcctcttcgagacccgcccgccgcaccaccgaggcgccgagcccctgcgccgcttgctgtgcgacgcgcacgccgccgagctgtcgcgcctcggctactgcagcgcgcaccgccggctcgcggacgccggggacatgtgcgaggactgcgccgcggcggcagcgcccgggaaggcgctgttgtcgtggatgggccggagcgagctgggtgagcgggacctcgcctgtgcctgctgcggtgtcgcgctcgagagcggcttctactcgccgcccttcttgctcaccacgtcggcgccgcgtggttcagattgtggcctcaagcaagaggaagaggcagcgatgccaaatggagacgtggtcgttgtctccaaggaaggtcctgtgatcgagctcttcgacgataagccgtttgtggaggatgactcaatcggcgtcttggctgccgaggttgttgccaatgttgagcggccggttgctcttgaatcaattgactcgttggtggtcaccatgggcaccgtgtcatctcaatccggtggcgaaggaaaggaagcagttgaccatggtgttgtaaggcagaacaacgtggacatggagaacacagttagtagcaatgaggagaaaattatgccatctgatgataaggtggatgtggttgatcggctgattgatgaacagattgttgccgtagtccttgtgccagcttgtatagaagctacacttgatggtggcataaatgcagacaaaaccgtggatgcctttgctgatcatcactcttgaggatgacagtggattggaagttaaggaccagaaaatatcatttgaagatgaggtatttgaaggtgagcaagctgaacaggttactcaacaacaggaactgtgtgctatgccaacagatcctagtgaccatgaatttgttgagaggttagatagaagtactgagttggagcattttccactggctgagtcaaagcataaaatgaactctatgccagtggaagcttctaagcacgttgctgtaactcagattgaggggaagcaggttcaacaagctgaggtaaatcaggagttggattcaataccaaaatgttccagggagcatgctgatgaagaacttcaaggagagagaactgcacaggctgggttggaacaagagtgtgactctgtgccaattgattatggggaacacggttcccttacttcatatgctcatactgatgatgagcaagatgaggcgatgcagaaagtcacttctgtaactcggattgaagagaagcaggttcaacaagctgaggtaaatcaggagttggattcaataccaaaatgttccagggagcatgctgatgaagaacttcaaggagagagaactgcgcaggctgggttggaacaagagtgtgactctgtgccaattgattctggggaacacggttgccttacttcatatgctcatactgatgatgagcaagatgaggcgaagcagaaagtcacttctgtaactcggattgaagagatgcaggttcaacaagctgaggtaaatcaggagttggattcaataccaaaacgttccagggagcatgctgatcaagaacttgaagtagagagaactgcacaggctgggttggaacaagagtgtgactctgtgccaattgattctgaggaacacggttgcctgttttcatatgctcatactgatgatgagcaagatgaggtgaagcagaaagtcacttctgaaacagcagatgttctacattatgcagcagacacttttaatgttaacacaaactcatggaaagaagatattgaagaggattcaactgaagctgctctaacagccatacatcaaatttgttacgaacctttgacgagcatagtcaagttctctctagatcatagtgtctccgaagaagacagagagcctgatacgccgactcatattgaaggtatatgtgattcacaggaactgctggattctaaagcagttgtttctgatgctaaatctgtagattcaagtgttgctactttgtctactgatctggaaagcactgaattggtgagtgtggatcaactaaaatctgctttggcttccacacgcaaatcattgaacaccctatattctgaacttgaaaatgagaggaacgctgctgctatagctgccgatgaaaccatggcaatgataaaccgcttgcaagaacagaaagctgcaatgcagatggaggcgattcaataccagcggcttatggaggaacagtcagagtatgaccaagaagcactgcagaggttgaatgaactagttgttaagagagagaaggagaagcaagatctggagagagagctcgagctgtatcgccacaaggttcatctctatgaggtaaaggtgaggaaattgtccaggcacaaggctgatgaccagaatggatcatcgtcaacttcatcgagtgctgaggatagtgatgacctttcacaaagtttctatgaaggtgatgaatcttcccatggtattaatggaagcaatgggagtattcctacagatgttgtgctacaagaaactgccaggcatcttgttacccttgatggctcactagctgattttgaggaagagagactatccatactggaacagcttaaagtgctagaagataaactttttgatcttgatgatgaagagtccgataacatgaagcatttctcagaagaaaaccatttaagtggtgcctcaaatggtttctctgatgatgatagctgctttaagctccatgacaagagaaagaatgtaacctacagaggaaagaaactccttccattgttcgacgatgctaccgtggaagctggaaacgtcccccaaggtaatgatgcacagcattcaacagaggtcacactggaccttgctagagagcaacataagcttgcaattgccaatgaaatcgatcaggtacacgagaggctgcatgctcttgaggcagatagggaatacataaaacagtgcgttaggactttgaagaagggagggaaagggtttgatcttcttcaggagatattacagcatcttcgggacctaagaaggattgagcaacgtgcaagtgcaaggaactctggggagctttcgcctcattacctacatcatcacacggattgaagatccctgcctatgtccagcgaatattgcttgaagatggaaatcatacaacaatgataaggggaaaaaaagattgccgactaagtagtattgtcattggagaagttttgttggttcctggagtggaaggagctcctcctggaacacccgtcacagtcggttcgaagataccattgggaaggcagatcacggagcaattctgccttccaaggtccaggattttttttgtggaccacttcccacgttctctttttgtgttggtttagttttcccggtgggttccaaacttttgcccaagggcaagagggtggttggtgagccgcccgggcccctgtggggctgtgtgtttgtggggggtgtggcggcaatcatggccttgtgcagaagctttagaattcattaacctgaagacatgccgatgccagctttgctgccagatatgttgggcttcactagtttttgttttcttctttttttctaaatcctttccctgtaaatcttctagctgtatgtaatgtgctttcggcctttggaatgatgaggtgttgggtgtgtgcatagcatgactgttgttttatgggtctttttttttctttcccttttgttctttttcgctgttattgttctggacattgcaatattttgatgcaagtgctgcttattagttattgaactctgaaagcaaccggcgtcgtgcgctgatgtatgattggtttagctgtcaagaatcatgagatgac

SEQ ID NO: 10886 - DNA, 732 bp, Zea Mays
acgcccacccgcagcacccgcattccctccgggctcaacagagctctaccagaggacgatggagctgcttgggctagcagataggagtggtgggatagcacacttccttctctcccggtggcagcatgtgggagcaagctccaaggaggtgacagtttcctcttcacgatgctaccagggctggtctcctccttgcaggctatacaaggttttgggtgtgtgggctctagtgtcaccacggccttggccctcagaatccatggagaagcaggtgcttcattacctagcgtgagtagtggcgcgggagaagcaagatcatagccacctccgtctccgctggaagaggcaggccgcggtatggcttcgtagctatccagaatgagatgctggagcgtgagtcatccctgcgctaacattggaagggcaggagagataccgtggacatcgatgccacctcagcttgtggatttgggttgggagttcaaccgttcaagtatgtgttaccggtgtcaagtttgtttgatcgagtacagtagccttgagagttgagctccatagagccaatgtagagggatacaatgcatgttctactgattaagattaagactgccagcacttgtatgtttctatatacaatcaaccatgaaatgtgttataattgtactggtaggaataccaagcaaatgcattcactggttgagtgttatggttgagaccaatttccaatttttg

SEQ ID NO: 10887 - DNA, 1024 bp, Zea Mays
tataaaagatgtgcctgtccactgtgactccagagtccagaccatagcctgcagccttccatccacgaactcccgttctccatttccagccatggcggtgtcgatcgagctcaccaaggagtacggctacgtcgtgctggtgctggtggcctatgtcttcctcaacctttggatgggcttccaggtcggcaaggcccgcagaaagtacaaggtgttctaccccaccatgtacgccatcgagtcggagaacaaggacgccaagctcttcaactgcgtgcagaactctctagagtggatgcccgttttcttcgtcatactgctgctgggcggtctgcagcacccgaccatcgccgccggtctgggcggcatctacatcgtcgcgaggttcttctacttcaagggatacgccaccggcgttccggacaaccgtctcaagattggggggctcaactacttggcgttgcttgggctgatcatttgcacagcatctttcggcatcaacctgctcatcagggagatgctctaaactttgggtttatatgtgagctccaggctgggttaaccgcacaagttactcatggtctgagcatcaaaactttgtgatactagtcgtttggggttttatagtggagttatcgtttctttctttgtctgtgtgttgttagcaaaagaagtgtgcgtctgcgtcttatagctgtgatggaataaggagacagatgggttgaagcgtgaatcgtacagttcttgctgcttgtcactctctgatctggtttcgttgtagatgagatggttgttaatggtttgtgtttgaggcacgatccgccttattttctaccgatctaaagccggggtgtaacaattttgaattattctggttttgggtttatgtttatgcgatgtattggctggtagcagttctgcattgactgcatatcaaccttaatcagctggtaacagttcttggacttctttatattattattatactagagagcaaaccacacacttcagagcatctccaagg

SEQ ID NO: 10888 - DNA, 1923 bp, Zea Mays
tgtttctatagtgtagtttgaatattagtatacgtgtgtgtacgagtaaactgctagactaatgctggaaagtgagagagagggcagctcgcttcctcgtggaatctctctgttcttagttctgttctacttctccaccaagtccctaacacgcgggtggcgggtccgccgccgccgccgttcgaagactcgaggctcgagcacctcgtctgctcgcccggcccctcctatccctcgcgcgactgtctccgccgacgaccataagccgcctgcctcatcgctggccacacaacgatccgtggcaaggaaagcacgaggacgtacagtagaattgtgaatcgccggaaaaacatctgttggcggcgtcatgaataagcggccccgcgacgaccactccttcgcctccgcgcccaagcgccagtatggcgcaggcggagggtatggcccgcagcagggttactcggaagagcggagcagcgcgcggcgggtggccgaccactacagcgcgcggtccaaccagacactcgaggaacgcgagaacagccccatcatccacctcaagaagctcaacaactggatcaagagtgttttggtccagttgtatgcacgcccgggtgactgcgttcttgatcttgcttgcgggaagggaggtgatttgataaagtgggataaagccaaggttggctactatgtaggggttgatattgctgaaggctcgataaaagattgcatgactcgctacaatggtgacacagatcaacaaagaaggaaaaggctcgtttggatgaatatttatatgaggatgctccgtttgatatatgtagctgtcagtttgctttacactattcatggtcaactgaagcacgcgctagacaagccttggcaaatgtgtctgcattacttcgtcctggaggcatttttattgggacaatgcctgatgccaatgtcattatcaaaaggcttcgagaatctgaagggttggaatttgggaacagtgtttactggattagctttggcaatgagtacgctgaaaagaaattccctgcatccagaccgtttggtatcaagtacaagtttcacttagaggatgctgttgattgcccagaatgggttgttccattccatctcttcaaattattggcagaggagtatgatctcgagctggttctgatgaagaacttccatgaatttgtacacgagtacttgcaaaaaccagagttcgccgagctgatgcggaggctgggtgccctcggtgatggaaggcaggaccaaagtacactgtcacaagatgagtgggaggtttcctatctctatctcgcgtttgtcctgcggaagcgaggccaaccgcctacccaacgaagagccagcaacgcaaacagagggaaaatgtttctcaccgagggtgacatcgaggttctcggtgtataagcatgagtatatcctggaagggcttgctaacagcttaccgattatatgctccacagaccacatagcataaaagaaagttgtaacattagtggctcacctgctactccatccgtttataaataaatgacaacgttgacttttttaaaaaaaaattgaccactagtcttatttaaaaaagttatcatttattttttgtaatttgttttatcacttaagttagtttgtgcttgacttaaaattttacattttgaataaatattttaaaatgaatattttgaataagatgagtggtcaaagttttcgaaaaaaaatcaacggtgtcatatatttgtaaatggaggtagtatttgtttctccaaacttttttctattgacaatgtcaacattttaaggatcagcagactggcaccacgcatatagctaatgaatcttcaacgttgactttaccaaattttagatcactctagcggagacgacaatgggtaaaaacctgct

SEQ ID NO: 10889 - DNA, 2063 bp, Zea Mays
tgtttctatagtgtagtttgaatattagtatacgtgtgtgtacgagtaaactgctagactaatgctggaaagtgagagagagggcagctcgcttcctcgtggaatctctctgttcttagttctgttctacttctccaccaagtccctaacacgcgggtggcgggtccgccgccgccgccgttcgaagactcgaggctcgagcacctcgtctgctcgcccggcccctcctatccctcgcgcgactgtctccgccgacgaccataagccgcctgcctcatcgctggccacacaacgatccgtggcaaggaaagcacgaggacgtacagtagaattgtgaatcgccggaaaaacatctgttggcggcgtcatgaataagcggccccgcgacgaccactccttcgcctccgcgcccaagcgccagtatggcgcaggcggagggtatggcccgcagcagggttactcggaagagcggagcagcgcgcggcgggtggccgaccactacagcgcgcggtccaaccagacactcgaggaacgcgagaacagccccatcatccacctcaagaagctcaacaactggatcaagagtgttttggtccagttgtatgcacgcccgggtgactgcgttcttgatcttgcttgcgggaagggaggtgatttgataaagtgggataaagccaaggttggctactatgtaggggttgatattgctgaaggctcgataaaagattgcatgactcgctacaatggtgacacagatcaacaaagaaggaaaaggttcagtttccctgcacggcttatttgtactgattgctatgaggctcgtttggatgaatatttatatgaggatgctccgtttgatatatgtagctgtcagtttgctttacactattcatggtcaactgaagcacgcgctagacaagccttggcaaatgtgtctgcattacttcgtcctggaggcatttttattgggacaatgcctgatgccaatgtcattatcaaaaggcttcgagaatgtatgttactgtaaacaaccattgtcatcttgcattggttaactttgtcactgtatttgctggaagctgtgtgacaagtatataaactcttctgctatggtcagctgaagggttggaatttgggaacagtgtttactggattagctttggcaatgagtacgctgaaaaggtgaaatttgaccgtttggtatcaagtacaagtttcacttagaggatgctgttgattgcccagaatgggttgttccattccatctcttcaaattattggcagaggagtatgatctcgagctggttctgatgaagaacttccatgaatttgtacacgagtacttgcaaaaaccagagttcgccgagctgatgcggaggctgggtgccctcggtgatggaaggcaggaccaaagtacactgtcacaagatgagtgggaggtttcctatctctatctcgcgtttgtcctgcggaagcgaggccaaccgcctacccaacgaagagccagcaacgcaaacagagggaaaatgtttctcaccgagggtgacatcgaggttctcggtgtataagcatgagtatatcctggaagggcttgctaacagcttaccgattatatgctccacagaccacatagcataaaagaaagttgtaacattagtggctcacctgctactccatccgtttataaataaatgacaacgttgacttttttaaaaaaaaattgaccactagtcttatttaaaaaagttatcatttattttttgtaatttgttttatcacttaagttagtttgtgcttgacttaaaattttacattttgaataaatattttaaaatgaatattttgaataagatgagtggtcaaagttttcgaaaaaaaatcaacggtgtcatatatttgtaaatggaggtagtatttgtttctccaaacttttttctattgacaatgtcaacattttaaggatcagcagactggcaccacgcatatagctaatgaatcttcaacgttgactttaccaaattttagatcactctagcggagacgacaatgggtaaaaacctgct

SEQ ID NO: 10890 - DNA, 1858 bp, Zea Mays
tgtttctatagtgtagtttgaatattagtatacgtgtgtgtacgagtaaactgctagactaatgctggaaagtgagagagagggcagctcgcttcctcgtggaatctctctgttcttagttctgttctacttctccaccaagtccctaacacgcgggtggcgggtccgccgccgccgccgttcgaagactcgaggctcgagcacctcgtctgctcgcccggcccctcctatccctcgcgcgactgtctccgccgacgaccataagccgcctgcctcatcgctggccacacaacgatccgtggcaaggaaagcacgaggacgtacagtagaattgtgaatcgccggaaaaacatctgttggcggcgtcatgaataagcggccccgcgacgaccactccttcgcctccgcgcccaagcgccagtatggcgcaggcggagggtatggcccgcagcagggttactcggaagagcggagcagcgcgcggcgggtggccgaccactacagcgcgcggtccaaccagacactcgaggaacgcgagaacagccccatcatccacctcaagaagctcaacaactggatcaagagtgttttggtccagttgtatgcacgcccgggtgactgcgttcttgatcttgcttgcgggaagggaggtgatttgataaagtgggataaagccaaggttggctactatgtaggggttgatattgctgaaggctcgataaaagattgcatgactcgctacaatggtgacacagatcaacaaagaaggaaaaggctcgtttggatgaatatttatatgaggatgctccgtttgatatatgtagctgtcagtttgctttacactattcatggtcaactgaagcacgcgctagacaagccttggcaaatgtgtctgcattacttcgtcctggaggcatttttattgggacaatgcctgatgccaatgtcattatcaaaaggcttcgagaataaattccctgcatccagaccgtttggtatcaagtacaagtttcacttagaggatgctgttgattgcccagaatgggttgttccattccatctcttcaaattattggcagaggagtatgatctcgagctggttctgatgaagaacttccatgaatttgtacacgagtacttgcaaaaaccagagttcgccgagctgatgcggaggctgggtgccctcggtgatggaaggcaggaccaaagtacactgtcacaagatgagtgggaggtttcctatctctatctcgcgtttgtcctgcggaagcgaggccaaccgcctacccaacgaagagccagcaacgcaaacagagggaaaatgtttctcaccgagggtgacatcgaggttctcggtgtataagcatgagtatatcctggaagggcttgctaacagcttaccgattatatgctccacagaccacatagcataaaagaaagttgtaacattagtggctcacctgctactccatccgtttataaataaatgacaacgttgacttttttaaaaaaaaattgaccactagtcttatttaaaaaagttatcatttattttttgtaatttgttttatcacttaagttagtttgtgcttgacttaaaattttacattttgaataaatattttaaaatgaatattttgaataagatgagtggtcaaagttttcgaaaaaaaatcaacggtgtcatatatttgtaaatggaggtagtatttgtttctccaaacttttttctattgacaatgtcaacattttaaggatcagcagactggcaccacgcatatagctaatgaatcttcaacgttgactttaccaaattttagatcactctagcggagacgacaatgggtaaaaacctgct

SEQ ID NO: 10891 - DNA, 910 bp, Zea Mays
ctcgctctctgctcgtcacctctgccgctctgcgcggtattgatttcctcggacaccgtgctccccgaccccgagcgcccatccagcagccagctaggagtaccgccgagtgcactctgtctctgcagtatccttcccggccgatctgcatttcactcgttccacaccgtcgttggccggcccatagctctccccctcctggttagtgtagtgagcgcagcgacgagtgcaacggtgagagtaccgagatggctgagggaagaggcagtgcaagggccatcggcgccatggcgttcgccgttgcctgctgctactgctgcgtcgccatcgccgacgcagccaccacctactacgtcggggacagcaacggctggtccttcagcagccccagctggcccaacggcaagcacttccgcgccggagacactctcggtacatcccctggatccacaacgtggtggccgtggacgaggacgggtacaacggctgcacgacgccgccggggtcgcggacctacacgtccggcgccgacagcgtgacgctcgccaggggggacaacttcttcatctgcacccggttcggccactgcaacctcggcatgaagctcgtcgtctatgccgcgtgatctgtcagagctagcgactggtggtggtattgttgactgggtgcgctcaatgatcggctgtgcttgctctcgagcgaactggtctgtttgatttgtgctatttcgtgtaggctcagtcagtcgcttggttctaatccgtaacggcttctactacttttacaatgttgttgtaacaatacaaacatccagctttaattgaagctaacggatatcgcatgtttgaacatttgctctccatgagaccatgacaaattgcttgacgcctgtacgggtcgagagcgagcc

SEQ ID NO: 10892 - DNA, 1560 bp, Zea Mays
agtctttctccccccacggcagaattccgattccggccgcctcctatacatagccagccagccttccaccctctcccctcccccaacacagagcagcgagccgcgcgcggaggcgaggcgttcgcacacctcgcccgcgccaccaccaccgctccgttgcgcccgccagccgtcacgcgtgacgtttcccggggggccgggggagagagaggcagaaggaggaggcacggagaggacgagacaggatgctcgggttcaggcagatgccgtggtcgtcggcgcaggagcaggagcaggcgccgtcggagcagctgtgcgagggggtgtcggccgtcgtggcggcgcgccaggggatggagaagccgctgacggctgtggcggaggcgttcgaggagctggcgcgcggcatggaggccgatggcggggagctccgcctcgctcccttcagcgactcctgcgctctcgtctccgtgctcttcagcagcctcgggatggccttcaggttcgccgagatcgagtacgtcaccaaggtgaacgatctcatcggtgccggcaagtcgtaccgcacgttgagcgacatcctcgacaaggacatccagaatgactgcgtgaagaagcagggaagccactcccggaacttacgcagggtccgtctcggcctcggcctcattaaagccctcttcgagcaattcctcgataccgagtacgtctcgttgcattcaaccaaacatgaacacatctcatcactaagtctgaatatttcaggcaagataggccacattgactgaatctcaaggcctgtatacagcgtatgatgtccttttgtcagaatgtgtacgatgataactgcatgatctcgaactggttgtcatgtggatgtggttaaatacatttaccaaattgccagctggtgctcacaaggctattactgcatgtacatgtgtaactgtcaagtgctatgatttggacagatagctgttttgttttaaaatgatacttatatattgactggtggctctgttctttggcacttgtttttttttcagggggacattgtatgatgctgctacgatagcttacgggcaggtctgcgcgccgtttcatagctgggcgatcaggaaggctgttggtgctggcatgtacactcttccaactagggagcagttgatagtgcggctgaatgaaactgaaggagatgaggagatacattgatgcttctagtcctatcatagagtacatcgacaaccttttcctctcgaggaacattagcctagattggtgagctgatctgaactggactggactgaagatcaagtctgcagcttgttcacaaagccgttgttggtaccatcgatttattgttcatagttatttattcagccttgttgggtggtggatggatgctcccttttcttcctttgttgcacgcacgggtctcgtgcatgtgttgtacaactgcatgataattctagcatggacattgatgttcttgccgactgtccatatagaaactgatggataatgcaaacgactattcagatatccatgagttctctcgct

SEQ ID NO: 10893 - DNA, 2314 bp, Zea Mays
ggctactaacggctgctacaaccacgaatcctactctggaccagaagcttccagagcatgaccagagcggattcggaagctccgcaacacgcatcccaaatcccccgaatcccgacgcccacctgaacccattcgcgcggacccgtggtggcggccccaggcagcgtggtgcatgacgtacacttacctcccgatatcctaaaggcatggtcatcctgtcccactgtttttttcacgaatctgagattcttggctgttggagtttgctatttttgcctgttcttgcaatgctgtcaccttcgttgcgtggtctagaagacgttccttttgcccagtatgaatggcagagctgccgtcgctttctttttgaaactgtttggcagtccgtgtggtctgtacatgggtcctatgtacaagacggcgataggctcccctggttccagattcagccatggataagagaactcgcctttaatttcccactctcccaaaacacaacccaaatgtcgctttgaggacacagtccaacctgcatgccctctccccttaaagtattcttatgggccaatactatatggaaattagaataataagtggcaattcgacaaaatctttgatctctcattagtccaagcaacaagcatccatatatttgaccatacaattaacatatgcaaatccactgttctttccactgctcagcagaatacaattgttgataggctgacatggataggctccatagcagcctcgtaagttccagccatccccaagtcaacatctgaagctgttgtggcattagaaatagcccccatcttttttaagtgggagccaagcaacatgtaaatttaaatgtgttgcgactcatcataacaatggtctgctctagctaagcactatgccatcttacacattatgtaaacccctctgaaagttaaaaaaataatagtccaccattgttaacgcttcacggtgcaatatcatgcctctcttcactattcagttttgacacaatacattgcaagtgtcgacctagctggaacataccaagtgtggggtttcagttctggagtgcatgtgcttttttacccaatcgatgatattgtggcaggttaacccattctttcggttgaacaatcgatgttcgagtgtgtgcttgtgcatgctatgtgggctgctttttcggatgcagtcaagcctgttttccttttcccctggatgcctgcaacctgtagctgatccagccatgtcctacctataggtccttgttgtatttcttttctttttcctctacttgaaattataacagctttcattttttctgagcccactaaatagagttagaacgtgtgctggcgcatgcttctatctgatatacatgtaggtgttgatatattcacacatgtatacatattacatggaaaatatggaaacacacatacaagagataatgtgctttgcaaacaatccaatcatgcatgtgtgtggttgtttaaccttttttcttttgctgaaccacgtcgtacctaagctccttactgtatttcttctctaccttctctagatgaaatccatgccagctttcattttttgtactgggcctatggaatggagttcgaacgtgtccagataatatccttagtaccctggtattcaaactgagatgtaagagcatcagccaagaagcttgatcaagagccgcatcagctggaccgcgtccttcgacattaattgttgacaaacacaatgttcagtctaccaacaatgatttgccatcaccaccaaaaacgtatatagcagaatacattcactggtgcactgagaacaaaatgtgccttttagctctgtagctagagcttttattccatattaatacaacataatacatgcaggatgaagcacacccaggctagctaagtcataccagattatacatgttccaatgtgacaacggctagaccatcctcaaacacatgaaggtttcagtttttgtaagcatagaaaaagcttcatcacttttggatatggaagacttttgtgtacatagacatccatgttgttgaagcattctgaaaactgtgcttgcttatgcaaactttactcacgaattattactagatatagaagtatgctactttaatgcagctcggtacgtattgtgacatgtttgccttataactctgaactctacaagttcccatactagatcttggaatacgcgacatgaacatgaacaatagttgtaatttagttttgtgtatgctctctgtattctctagtacattacatcatctttttggcaatctgtttaaac

SEQ ID NO: 10894 - DNA, 1664 bp, Zea Mays
ggctactaacggctgctacaaccacgaatcctactctggaccagaagcttccagagcatgaccagagcggattcggaagctccgcaacacgcatcccaaatcccccgaatcccgacgcccacctgaacccattcgcgcggacccgtggtggcggccccaggcagcgtggtgcatgacgtacacttacctcccgatatcctaaagatgaaatccatgccagctttcattttttgtactgggcctatggaatggagttcgaacgtgtccagataatgtgagatccttagtaccctggtattcaaactgagatgtaagagcatcagccaagaagcttgatcaagagccgcatcagctggaccgcgtccttcgacattagtaaaaagaaataaatgcattatttgtactatatttcccaaataacttgcatatttacagttcacaccaacaactaataagaaaggcaaagatccaatatatacatttttatcacagcccgaaaggtcacgttctctaacacaatcccaatcatatacatttctttttaagtgaacattcacttgatatggtctatttcctaaataccacaatgatatgattcaagtttttaaattcatttacttaaatgatagcaatgctactttctgtacatatgtttctttgagatacattttcatcttcatgtacaattattattactacctttcaaaacctacttacatacttatccaataggcaatacatcttacaattcgtgctgctacacttaggtattgatgtgctttgtcttagtttcctaacaaatacctatcaaccctcttttatctttgatgtaccctacaaatttaatgtttctatattttatttatgaatctgacatcatattatatcttaatcatgtgtatgtgcacgtgcgtgtgtttctatacacagacactgaaagagttggcactctttactcttagatcaatatcatgtcttcgtctccttttagtccactaccaaatcaatgctatagacttaatgaagctagtcttattactattggttttgctgcacatagtttggattaaaacaaaaaacatgcatcattgatatatacgacaatgtgttaatatttacgacaatgctctcctaattcgatctatcagagttaacaaacattattgattctcttactcacagattgttgacaaacacaatgttcagtctaccaacaatgatttgccatcaccaccaaaaacggatgaagcacacccaggctagctaagtcataccagattatacatgttccaatgtgacaacggctagaccatcctcaaacacatgaaggtttcagtttttgtaagcatagaaaaagcttcatcacttttggatatggaagacttttgtgtacatagacatccatgttgttgaagcattctgaaaactgtgcttgcttatgcaaactttactcacgaattattactagatatagaagtatgctactttaatgcagctcggtacgtattgtgacatgtttgccttataactctgaactctacaagttcccatactagatcttggaatacgcgacatgaacatgaacaatagttgtaatttagttttgtgtatgctctctgtattctctagtacattacatcatctttttggcaatctgtttaaac

SEQ ID NO: 10895 - DNA, 626 bp, Zea Mays
ggctactaacggctgctacaaccacgaatcctactctggaccagaagcttccagagcatgaccagagcggattcggaagctccgcaacacgcatcccaaatcccccgaatcccgacgcccacctgaacccattcgcgcggacccgtggtggcggccccaggcagcgtggtgcatgacgtacacttacctcccgatatcctaaaggatgaagcacacccaggctagctaagtcataccagattatacatgttccaatgtgacaacggctagaccatcctcaaacacatgaaggtttcagtttttgtaagcatagaaaaagcttcatcacttttggatatggaagacttttgtgtacatagacatccatgttgttgaagcattctgaaaactgtgcttgcttatgcaaactttactcacgaattattactagatatagaagtatgctactttaatgcagctcggtacgtattgtgacatgtttgccttataactctgaactctacaagttcccatactagatcttggaatacgcgacatgaacatgaacaatagttgtaatttagttttgtgtatgctctctgtattctctagtacattacatcatctttttggcaatctgtttaaac

SEQ ID NO: 10896 - DNA, 1664 bp, Zea Mays
ggctactaacggctgctacaaccacgaatcctactctggaccagaagcttccagagcatgaccagagcggattcggaagctccgcaacacgcatcccaaatcccccgaatcccgacgcccacctgaacccattcgcgcggacccgtggtggcggccccaggcagcgtggtgcatgacgtacacttacctcccgatatcctaaaggatgaaatccatgccagctttcattttttgtactgggcctatggaatggagttcgaacgtgtccagataatgtgagatccttagtaccctggtattcaaactgagatgtaagagcatcagccaagaagcttgatcaagagccgcatcagctggaccgcgtccttcgacattagtaaaaagaaataaatgcattatttgtactatatttcccaaataacttgcatatttacagttcacaccaacaactaataagaaaggcaaagatccaatatatacatttttatcacagcccgaaaggtcacgttctctaacacaatcccaatcatatacatttctttttaagtgaacattcacttgatatggtctatttcctaaataccacaatgatatgattcaagtttttaaattcatttacttaaatgatagcaatgctactttctgtacatatgtttctttgagatacattttcatcttcatgtacaattattattactacctttcaaaacctacttacatacttatccaataggcaatacatcttacaattcgtgctgctacacttaggtattgatgtgctttgtcttagtttcctaacaaatacctatcaaccctcttttatctttgatgtaccctacaaatttaatgtttctatattttatttatgaatctgacatcatattatatcttaatcatgtgtatgtgcacgtgcgtgtgtttctatacacagacactgaaagagttggcactctttactcttagatcaatatcatgtcttcgtctccttttagtccactaccaaatcaatgctatagacttaatgaagctagtcttattactattggttttgctgcacatagtttggattaaaacaaaaaacatgcatcattgatatatacgacaatgtgttaatatttacgacaatgctctcctaattcgatctatcagagttaacaaacattattgattctcttactcacagattgttgacaaacacaatgttcagtctaccaacaatgatttgccatcaccaccaaaaacgatgaagcacacccaggctagctaagtcataccagattatacatgttccaatgtgacaacggctagaccatcctcaaacacatgaaggtttcagtttttgtaagcatagaaaaagcttcatcacttttggatatggaagacttttgtgtacatagacatccatgttgttgaagcattctgaaaactgtgcttgcttatgcaaactttactcacgaattattactagatatagaagtatgctactttaatgcagctcggtacgtattgtgacatgtttgccttataactctgaactctacaagttcccatactagatcttggaatacgcgacatgaacatgaacaatagttgtaatttagttttgtgtatgctctctgtattctctagtacattacatcatctttttggcaatctgtttaaac

SEQ ID NO: 10897 - DNA, 3018 bp, Zea Mays
ggctactaacggctgctacaaccacgaatcctactctggaccagaagcttccagagcatgaccagagcggattcggaagctccgcaacacgcatcccaaatcccccgaatcccgacgcccacctgaacccattcgcgcggacccgtggtggcggccccaggcagcgtggtgcatgacgtacacttacctcccgatatcctaaaggcatggtcatcctgtcccactgtttttttcacgaatctgagattcttggctgttggagtttgctatttttgcctgttcttgcaatgctgtcaccttcgttgcgtggtctagaagacgttccttttgcccagtatgaatggcagagctgccgtcgctttctttttgaaactgtttggcagtccgtgtggtctgtacatgggtcctatgtacaagacggcgataggctcccctggttccagattcagccatggataagagaactcgcctttaatttcccactctcccaaaacacaacccaaatgtcgctttgaggacacagtccaacctgcatgccctctccccttaaagtattcttatgggccaatactatatggaaattagaataataagtggcaattcgacaaaatctttgatctctcattagtccaagcaacaagcatccatatatttgaccatacaattaacatatgcaaatccactgttctttccactgctcagcagaatacaattgttgataggctgacatggataggctccatagcagcctcgtaagttccagccatccccaagtcaacatctgaagctgttgtggcattagaaatagcccccatcttttttaagtgggagccaagcaacatgtaaatttaaatgtgttgcgactcatcataacaatggtctgctctagctaagcactatgccatcttacacattatgtaaacccctctgaaagttaaaaaaataatagtccaccattgttaacgcttcacggtgcaatatcatgcctctcttcactattcagttttgacacaatacattgcaagtgtcgacctagctggaacataccaagtgtggggtttcagttctggagtgcatgtgcttttttacccaatcgatgatattgtggcaggttaacccattctttcggttgaacaatcgatgttcgagtgtgtgcttgtgcatgctatgtgggctgctttttcggatgcagtcaagcctgttttccttttcccctggatgcctgcaacctgtagctgatccagccatgtcctacctataggtccttgttgtatttcttttctttttcctctacttgaaattataacagctttcattttttctgagcccactaaatagagttagaacgtgtgctggcgcatgcttctatctgatatacatgtaggtgttgatatattcacacatgtatacatattacatggaaaatatggaaacacacatacaagagataatgtgctttgcaaacaatccaatcatgcatgtgtgtggttgtttaaccttttttcttttgctgaaccacgtcgtacctaagctccttactgtatttcttctctaccttctctagatgaaatccatgccagctttcattttttgtactgggcctatggaatggagttcgaacgtgtccagataatatccttagtaccctggtattcaaactgagatgtaagagcatcagccaagaagcttgatcaagagccgcatcagctggaccgcgtccttcgacattagtaaaaagaaataaatgcattatttgtactatatttcccaaataacttgcatatttacagttcacaccaacaactaataagaaaggcaaagatccaatatatacatttttatcacagcccgaaaggtcacgttctctaacacaatcccaatcatatacatttctttttaagtgaacattcacttgatatggtctatttcctaaataccacaatgatatgattcaagtttttaaattcatttacttaaatgatagcaatgctactttctgtacatatgtttctttgagatacattttcatcttcatgtacaattattattactacctttcaaaacctacttacatacttatccaataggcaatacatcttacaattcgtgctgctacacttaggtattgatgtgctttgtcttagtttcctaacaaatacctatcaaccctcttttatctttgatgtaccctacaaatttaatgtttctatattttatttatgaatctgacatcatattatatcttaatcatgtgtatgtgcacgtgcgtgtgtttctatacacagacactgaaagagttggcactctttactcttagatcaatatcatgtcttcgtctccttttagtccactaccaaatcaatgctatagacttaatgaagctagtcttattactattggttttgctgcacatagtttggattaaaacaaaaaacatgcatcattgatatatacgacaatgtgttaatatttacgacaatgctctcctaattcgatctatcagagttaacaaacattattgattctcttactcacagattgttgacaaacacaatgttcagtctaccaacaatgatttgccatcaccaccaaaaacgatgaagcacacccaggctagctaagtcataccagattatacatgttccaatgtgacaacggctagaccatcctcaaacacatgaaggtttcagtttttgtaagcatagaaaaagcttcatcacttttggatatggaagacttttgtgtacatagacatccatgttgttgaagcattctgaaaactgtgcttgcttatgcaaactttactcacgaattattactagatatagaagtatgctactttaatgcagctcggtacgtattgtgacatgtttgccttataactctgaactctacaagttcccatactagatcttggaatacgcgacatgaacatgaacaatagttgtaatttagttttgtgtatgctctctgtattctctagtacattacatcatctttttggcaatctgtttaaac

SEQ ID NO: 10898 - DNA, 554 bp, Zea Mays
cgagacttctaccgaggctactaacggctgctacaaccacgaatcctactctggaccagaagcttccagagcatgaccagagcggattcggaagctccgcaacacgcatcccaaatcccccgaatcccgacgcccacctgaacccattcgcgcggacccgtggtggcggccccaggcagcgtggtgcatgacgtacacttacctcccgatatcctaaaggtttcagtttttgtaagcatagaaaaagcttcatcacttttggatatggaagacttttgtgtacatagacatccatgttgttgaagcattctgaaaactgtgcttgcttatgcaaactttactcacgaattattactagatatagaagtatgctactttaatgcagctcggtacgtattgtgacatgtttgccttataactctgaactctacaagttcccatactagatcttggaatacgcgacatgaacatgaacaatagttgtaatttagttttgtgtatgctctctgtattctctagtacattacatcatctttttggcaatctgtttaaac

SEQ ID NO: 10899 - DNA, 1685 bp, Zea Mays
ctcaaggcctctcgagacttctaccgaggctactaacggctgctacaaccacgaatcctactctggaccagaagcttccagagcatgaccagagcggattcggaagctccgcaacacgcatcccaaatcccccgaatcccgacgcccacctgaacccattcgcgcggacccgtggtggcggccccaggcagcgtggtgcatgacgtacacttacctcccgatatcctaaagatgaaatccatgccagctttcattttttgtactgggcctatggaatggagttcgaacgtgtccagataatatccttagtaccctggtattcaaactgagatgtaagagcatcagccaagaagcttgatcaagagccgcatcagctggaccgcgtccttcgacattagtaaaaagaaataaatgcattatttgtactatatttcccaaataacttgcatatttacagttcacaccaacaactaataagaaaggcaaagatccaatatatacatttttatcacagcccgaaaggtcacgttctctaacacaatcccaatcatatacatttctttttaagtgaacattcacttgatatggtctatttcctaaataccacaatgatatgattcaagtttttaaattcatttacttaaatgatagcaatgctactttctgtacatatgtttctttgagatacattttcatcttcatgtacaattattattactacctttcaaaacctacttacatacttatccaataggcaatacatcttacaattcgtgctgctacacttaggtattgatgtgctttgtcttagtttcctaacaaatacctatcaaccctcttttatctttgatgtaccctacaaatttaatgtttctatattttatttatgaatctgacatcatattatatcttaatcatgtgtatgtgcacgtgcgtgtgtttctatacacagacactgaaagagttggcactctttactcttagatcaatatcatgtcttcgtctccttttagtccactaccaaatcaatgctatagacttaatgaagctagtcttattactattggttttgctgcacatagtttggattaaaacaaaaaacatgcatcattgatatatacgacaatgtgttaatatttacgacaatgctctcctaattcgatctatcagagttaacaaacattattgattctcttactcacagattgttgacaaacacaatgttcagtctaccaacaatgatttgccatcaccaccaaaaacgatgaagcacacccaggctagctaagtcataccagattatacatgttccaatgtgacaacggctagaccatcctcaaacacatgaaggtttcagtttttgtaagcatagaaaaagcttcatcacttttggatatggaagacttttgtgtacatagacatccatgttgttgaagcattctgaaaactgtgcttgcttatgcaaactttactcacgaattattactagatatagaagtatgctactttaatgcagctcggtacgtattgtgacatgtttgccttataactctgaactctacaagttcccatactagatcttggaatacgcgacatgaacatgaacaatagttgtaatttagttttgtgtatgctctctgtattctctagtacattacatcatctttttggcaatctgtttaaac

SEQ ID NO: 10900 - DNA, 779 bp, Zea Mays
attaaaaaccatatacgaggccacccagggtacggcggcgctcggttccgtggcggggagtgttttccaggcggcggcgcggtagcgtgaaaccgggcgaccgagcaagcgacggccatggcgttctggcagacgcgcgattttctcttctgtggcatatgcggcaccctcctcaccttcgactccgtccgctccgcctcctgccctctatgcggcttcaagcgcgatgccaaagaaattgaagggaaagaaatacagtacacgatgaccgccgaggatattcgaagagggttaaagacacaaacggaggacgttgttgggcaaagaccagtgacaaataaagcctgtccaaaatgcgaccatccaaaagctgaattttacaacatacagatgagggagagacgacgttctacatgtgtaaaggatgcggctgtaatttcaaagacgaatgaggagttatcctaccacttctacggatatatggcattggtgccgaagaaatttccagcgttgacagactagtactccctccgccctttttttatttatcatcgtctagttcaaaaatgaacggccgataaatattcgagaattgcaatctactccttgacattgttacattacatggatgcgcagatccatgcgttgtgcaaactttcttttgatggaacctgttttgtattttattcgagtgtgtagatgtctacttgcaacctttttacatttattccaaactataagacgtttaaaactttactcttttcacgttttggtggtct

SEQ ID NO: 10901 - DNA, 3632 bp, Zea Mays
gacggttccccggccgttgctccgattgccacaggccggccatctcccttctttccggcaacggcaagggagaaggcggcgtcctttgcctcctcctctcactcctgtagcgtggagtcaataagaactttgcggccggcgaggggtggcagtcccgcggaggacgcggggcgcccgcccggccatgcgcgccccgccctctgccggcggcttcaactcgccgtggacgctcgccattcgcgcggcggcagaccaaggccggccccgccgcgccatcgctctgtacctcgcgtccctacgctcgtcctgccgcccctgccccttcgcactcgccgccgtcctcaagtctgtgccccgccttcccgagcacgccgttctccccgcggcggcctccctccacgcgcacctcctccgcctcggcctcctctcccacccctatccgcacgccgcgctctctcacctctactcccacctcctccccccgcaccacaaccacgcccgtggcctgcttgatgacgcgccaacgccgctgaaccgccactccctcgtctcgtccaattcgctcctcgcttccctcctacgcgcgggtgatatccctgccgcgcgcgccatgttcgaagcaatgcccgcgcgggacgttgtgtcgtggaactccatggttgctggactcgccaaggccggacacctggacgaggccatcgagatgttcgaccaaatgcccgagacgaacgtcgcatcctggaacgccctcgtgtccggattcatggcacaaggccacctagcccaagcgcaggagctgtttgagcggatgcccaccaggaacaacgtttcctggatcacgatgatctcagggtacgccaaggccggtgacgtccaagctgctgctaacctgtttgataggatgggcagtaaggacctttatgcatggaatgcgatgatctcatgctatgcacaaaatggctgcgcaagggaggcacttggcatttttaacagaatgttgaagccacatatttgggtggtacccaatgagaagactttttcctctgtgatctcggcatgttcacagctgggggacttaaggttcggcttgtgggttgagaatttcatgggctatgtgggggttgatctggatgatcacttgcgtacagctctggttgatttgtacaccaagagtgggcgaatggatagggcttttgatttgttcagaggattgagatcaagggatgtggtgtcttacagcgcaatgatagtgggctgtggaatgcatggcaagttaaatgaagctgttggcttgttcaaggagatgtccaaagcaaggattgatcctaatgcggtgacctttgtggggttgctatctgcatacagtcacgcgggactgctggaagaagctcgtgcttgtttcacttccatgacaagcagatacagaattaatccttcaatggaacactacactattatggtagacattcttgggcgctgtggaaagttggaagaagcattccagctggtcatgcagatacctgtatgcccagatgccagtgtttggggtgccttgcttcttgcttgcaggttgcacaacaacattgagcttggggaagttgttgcttccaagtgctttgaactggagccacaagagagtggatattacattctcttgggtaacatatatgcgcaagcaaagaagtgggacaaggttaagggtttgaggaagatgatggcagaaaggggtttgagtaagacacccgggagtagctgggtgcatgttgcatgaatccattctattgatcttgctcattttatcatttgggtcagttactcagatgacatattagcatgcaactcagattttgggcactaaatttgggaagatgaggaatgtcagcgttggggaactaagacgcgctcaaggatccccatccaggagattgactttagggtccacagtagaagagtcatcgctctcgggactttatgaatagggagccgcccttaactcaagaaatggaagacttcgagactaactatgccttatacaagggtacctctagcttagcctgctaggccacatgacgtggcgtacaaaagtaagccccagggcccctcgtgcctcgggctgcatgccggtctaacccctagggctccctacgcactggggcacttgacaaataaagccctcagggtcacttgcgtcccgagacactcgacaatatatgctctcgatgccccctgtgtccggggcatctagcaatatgagcctttacgacacctcatgacctggggcatctaatgtataagcctccgaggcccctcgcgcttcggggcaactagttgtataagcccttgtgttccctcacgacacaagacaactagcggtatgagcccctggggcccctcatgttatggggcgtctagcagtatgagccctcgagccccctcgtgagggagcccatacttctagatgccccgagagcccatacttctagatgtctcagggcacgaggggcctcgagggtttatatcattatacgccctggggtacgaggggcctcggggctttataccattggccaccctagggcgtaaggggccatgggggttcatactgctaggtgccctggtgcaccgggagcatataatgtcgagtgtctcagggcacgagtggccctaaagacttaatttgttgggtgcctcgttgtgtaaggagccccggggttagacaggcatgcatcctagggcgcgaggggttgtggtgcttacttatgtacgccacgccatgtggcctcacaggctaagctagtgatacccttgtataagtcgtagtcagtgtcgaagtcttccatttaggggtcgtggtgcttacttatgtacgccacgccatgtggcctcacaggctaagctagtgatacccttgtataagtcgtagtcagtgtcgaagtcttccatttcttgagatcaggagaggtcccgagagcggtgacttccatcatggaccttgaagcagtcttctggacagggattattgagcgcgtcatggtagcagtcgagggtatgttctttctgtggggaaagatacgctgttcttgtgtgttacatgcaaggggagtgggtgatgcacgatgacacatcttggtggtaatgcatccaccgccagcatagacaatgatgtgctggacagaagcagaaacttttacgagagaagaagggaaggcaagaagatggtagcggtagctattgtaacccagtaagtaagcaaaaagaaaagcctggctggcctgcattccctccctgacgcttctgaaaaccagagatgaaaggctgcagttatgttctgtcgtctgtttgagttcgtcattagcctgttgttctggaattcataattagtgtgtggttcatgtttgcatgattgtaaccctagaacagcacagcatctgcaggcgtgaaccacaaacttattacgagctccaggatagcacagcttaaattcagttattctaatcatgtctgcagatgctgtacatttcctttcctgcatagcgtagtcatgttaacatgttaaaccgaacaaatttgctccttcaacaaaaaaagagagcagaacaaatttcatgacaccataacatagctttcagcag

SEQ ID NO: 10902 - DNA, 2327 bp, Zea Mays
gacggttccccggccgttgctccgattgccacaggccggccatctcccttctttccggcaacggcaagggagaaggcggcgtcctttgcctcctcctctcactcctgtagcgtggagtcaataagaactttgcggccggcgaggggtggcagtcccgcggaggacgcggggcgcccgcccggccatgcgcgccccgccctctgccggcggcttcaactcgccgtggacgctcgccattcgcgcggcggcagaccaaggccggccccgccgcgccatcgctctgtacctcgcgtccctacgctcgtcctgccgcccctgccccttcgcactcgccgccgtcctcaagtctgtgccccgccttcccgagcacgccgttctccccgcggcggcctccctccacgcgcacctcctccgcctcggcctcctctcccacccctatccgcacgccgcgctctctcacctctactcccacctcctccccccgcaccacaaccacgcccgtggcctgcttgatgacgcgccaacgccgctgaaccgccactccctcgtctcgtccaattcgctcctcgcttccctcctacgcgcgggtgatatccctgccgcgcgcgccatgttcgaagcaatgcccgcgcgggacgttgtgtcgtggaactccatggttgctggactcgccaaggccggacacctggacgaggccatcgagatgttcgaccaaatgcccgagacgaacgtcgcatcctggaacgccctcgtgtccggattcatggcacaaggccacctagcccaagcgcaggagctgtttgagcggatgcccaccaggaacaacgtttcctggatcacgatgatctcagggtacgccaaggccggtgacgtccaagctgctgctaacctgtttgataggatgggcagtaaggacctttatgcatggaatgcgatgatctcatgctatgcacaaaatggctgcgcaagggaggcacttggcatttttaacagaatgttgaagccacatatttgggtggtacccaatgagaagactttttcctctgtgatctcggcatgttcacagctgggggacttaaggttcggcttgtgggttgagaatttcatgggctatgtgggggttgatctggatgatcacttgcgtacagctctggttgatttgtacaccaagagtgggcgaatggatagggcttttgatttgttcagaggattgagatcaagggatgtggtgtcttacagcgcaatgatagtgggctgtggaatgcatggcaagttaaatgaagctgttggcttgttcaaggagatgtccaaagcaaggattgatcctaatgcggtgacctttgtggggttgctatctgcatacagtcacgcgggactgctggaagaagctcgtgcttgtttcacttccatgacaagcagatacagaattaatccttcaatggaacactacactattatggtagacattcttgggcgctgtggaaagttggaagaagcattccagctggtcatgcagatacctgtatgcccagatgccagtgtttggggtgccttgcttcttgcttgcaggttgcacaacaacattgagcttggggaagttgttgcttccaagtgctttgaactggagccacaagagagtggatattacattctcttgggtaacatatatgcgcaagcaaagaagtgggacaaggttaagggtttgaggaagatgatggcagaaaggggtttgagtaagacacccgggagtagctgggtgcatgttgcatgaatccattctattgatcttgctcattttatcatttggcacgatgacacatcttggtggtaatgcatccaccgccagcatagacaatgatgtgctggacagaagcagaaacttttacgagagaagaagggaaggcaagaagatggtagcggtagctattgtaacccagtaagtaagcaaaaagaaaagcctggctggcctgcattccctccctgacgcttctgaaaaccagagatgaaaggctgcagttatgttctgtcgtctgtttgagttcgtcattagcctgttgttctggaattcataattagtgtgtggttcatgtttgcatgattgtaaccctagaacagcacagcatctgcaggcgtgaaccacaaacttattacgagctccaggatagcacagcttaaattcagttattctaatcatgtctgcagatgctgtacatttcctttcctgcatagcgtagtcatgttaacatgttaaaccgaacaaatttgctccttcaacaaaaaaagagagcagaacaaatttcatgacaccataacatagctttcagcag

SEQ ID NO: 10903 - DNA, 1600 bp, Zea Mays
gacggttccccggccgttgctccgattgccacaggccggccatctcccttctttccggcaacggcaagggagaaggcggcgtcctttgcctcctcctctcactcctgtagcgtggagtcaataagaactttgcggccggcgaggggtggcagtcccgcggaggacgcggggcgcccgcccggccatgcgcgccccgccctctgccggcggcttcaactcgccgtggacgctcgccattcgcgcggcggcagaccaaggccggccccgccgcgccatcgctctgtacctcgcgtccctacgctcgtcctgccgcccctgccccttcgcactcgccgccgtcctcaagtctgtgccccgccttcccgagcacgccgttctccccgcggcggcctccctccacgcgcacctcctccgcctcggcctcctctcccacccctatccgcacgccgcgctctctcacctctactcccacctcctccccccgcaccacaaccacgcccgtggcctgcttgatgacgcgccaacgccgctgaaccgccactccctcgtctcgtccaattcgctcctcgcttccctcctacgcgcgggtgatatccctgccgcgcgcgccatgttcgaagcaatgcccgcgcgggacgttgtgtcgtggaactccatggttgctggactcgccaaggccggacacctggacgaggccatcgagatgttcgaccaaatgcccgagacgaacgtcgcatcctggaacgccctcgtgtccggattcatggcacaaggccacctagcccaagcgcaggagctgtttgagcggatgcccaccaggaacaacgtttcctggatcacgatgatctcagggtacgccaaggccggtgacgtccaagctgctgctaacctgtttgataggatgggcagtaaggacctttatgcatggaatgcgatgatctcatgctatgcacaaaatggctgcgcaagggaggcacttggcatttttaacagaatgttgaagccacatatttgggtggtacccaatgagaagactttttcctctgtgatctcggcatgttcacagctgggggacttaagcacgatgacacatcttggtggtaatgcatccaccgccagcatagacaatgatgtgctggacagaagcagaaacttttacgagagaagaagggaaggcaagaagatggtagcggtagctattgtaacccagtaagtaagcaaaaagaaaagcctggctggcctgcattccctccctgacgcttctgaaaaccagagatgaaaggctgcagttatgttctgtcgtctgtttgagttcgtcattagcctgttgttctggaattcataattagtgtgtggttcatgtttgcatgattgtaaccctagaacagcacagcatctgcaggcgtgaaccacaaacttattacgagctccaggatagcacagcttaaattcagttattctaatcatgtctgcagatgctgtacatttcctttcctgcatagcgtagtcatgttaacatgttaaaccgaacaaatttgctccttcaacaaaaaaagagagcagaacaaatttcatgacaccataacatagctttcagcag

SEQ ID NO: 10904 - DNA, 3766 bp, Zea Mays
ctaaggtctacttggtacttgcacaacagtcggtgatgattataagattaaggtctggaattacaagacacaccgttgccttttcacacttcacggacaccttgactacattcgcactgtgcaattccatcatgagtatccatggattgtaagtgctagtgacgatcagacaatccggatctggaactggcagtcacgcacctgtgtggctgtgctgactgggcataaccattacgtcatgtgtgcatctttccatcccaaagaagacctggttgtatcggcatcacttgatcagactgtacgtgtctgggatatcggagctctgaggaagaagacagtgtcacctgcagatgacatcctccgtctcacccagatgaacacagatctttttggaggtgttgatgctgtagtgaaatatgtcctggaaggccatgatcgtggggtcaactgggcctcatttcatcccactttgccactcattgtttctggggcagatgaccggcaggtgaagctatggagaatgaatgataccaaggcttgggaagttgatactttaaggggccacatgaataatgtgtcttgtgtgatgttccatgcgaagcaagacatcatcgtgtcaaactcagaagacaaaagcattcgcatttgggatgccacaaagagaactggtattcagacatttagacgggagcacgaccgtttctggattcttgctgctcaccctgaaatgaaccttcttgctgctggtcatgacagtggcatgattgtgttcaaattagagagggaacgcccagccttctgcgttagtggtgacactgtcttctatttgaaggatcggtttctccggttctttgaatactccacccagaaggaagttcaagtggctccaataagaagacctggatcagtcagcttgaaccaatcacccaggacgctgtcctacagcccaactgagaatgctgtcttgatttgctctgatgctgatgggggttcatatgaactctacattgttcccaaggattctgctggcaggtctgattacttgcaagaggcaaagaaaggagctggtggttctgctgtttttgtagcgcgcaacaggtttgcagtccttgagaagagtagcaatcaagttttggtgaagaatcttaagaatgaaattttgaagaaaagcccccttcccattgcgactgatgcaatatattatgctgggaccggtaacctgctgtgcaaaggtgaagacagggtggccatctttgatcttcagcaaaggttagttcttggtgagctccaaacacctgctatcaaatatgttgtttggtctagtgacatggaatctgtggcactactgagcaagcatgcagtggttatagctagcaagaagcttgtccataagtgcacactgcatgaaaccatccgtgtgaaaagtggtgcctgggatgagaatggtgtgttcatttacactacactgaaccatatgaagtactgtcttcccaatggagatagtgggatcataaagactctcgatgttcctatttacataacgagggttgttgggaacaacattttctgcttagatcgtgatggaaaaaacaagctgattgcagttgatgcatcagagtacattttcaagctcgcccttctcagaaaacgctatgatcatgttatgagtatgattaagaactcccagctgtgtgggcaggctgtgatttcttatttacaacagaaaggtttcccagaagttgctctacactttgtgaaggatgagaagaccagatttaacctagctctcgagagtggtaacattcaaattgcagttgcttctgcaaaggagattgatgacaaggatcactggtacaagttgggaattgaagccctgaggcagggaaatgttggtatagtggaatatgcttaccaacgaacaaagaattttgagaggcttgcttttctgtatcttattactggttacttggacaaggtgggcttcatgtgcaaaattgctggacagaataacaatttgatgggacagttccacaatgcattgtatcttggggatgccaagaagcgggttgagatcctggagaatgctggacagctacctcttgcttatgttactgctgtcactcatgggctcacagaaattgctgagaggattgcttctgaattaggcgagaatgttccttctctgcctgaaggaaaatcccactcactactgatcccccctgcacctctcacagcgtgtggtgattggccattgcttagggtagtgcgcggtatttttgaaggtggactggatgctactggaagggcagatcttgaggaagacgatgaagctgctggtgctgattggggtgatgaagacttggatattgttgatgtaagtgaggtggtggcaaatggtggtgatggtgttgatgtagaagagggtgagccaaatgaggaggatggtgaggagggtggctgggacctggaagatctggaacttccgcctgaaactgagactccaaaagctgttggcaatgctcgatctgctttattcgttgctcctacaccaggtattcctgtcagccaaatttggacccagagatcttctctggctggggagcaagcggcagcagggaacttcgacacagcaatgaggttgcttagccgccagttgggtatcaagaactttgttccactgaagcccttgtttattgatctgcacatgggcagtcatacatatatgtgtgcgtttgccgctgcgcctgttatatcagttgcagtagagaaaggttggaatgagtctgcaagtcctaatgtgaggggccctcctgcacttgttttcagcttctcacaaatggaagatagactcaaggctgcctacaaagccacaactgagggcaagttccccgaagcactgagacagttccttagcatcttgcataccattccagttattgtggtggattcgcggagagaagttgatgaggtgaaggaattaatcgagatagtgagggagtatgttcttggtctgaggatggaactcaagagaaaggaattgagggatgatgtgacccgtcagcaggagttggctgcttacttcacgaactgcaagcttcagagagttcatatgaggcttgtgctcgcaagcgctatggctctttgcttcaagcagaaaaactatgcaactgcagcacactttgcaaggatgcttcttgagaatagccctcaggaggcccaagcaaagaaggctcgacaggtgctgcaagcctgccaggacaaggacgattctcaccaactgaactatgacttcagaaatccattcgttgtttgtggtgctacatatgttcctatctatcgtggccaaaaggacgtttcctgcccatactgtggatcccgatttgttccttccatcgaagggcagctttgtaccatatgtgagcttggtgcggttggggcagatgcttcaggtctcctctgctctcctacacaatcgagataagccatggtagttagagcccccctatattctttctagtgtcttaagttccaagacttaatcatatattttaccagggagtttagtgattgtaaggaataagtattatacatgtttttatcaagttttttttttcttttttcgtgttctgttaccataatttttgtttgcctagagggtgctgtcatcacctgccgtatggtttagacttctgatcaactttggaagctatgctggaaattgatgtatgagatgtctctttcactctttaaaattctttttttggga

SEQ ID NO: 10905 - DNA, 2686 bp, Zea Mays
cgccaaacgagcacgggagttttttggggggttttctctccagtctcccgcacgccagagactccatctccgcccacacaacacaacaaagcacaccaccccaccccccgaaacggacgctacccctccccgcctcgtctcgctccgctccgctccggcccgttccggctctcgccaccccagccgagatgcggtcgccgccgcccccaccgtggcgcgccgggcgcctccattccccgctccccatgctcctgctcttcgtcgcggcgctggcggcgcgggcgggggccgacgacctcgcgagcgacgcgcgggcgctcctggcgttccgcgacgccgtggggcggcgcctgacgtggaacgcctcggacgtcgcgggggcgtgctcgtggacgggggtctcctgcgagaacggccgcgtggcggtgctgcggctccccggggcgacgctctcgggggcagtccccgcggggacgctcgggaacctgacggcgctccacacgctcagcctccgcctcaacgggctctccggcgcgctcccggccgacctcgcctccgccgccgcgcttcggaacgtcttcctcaacgggaacaggctgtccggcgggttcccgcaggcgattctcgcgctcccggcgctcgtcaggctctcgctcggcgggaacgacctgtcggggcccatccctgcggagctcggcagcctcacgcacctcagggtccttctcctggagaacaatcgcttttccggcgagatttcggatgtcaagctaccgccgctgcagcagttcaatgtctcgtttaaccagctgaacggatccatcccggcttcacttcggtcgcagccgcgctccgcgttcctggggacgggcttgtgcggcggacccttggggccttgccctggcgaggtttccccttccccggctccagcggggcagacaccgtcgctgacgcctgttcccagtagcggtggcggtaacggtagcggtagtggtagcggcgggaccatcggtggaaatgggggagaaagtggccacaagaacaagaagctctccggtggtgccattgccggaatcgctataggctccgccttgggcgccggacttctcctcttcctcctcgtctgcctctgtcgcaggtcggggggcaccaggacgcggtctctggagatgccgccacctgaagcgcctgctgctgctgctgctgctggcggcaggaaacctcccgagatgaccagcggcgctgctgttgcgcccttgaccacaataggccaccccaacgctcctatcggccagtcgacgtccggtaagaagctggtcttctttgggtcagcggctgccgtggcacctttcgatctggaggacctgctgcgcgcgtcggctgaggtgctcgggaaaggagcgttcgggacgacatacaaggcagtgctcgagtctggggcaactgtggccgtgaagcgcctcaaggacgtgactctatctgaagctgagttccgtgaacgcatttccgagattggtgagcttcagcacgagttcattgtgccactccgtgcttactactacagcaaagatgagaagctacttgtttacgacttcatgcccatggggagcctgtctgcagtcctgcacggcaacgtaagttctggcaggacaccacttaactgggatttaaggtcaagcattgctctagctgcagcccgtggtgttgagtacatccactcaacgacctcaacggcttcccatggtaacatcaagtcatccaatgtcctcctgggaaaatcatatcaagcacgtgtatcagagaatggccttaccactcttgttggtccatcatcttcatcgtctcgcaccaccggataccgcgcacctgaggttattgattcccggagggtttcccagaaggcagacgtgtacagctttggtgttctgttgcttgagctggtcacagggaaggcccccagccaggctgctctcaacgacgagggtgtcgacctgcccagatgggtgcagtcagttaaccgctcggagtggggttcactagtgtttgatatggagctcatgagacatcagactggtgaggagcccatggctcagctcgtgctgcttgctatggactgcacagcacaagtcccagaagcccggccgtcaatggcgcatgttgtcatgcggatagaggagatcaagaagtcaagcgtgaccccgaacattgaacaagttgatgatcaatcttcaagggctgaatcggaggcggcgccgaccaatccgtttgctacttgatatgagttgacctgagagagagaatctgctataactctagcctgcattcaatcgattcacacattcgatgaatcctatcttcgactgagtcgactgtttttttctgtgcatcttttagcctgttggatttaacggttaacctgatcgtcactaagcagcacgggtgttcggcagtcgcaccctgtgctgcggaaggtgattggtggtgtgtttagggaccagttttaaagtgtgagattgctcaattgctgtgctcattctagccttgatcaggttggttttagcttgtagctgctgctgctgcttgtcttccggctatccatgtgtaattactcaagcctcatctagcgtttggatttttttttcactttttgccggattaatctctcgtttggtttgccttaaaaaaaaat

SEQ ID NO: 10906 - DNA, 1752 bp, Zea Mays
ctctctctctctctctctctctctctctctctctcacacacacacacacactagcagcaatttcaaactgctggcgttttaattccttctccagttcctccctcgatgaccacggcatgccattgccagccacgtacaacgtactacaaggcacactaacccactgccaagcacctcgtctgatctgatctgatgctgatgcagggttggcggttccgggatggacgtcaggagcaaagccaggacgctgtccggacctgttgatgaccccagcaagcttccgaagtggaacttcgacggctccagcaccggccaagctccgggcgacgacagcgaagtcatcctttgccctcgggccatcttcagggacccgttcaggaaggggcagaacatactgctgtgtgtaggtcatgtgcgactgctacgagccgaacggggagccgatcccgagcaacaagcggcacggggccgcgaagatctttagccaccctgacgtcaaggctgaggaaccatggttcgggattgagcaggagtacacccttctccagaaggacaccaagtggcctctcggttggccgctgggcggctaccctggccctcagggaccttactactgcgccgtcggagcggacaagtcctacgggcgggacatcgtggacgcgcactacaaggcctgcctctacgccggcatcgacatcagtggcatcaacggggaggtcatgccggggcagtgggagttccaggtcggtcctgccgtcggcgtctcggccggcgaccagctctgggtggctcgctacattcttgagaggatcaccgagatcgccggcgtggttgtctccttcgaccccaagccaattccgggggactggaatggcgctggtgcacacaccaactacagcaccaagtcgatgaggagcgacggcgggtacgaggtgatcaagaaggcgatcggcaagctgggcctccggcaccgggagcacatcgccgcgtacggggacggcaacgagcgccgcctcaccggccgccacgagaccgccgacatcaacaccttcgtctggggcgtcgcgaaccgcggggcgtcggtgcgggtgggccgcgacaccgagaaggaaggcaaaggctacttcgaggaccggaggccggcgtccaacatggacccgtacgtggtgacctcgctgatcgcggagacaaccatgctgtgggagcccagccactccaacggcgacggcaagggcgccgcggctccttgatttgattctgcggagactgagctctgtgtgtgagccggcctgcgtagatggcaaatgggactgaccctgtcagaaacttgagatgaccataataatagctgcagtgtgctcgttctggggttggataagacccaagaactttttttagctttcttcgaacaagtaatcatggtgctgaaccaacacagatgtgctactaaacacatctaacgagtcaaacgccgaagcatatcccaacgcacaaccccggttaatcttgttacccatggattgaatgagattgaaaaaaattaagaaagagtttgatttagggtttgttcgctttcctctcaatctatatggattgggtgggattggatgggtttaaatcccgaacaagttaaaatccttcatatttttttccaatcccatctaatccatatgggacaggaataaccgaacaagcccttagttgagatttaaacccacacaatctcactcaatccatgtggatttttttttt

SEQ ID NO: 10907 - DNA, 1792 bp, Zea Mays
ccattacaccaaccactctcgggctctgctctatttatggaggagcagccagctacaggctacagccgtggcgaaagcacacacggatcaatcacactcactcgcggccattgtcctgcccgtgcgtgctctgccttttcaggcgatcgaccaaccaacttctcgtcactgccatggctctgctctccgacctcatcaacctcgacctctcgggccgcaccgggaagatcatcgccgagtacatctgggttggcggttccgggatggacgtcaggagcaaagccaggacgctgtccggacctgttgatgaccccagcaagcttccgaagtggaacttcgacggctccagcaccggccaagctccgggcgacgacagcgaagtcatcctttgccctcgggccatcttcagggacccgttcaggaaggggcagaacatactggtcatgtgcgactgctacgagccgaacggggagccgatcccgagcaacaagcggcacggggccgcgaagatctttagccaccctgacgtcaaggctgaggaaccatggttcgggattgagcaggagtacacccttctccagaaggacaccaagtggcctctcggttggccgctgggcggctaccctggccctcagggaccttactactgcgccgtcggagcggacaagtcctacgggcgggacatcgtggacgcgcactacaaggcctgcctctacgccggcatcgacatcagtggcatcaacggggaggtcatgccggggcagtgggagttccaggtcggtcctgccgtcggcgtctcggccggcgaccagctctgggtggctcgctacattcttgaggtagacgaggatcaccgagatcgccggcgtggttgtctccttcgaccccaagccaattccgggggactggaatggcgctggtgcacacaccaactacagcaccaagtcgatgaggagcgacggcgggtacgaggtgatcaagaaggcgatcggcaagctgggcctccggcaccgggagcacatcgccgcgtacggggacggcaacgagcgccgcctcaccggccgccacgagaccgccgacatcaacaccttcgtctggggcgtcgcgaaccgcggggcgtcggtgcgggtgggccgcgacaccgagaaggaaggcaaaggctacttcgaggaccggaggccggcgtccaacatggacccgtacgtggtgacctcgctgatcgcggagacaaccatgctgtgggagcccagccactccaacggcgacggcaagggcgccgcggctccttgatttgattctgcggagactgagctctgtgtgtgagccggcctgcgtagatggcaaatgggactgaccctgtcagaaacttgagatgaccataataatagctgcagtgtgctcgttctggggttggataagacccaagaactttttttagctttcttcgaacaagtaatcatggtgctgaaccaacacagatgtgctactaaacacatctaacgagtcaaacgccgaagcatatcccaacgcacaaccccggttaatcttgttacccatggattgaatgagattgaaaaaaattaagaaagagtttgatttagggtttgttcgctttcctctcaatctatatggattgggtgggattggatgggtttaaatcccgaacaagttaaaatccttcatatttttttccaatcccatctaatccatatgggacaggaataaccgaacaagcccttagttgagatttaaacccacacaatctcactcaatccatgtggatttttttttt

SEQ ID NO: 10908 - DNA, 2285 bp, Zea Mays
accgccccgtcgttcctcccaatgctccgcacccggacccgccctcgcccacgcgcacgccgcgcgcccgcgacgccgtagcagcgcgcgccgtcgagtggtggggctaggatctgcgtcgagtgatgagaaaggcagcgtcgacggcgacggcgggggcgggggctaccttccgccgccgcgcgatggaggggctggcgaccgtgctgctcctgtacgcgctcctcgtgctcgccctcgagtcgccgctcgtctccacctcgccattcggtggcgccgcgggcggtacagcgcggaagctccacctctccttcggcgcaggcgagcgcgcggcgcccgcgcgccccgcgtcggcgtccgtccccggcgcgtcggcgcacgggcaggatcatcggctctcccgcttcgccaccggcctcgacgtccgcctcctcgactccgcccgctccggcgcgctccgccggtccatagcggacgccgtcgcggcgggtgcccgcgcgttctccgacctcgaggccctcgaccccgccgtcgtcgccgcgccctccggcgagagcgacgcggccaggtgcccgcactcgatcgcgctcaccgcggaggagctcggcgcgcggggccgcgtggtggagctgccctgcgggctcgcgctggggtcccacatcacggtcgccgcgacgccccgggcgccgcacgaggagcggaaccccgcgatcgtggtgctcagggacggggagcggcacgccatggtgtctcagttcatggtggagctgcaggggctcagggcggtcgacggcgaggacccgccccgcgtgctccacttcaacccgcgcctccgcggggactggagcggccacccggtgatcgagcggaacacctgctaccgcatgagctggggcgccgtgcagcgctgcgatggatggaggtcacgcccggatgaggagactgtggatgggttggtcaagtgcgagaagtggattagggacgatgatgacaggttggagaaatcgaagacaacatcaaagacggcatggtggctgaatcggctgatcgggcagaaagaggaggtcaatttcggttggccatttcctttcgtggagggcaggctctttgttcttactctcagtgctgggttggagggttaccatgtgagcgttgatgggcgacatgtcacttcgtttccttaccgcactgggtttgtgttggaggacgctacaggcctgtcactgaatggggacctagatgtgcattcagtgattgcagggtctttgcccactacacacccaagttttgtgccacagaattatctggagttttctactgtttggcaggctcctctgctgcctgatgagccagttgagattttcattggcattctgtcagcagccaatcattttgctgaacgtatgggtgtgaggaagacatggatgtctgttgtccacaagtcaccaaacatggtggctcgtttcttcgttgcactgcatggcagaacggaagtgaatgcggagttgaagaaggaagctgaattttttcgggacattgtttttgtgcccttcctagacaactatgatcttgttgttatgaagactcttgcaatatgcgagtatgggcttgcaaactttggtttagccagggtatttggaattcctgtccgtacatttactcatgaggtggtgacattatggtacagagctccagaaattcttctgggagaaagacagtattccatgccagttgatgtatgggtacttggtacaccaaatgaacaaagttggccaggagtcacctctttgcctgatttcaagtcggctttcccgaagtgccagtctcaggatcttgcagcagttgtcccaaatcttgaacccgctggtttggaccttctctctaaaatgcttcggtacgagccaagcaaaagaatcacagccaggcaggctcttgaacatgactacttcaaggaccttgagatggtacaatgacctgtgttgttcttagtgtttgcatctgtatgagttgaggtttgtttcattccttttatgaccaccgatctttctctgtctccctctctgatctgcatttttgtcttagagctggataatttggaatgtggtgtgttttgagatgcatgtattggataatgtcgaatagattaccaccctgtttttctctacatctccacagaagtctgatgctgaatcttttttaatgctccctctaggctctagcctatgtaacattggtcccttaaattttattataatcaattgtttttgtgcaactttttaagtaac

SEQ ID NO: 10909 - DNA, 1620 bp, Zea Mays
gcaagatgcctagactccagaaggtctacctctagatactgcggctacctaggtgagaactgggtctcctaggctgtccaagcgacataccactatctcccgctcctaaggaatagtactgtgtcatcgcccacgctatggttgagtgttgttggctcctacagcttttctaggagcctcacgtcccacttgctagtgcgaccattgtctattgtcacaatgtcaatgttgtctacatgacagccaatctggttcatcactgatgcaccaagcacatcgagattgacatacacttttttcgcaagaaggtggctttaggacaagtatgggtgctttgcgtcttatctttgcactagtgcatggacatcatgaccaagggcttgcctatacagttgttcactgagtttagatccaggcgttgcgtccgagatccttccactatgactacaggtggatgttagagatatgtatagacatgtatacctttctactcatcttacttgtacatcaagccatacgacctatataatgaaaggtcctcgccccacaatagatgtgtggtgtttccctatttctctacaagttctacaataatcatgatttgtaactttttccgactgaatataacaagaacataccttgtaatggttaatacaaataacagatatcacactgttttcgttcctttttttttgccagctaatttgtgctgctaccttgtcttttcaatctccttatcaaggaaaatcaatattgtttctgtggcatggtttggtgcaatgccttctctgatcatcctcctcaaatatttgccagcttcctttagcctaccagctttcgcattaatactaattaacgtattaaaagtaacaacatctggcttcatgccacttctgatgatctgctcaaacaagcagcctgcttcttcaacctttccgacctttcccaactgactgatcaaagtgttatacatgacaatgtccatgtaaacacctttctttgacaaccgatcaataattgtcctagcaacatctgctttccccatcaggccgagaccttgaatgattagattatatgttgctacatcattagggcagagctgtccacccctctcatgaagaactgcccacacctgtttcaaatagcccttcttgacaaacgaggtcatcagtgaattgtatgtataacttgtccctttgtttcctagattcgtaaagatctcaaataacttgcaagcaacactcaacttccctttggctaaaaaaattgacaagtatgtattgatcatgtcagcatcaaaagtcttggggcccataccttccaccctctgccctctgtgcattgtaaatacaacagagctgttcaaactgtcagcatgtttagcaagatggtccaagtgtggtgatagtgtccaatcatccttgggatcactgtttgggatttcttcatcagtacctgtatgtcccacatggttaaccaaactcatcacatcctccatattgccatcaaaggaaaacaatggtgtcccatctttctctctgccgtgaggtcctctcaaggcaaccatcatgtttgatttccaccgaatggcatccggcaatacagtgctgtcccttataa

SEQ ID NO: 10910 - DNA, 766 bp, Zea Mays
atgactaaagatttagtcacaagttgtaatttactagaagatcgggtgaaatgttgagctattacaagggtggctaatggatcgtacacttaaggggtaagaacagtcacatagatgattgactcttgtacacatgagagattgttgaatatatgtcgaagaggcaatcatgatctaaaagaatactaatgagcctttagattagtagattagcaggagtttatatatacaaaagggttgacatgctagagagggccatcgttggcacctctctctataaggttgcgggcacccaagacaccaccgttgtttctcttgttgcatgtgtgatgcgagcacactcacgtcacaacattttatttctgcacatgtggataccgtaaagacactgttgttgttgttgttacagtgtcaatcaacaactagcttgacgaacacggacgaatgtgttgttgctgttacatgagggcgtatgtcgacgcgctcttctttcgatgtgtcgtgcatcatatagtaatgattcatgaccctctactcatacagtatttttttggttgaacatgataaatatgctagtgcatagcgtatatatttcgctaccttttgtccatacctgatagcgtgatgctgttctgtacgctgaggaataaaaaattcagcatcaatcatcacaatccttgcaatgcaaaaacaaaaaaggaaaacattagcgtggattccattggtgatgatatttttaagccgaacaacagacaacagtgtgaat

SEQ ID NO: 10911 - DNA, 1196 bp, Zea Mays
gaaaaatccagagcggcgcgcgggaggcgacttctcctaggtcgcgtctcccgcgacttctcctaggccacgcgacgctagcagcgccatggctgaactgaaagcaaagaggggtagtcgtacttacctcacatggacagatgcgatggatctagctcttttggaagttcttgtggagcatcacaataatggagaccgtggtcaaaatggttggaagccacatgtctacaatgctgccataagaaatgtgaaggataagtgcaatgtggatatcacaaaggataatatttcggcaaggtgcaagacctttgataagcactatgaaatcattagcaagatactatcgcagagtggctttgggtgggattgggagaacaatagactttctatggacaatgaagatgtttagtttagatatgtggaggctaacaaaggagcagcatgctacaagacaaaagtggtgaagaactgggatgcaatctgcactatatactccaaagaccatgccaatggtgaaggtgccaagacagggactgaaagtggtcaagatgtggtgaatgacagtcctacaaatgccaatgaaaactctccggtgttagctccaaagaagcagcgaactggtgatgcaattatgggtgtacttactgatatgaaagcttcatttcaggaggctatgcagtccaatgcacctttagaattgccaaagaagacggctccgtctaagatccttgcagcgcttcaagaaattcctgatttacctcgtgaagacatgctacgatcttatggtatgttgctaagccgtgatgatcgcatatttgaagctcttatggagctcccaatggaaatgaggaaagattggctgctgtttgagaatgagaggaagtgaagtatgtggagacaacatagtcttttgctactccaggatgctagttaaaacttgttctcctagttagttagtggagaaagactttgcttttgctacaatgtagtagttaagaacttgttgaaatattaactagttatcgtcatgttgtattgtcacaggtattgtagtatttatttgtgatctgagtgatctgaatgttcacttgctttctcctccatgctataagatattagttgctgtagatatttatttttagaatattgttgttggcaagaactattttaaaaatattagctgctgttgtcatggt

SEQ ID NO: 10912 - DNA, 1236 bp, Zea Mays
aaccaccgctggcctgtagtgccgtccgtgcctgttgcctgccaacgcgcgtcgcggccggaatcatcgccaacctgccggtcggtgaaaacagtaaaagttagcaatctttcattaaatgctttgaaaagagagatcacagagttcttcagtttctcgggagatatagaatatgttgaaatgcaaagtgaatctgaatggtcacagcttgcttatgtcacatttaaagactcacagggagcagacactgctgttcttctctcgggggcaacaattgtggatcgtgctgtcattataactcctgctgagaactatcagctgcctcctgaagcacacaaacaattatcgggagcaaacgtctctactgaatcagcagtgaggaaggcagaagatgttgtgagcagcatgctggccaagggcttcgtcctcagcaaagacgcactcaacttggcgagatcatttgacgagcgtcacaacatcctatccaacgccactgccactgttgcatccctagaccgccagtatggcctgagcgaaaagatcagtctcggaagggccattgtcggcagcaaggtcaaggaggtggacgagcggtaccaggtctcagaactcaccaagtccgccttggctgccgccgagcagaaagccagcgtcgcgggctccgctatactgagcaaccagtatgtctcggctggtgcctcgtggctaacaagcgcgttcgatatggtaacgaaggcagcgggcgacatgacctcgatggccaaagataaggtggagagggccgaggaggagaggaaagccatcatgtgggaggagaggagtgggctggtcagcgagtacgcgaagatccatcttgacgagccctcttcgtgggagcccgcggttctgcctctggaatcagtggacgagcagaagctccaagctgtctgacacgcacagaccgagtgtctcgcacgaaattcttttgcagctcgtcctatatatagattgttctttttcgttgatgcactggattaaaacaagtgcgcttgtcggccagtgccgtgtaaatttctgagagttggtcttgtgttattaccaggttttgttcgtttcttttgttttggagagagtggtgctaccagcattactacactagactactctgtgtgaacggaatactactgtactttgtctcttctactactactacagaaacagaatacaacttccttcgttagattcagattaatacaa

SEQ ID NO: 10913 - DNA, 1564 bp, Zea Mays
cgcgttgctaccaccgcggcttccttctctacccttccctcgcgtcgccatcgcaagagtatctcaactccgcctcgagacctcccccctcgctggtctcagccatggtgaaatattcgacggagccgaccaaccccaccaagtccgctaaggccatgggtcgtgacctacatgttcacttcaagaacacacgtgagacagcttttgcccttaggaagttgtcactcaccaaggccaaaagttaccttgaggatgtgatcgcccacaagcaggccatccctttccgtaggtattgtggtggtgttgggcgtactgctcaggctaagtctcgccactcaaatggtcagggacgctggcctgtcaagtctgctagattcattctagaccttctcaagaatgcagagagcaatgctgaggtgaaaggacttgatgtggataccatctatgtgtctcacattcaagttaatcaggcttagaagcagcgacgcaggacataccatgctcatggacgcatcaaccataacttacatgtcctccccatgccacatcgagctcatcttgtcggagaaggaagagccagtgaagaaagaggctgagtctcagattgcaaccaggaaggcttagagaaggggctctatcttctgtgattggcttagtacaagttttggctgattatttgttgtctcatactgtttacctgagtattgtttgcaagtgctttatcactgtccgaactgtgcatgcaattcactggtctagagaattgtccgtggattgtttcatatttgcgcgtatggctcatgtctgttgctttgctttaatctgtaccgaacattaagtgtagcattaacaatctgaagcgaacattaagagtagggttgtcctgcttctgcaattttagttgtcagtaaaatatctgtttctgaaagcacttgccattcctttttaatatcaggtgagctgaagtcaactaaggtgtatgagaaatgggctaaaaagatctcagggatggagccaccaacaaatccgctagagaggagagcgaacgcagggttgagcggaaaaaacagttcaactccatcctctcgaacatcatgtccaagtgtgactccaaggcgagcagctcagagcccacgaaagaagagtttgagcaagcgcaacagaggctggagagcagaagggccaagaggcgcaagtgatgctgctgccagccttcttgccctatgctgaacattgtctgaaccttttggtgtgacctgaatttaccagcatgcaagtgatggttctaagacccagttttagcgtgtcagagtgtgtgtcatatctcttgtcctctcacggtacactatgttgtatggttatcggttatcaccttgccgagagggaagctctatttgatttgaaagtatcatgacatattttaccgcgacaattatcattacacatttcttcaagttatgttgcaagaataaaaattggcttcagtttcaaaattactatgcttgtcttagttgacagcttttttttgtcattacatacttgaattttcaatggtaaaatttag

SEQ ID NO: 10914 - DNA, 1264 bp, Zea Mays
cgcgttgctaccaccgcggcttccttctctacccttccctcgcgtcgccatcgcaagagtatctcaactccgcctcgagacctcccccctcgctggtctcagccatggtgaaatattcgacggagccgaccaaccccaccaagtccgctaaggccatgggtcgtgacctacatgttcacttcaagaacacacgtgagacagcttttgcccttaggaagttgtcactcaccaaggccaaaagttaccttgaggatgtgatcgcccacaagcaggccatccctttccgtaggtattgtggtggtgttgggcgtactgctcaggctaagtctcgccactcaaatggtcagggacgctggcctgtcaagtctgctagattcattctagaccttctcaagaatgcagagagcaatgctgaggtgaaaggacttgatgtggataccatctatgtgtctcacattcaagttaatcaggcttagaagcagcgacgcaggacataccatgctcatggacgcatcaaccataacttacatgtcctccccatgccacatcgagctcatcttgtcggagaaggaagagccagtgaagaaagaggctgagtctcagattgcaaccaggaaggcttagagaaggggctctatcttctgtgattggcttagtgagctgaagtcaactaaggtgtatgagaaatgggctaaaaagatctcagggatggagccaccaacaaatccgctagagaggagagcgaacgcagggttgagcggaaaaaacagttcaactccatcctctcgaacatcatgtccaagtgtgactccaaggcgagcagctcagagcccacgaaagaagagtttgagcaagcgcaacagaggctggagagcagaagggccaagaggcgcaagtgatgctgctgccagccttcttgccctatgctgaacattgtctgaaccttttggtgtgacctgaatttaccagcatgcaagtgatggttctaagacccagttttagcgtgtcagagtgtgtgtcatatctcttgtcctctcacggtacactatgttgtatggttatcggttatcaccttgccgagagggaagctctatttgatttgaaagtatcatgacatattttaccgcgacaattatcattacacatttcttcaagttatgttgcaagaataaaaattggcttcagtttcaaaattactatgcttgtcttagttgacagcttttttttgtcattacatacttgaattttcaatggtaaaatttag

SEQ ID NO: 10915 - DNA, 1521 bp, Zea Mays
cctgatcaatcggacccgaaaactcgtatacacaatctttcgcgttgctaccaccgcggcttccttctctacccttccctcgcgtcgccatcgcaagagtatctcaactccgcctcgagacctcccccctcgctggtctcagccatggtgaaatattcgacggagccgaccaaccccaccaagtccgctaaggccatgggtcgtgacctacatgttcacttcaagaacacacgtgagacagcttttgcccttaggaagttgtcactcaccaaggccaaaagttaccttgaggatgtgatcgcccacaagcaggccatccctttccgtaggtattgtggtggtgttgggcgtactgctcaggctaagtctcgccactcaaatggtcagggacgctggcctgtcaagtctgctagattcattctagaccttctcaagaatgcagagagcaatgctgaggtgaaaggacttgatgtggataccatctatgtgtctcacattcaagttaatcaggcttagaagcagcgacgcaggacataccatgctcatggacgcatcaaccataagtctatctaactaaagttgaagttttgctatgcgatgaactgttcttcatttggagcttaacattctgtttgcctacctggtccagcttacatgtcctccccatgccacatcgagctcatcttgtcggagaaggaagagccagtgaagaaagaggctgagtctcagattgcaaccaggaaggcttagagaaggggctctatcttctgtgattggcttagtacaagttttggctgattatttgttgtctcatactgtttacctgagtattgtttgcaagtgctttatcactgtccgaactgtgcatgcaattcactggtctagagaattgtccgtggattgtttcatatttgcgcgtgagctgaagtcaactaaggtgtatgagaaatgggctaaaaagatctcagggatggagccaccaacaaatccgctagagaggagagcgaaggttgagcggaaaaaacagttcaactccatcctctcgaacatcatgtccaagtgtgactccaaggcgagcagctcagagcccacgaaagaagagtttgagcaagcgcaacagaggctggagagcagaagggccaagaggcgcaagtgatgctgctgccagccttcttgccctatgctgaacattgtctgaaccttttggtgtgacctgaatttaccagcatgcaagtgatggttctaagacccagttttagcgtgtcagagtgtgtgtcatatctcttgtcctctcacggtacactatgttgtatggttatcggttatcaccttgccgagagggaagctctatttgatttgaaagtatcatgacatattttaccgcgacaattatcattacacatttcttcaagttatgttgcaagaataaaaattggcttcagtttcaaaattactatgcttgtcttagttgacagcttttttttgtcattacatacttgaattttcaatggtaaaatttag

SEQ ID NO: 10916 - DNA, 1386 bp, Zea Mays
gcctgatcaatcggacccgaaaactcgtatacacaatctttcgcgttgctaccaccgcggcttccttctctacccttccctcgcgtcgccatcgcaagagtatctcaactccgcctcgagacctcccccctcgctggtctcagccatggtgaaatattcgacggagccgaccaaccccaccaagtccgctaaggccatgggtcgtgacctacatgttcacttcaagaacacacgtgagacagcttttgcccttaggaagttgtcactcaccaaggccaaaagttaccttgaggatgtgatcgcccacaagcaggccatccctttccgtaggtattgtggtggtgttgggcgtactgctcaggctaagtctcgccactcaaatggtcagggacgctggcctgtcaagtctgctagattcattctagaccttctcaagaatgcagagagcaatgctgaggtgaaaggacttgatgtggataccatctatgtgtctcacattcaagttaatcaggcttagaagcagcgacgcaggacataccatgctcatggacgcatcaaccataagtctatctaactaaagttgaagttttgctatgcgatgaactgttcttcatttggagcttaacattctgtttgcctacctggtccagcttacatgtcctccccatgccacatcgagctcatcttgtcggagaaggaagagccagtgaagaaagaggctgagtctcagattgcaaccaggaaggcttagagaaggggctctatcttctgtgattggcttagtgagctgaagtcaactaaggtgtatgagaaatgggctaaaaagatctcagggatggagccaccaacaaatccgctagagaggagagcgaaggttgagcggaaaaaacagttcaactccatcctctcgaacatcatgtccaagtgtgactccaaggcgagcagctcagagcccacgaaagaagagtttgagcaagcgcaacagaggctggagagcagaagggccaagaggcgcaagtgatgctgctgccagccttcttgccctatgctgaacattgtctgaaccttttggtgtgacctgaatttaccagcatgcaagtgatggttctaagacccagttttagcgtgtcagagtgtgtgtcatatctcttgtcctctcacggtacactatgttgtatggttatcggttatcaccttgccgagagggaagctctatttgatttgaaagtatcatgacatattttaccgcgacaattatcattacacatttcttcaagttatgttgcaagaataaaaattggcttcagtttcaaaattactatgcttgtcttagttgacagcttttttttgtcattacatacttgaattttcaatggtaaaatttag

SEQ ID NO: 10917 - DNA, 4860 bp, Zea Mays
cccttttctctcgcgctcgcaacggcggcgggcggcggctgcttctccgtctcctacttccccgcaaacttgtctcgtattcctagcgcagccggggaacactcccggcctccgcccgagcggagcggagcgtttcgtccgcgccgctgactccgaggagttcgtttcgccgcgctgtctccctgaatcctaatcgtccttttcgcgtttggctcgactgacgcgttgattcctgcttctttcgttggtctcccattctttttttacaagaactaaaaaaataaaaattctttgggttgggatggcatcacctggccaaatgacagcaagcaatctgttacggactgaaggctttcctggaaatatgtcttggatcaagaagattgcggatgactcaacactccttccatcaacagcatctttgttgcccacgtctgcaaagagtaatgactcataatatccgattgttgtcatctcctggggccgtggcatccaaggggtttgacagcccattagttgagaaacctgatactgcatcggatgttaaaattattcacttgtaccgtataccatttcttcaagaaagtgaaaccatggagctgctcaggaaagtgaaggcgaaggtttctgctaatattgttgatatactgacagagcagtgcttcaacattcaattggacaattcactcactcctgagaaacttacaatgcttcattggctcttagcagaaacttatgaacctgagaagttgcagactaggagctttctggaggatgaagtatctagaaattcttgtactgtcattgttgaggttggtccccggatgacattttcaacggcgttctcgaccaatgctgtctcaatctgtaaatctctctcattagtagaagtgacacgattggagagatcaagaagataccttttgtgcctagagcctggtagtgacccacttgatgaaggtcagctcaaagaattcactgcattggttcatgatagaatgacagagtgcatttatcgcaataagctcacatcatttcaatcagatgtagttcctgaacctgtctgcattgttccagtcattgaaaggggagaagaagcattgaaagaaataaatgtgaagatgggacttgcttttgataaacaagatattgactattatacacacctttttagagatgatatcaaacgcaatccaactactgtggaactttttgatattgcacaatccaacagcgaacatagcagacattggttttttaatggaaagcttgtaatagacggagagaccatgccaaccactttgttccagttagtgaagagtcccctaaaagccaacctcaataactctgtcattggttttaaggataactcgagtgcaataaaaggattcccagtaaatcagctacgcccaacaattccggggttcacttcaccattatccattatcatgcgtgagctagatattttattcacagcagaaacccataatttcccatgtgctgttgcaccataccctggagccgagacaggtgcaggtggccgtataagggacacacatgccactggaaagggttcttttgtcgttgcttccactgctggttactgtgttggtaatctgcgaattgacaattcaaatgcaccctgggaagatccttcattttcttacccagtgaatctggcttctccattgcaaattcttgttgacgctagtgatggtgcatctgactatgggaacaagtttggtgagcctctaattcagggatataccagaacatttgggatgaggttgctaaatggggagcggcgtgaatggttgaagcctataatgttcagtggagctatagggcaaattgaccatgcacacatatcaaagggtgacccagaaattggcatgctagttgtgaagattggtggtccagcatacagaattggtatgggcggtggtgctgcctcgagtatggttagtggccagaatgatgcagaacttgatttcaacgcagtacagcgtggagatgctgagatggcacagaaattgtatcgcgtagtcagggcatgtgcagaaatgggagagagcaatcctatcatcagcattcatgatcagggcgcaggaggaaattgtaatgttgtgaaggaaataatatatcccaagggagctgaaattgatatccgttcaattgttgttggtgatcatacattgtcggtcttagagatatggggtgctgagtaccaggaacaggatgcactacttgtaaaacttgagagcagaagcctcttagaatcgctttgtgagagggaaagagtttcgatggctgtcattgggaaaattgatggcagtggaaaaattgtgttgattgatagcgctgctgtggagtattccaagctgaatgacctccctcctccaacccctgttgaagaacttgagcttgaaaaggttttaggagatatgcctcagaagaccttcgagtttaggcgtgtttctcaagtcacagagcccttggacattgcacctggggtaacactattagatgctctgaagcgagtattaaggctcccatctgtgtgttcaaaacgtttcttgaccactaaggttgataggtgtgtgacaggtcttgttgcacaacagcagacagttggtcctctccaactcccgcttgctgatgtggctgtgattgcacagacgtacacagacctaacaggtggtgcttgcagcattggagaacaaccaataaaggggttgcttaatcctaaggccatggccagacttgctgttggggaggccttgactaatcttgtttgggctaaggttacatcacttgctgatgtgaaagcaagcgggaactggatgtatgctgcaaagcttgatggtgaaggtgcagatatgtatgatgcagctgttgcattggctgactgtatgattgaacttggtattgcaatagatgggggaaaggacagtctttccatggcagctcaatgtgatggtgaagtcatcaaggctcctggaaatctggttatcagtacatacgtgacatgtcctgatataacattgacagtaacccctgatttgaagcttggtgaggatgggattcttctacatattgatctcgctaaaggaaatcgccgtcttggtggttctgctcttgcacaagcatttgatcaaattggaaatgactgcccggacattgatgatgttctgtacttgaagaaggtatttgaggccattcaagaattgctcagtcaacgtcttatttcagcaggccatgacataagtgatggtggccttattgtttgtgttcttgagatggcatttgctggtaactgtggttttaagcttgacatagacttagaagataggagccttattgaaggactttttgcagaggagcttggcctcattattgaagtacactcgaaatatctcaacattgtgaagcaaaagcttgaaatagcaggcatttctgctaatgttattggagaagttactaactcaccagaaatagaagtttttattgatggcaatctgcatctcaaggaaaaaacttcagatctcagggatctgtgggaggaaacaagcttccagcttgaggagttacaacgtctgaaatcttgtgtaaaacttgagaaagaaggattaaaatgcaggacatcaccatcatggtctctgtcttttaccccaaaattcacagatgggaaactgttgactgcttccttgaaaccaaaggttgccatcattcgtgaggaagggagcaatggggacagggaaatggctgctgcattccacgctgctggatttgaaccatgggatattacaatgtcagacctcttggctgggaagtcttctctcaaggagttccgtgggattgcatttgttggtggtttcagctatgcagatgtgctggattcagcgaaaggctgggctgcatcaatcaggtttaaccaacccctcattcagcaattccaggacttctaccataggccagacacgtttagccttggagtgtgcaatggttgtcagcttatggctcttcttggctgggtgccaggatcaggtgttggaggttctcttggtacaggtggagatatgtcccagccgaggtttattcacaatgaatctggtcgttttgagtgccggtttaccagtgtgtccattggcgattctcctgctattatgttcaaagggatggaaggttccaccttaggtgtttggagtgctcatggtgagggaagagcttttttcccagatgaaaatgttctagctactgttgtgaagtcaaatctggctcctgtgcggtattgtgatgattctaacaatattactgagacctatcccttcaaccctaatggttctccactgggtatagcagccctttgctcacctgacgggaggcacctggctatgatgccgcatccagagcgttgcttcatgatgtggcaatatccatggtatcccaaggaatggcaggttgagaagagtggccccagcccttggctgcgaatgttccagaatgctagagaatggtgttcatagtgcagggaagcttcctgctgcaaggatgtagtcatccaggcaccggctgctacgagtatatggatgattggtggttgtatggcccaattgatgacccctttttggcagaataaatgtgttttgaccatcaatacattatcttgtaataatgtatcgaatttggaattttgaaaatggagaaccgtctggtttccgaagtcggaaggcctcagatatgactccactagtttaaaacatttactagtggaaaagaaatgagtgggttaattaataatgcaaaaggtacattgggaagacactgtacctagggatgaaaacggacggaaacggacgg

SEQ ID NO: 10918 - DNA, 4757 bp, Zea Mays
ctttttctcattcccttttctctcgcgctcgcaacggcggcgggcggcggctgcttctccgtctcctacttccccgcaaacttgtctcgtattcctagcgcagccggggaacactcccggcctccgcccgagcggagcggagcgtttcgtccgcgccgctgactccgaggagttcgtttcgccgcgctgtctccctgaatcctaatcgtccttttcgcgtttggctcgactgacgcgttgattcctgcttctttcgttggtctcccattctttttttacaagaactaaaaaaataaaaattctttgggttgggatggcatcacctggccaaatgacagcaagcaatctgttacggactgaaggctttcctggaaatatggtaaaaatatgtggtttaaatcctgcgagaagtcttggatcaagaagattgcggatgactcaacactccttccatcaacagcatctttgttgcccacgtctgcaaagagtaatgactcataatatccgattgttgtcatctcctggggccgtggcatccaaggggtttgacagcccattagttgagaaacctgatactgcatcggatgttaaaattattcacttgtaccgtataccatttcttcaagaaagtgaaaccatggagctgctcaggaaagtgaaggcgaaggtttctgctaatattgttgatatactgacagagcagtgcttcaacattcaattggacaattcactcactcctgagaaacttacaatgcttcattggctcttagcagaaacttatgaacctgagaagttgcagactaggagctttctggaggatgaagtatctagaaattcttgtactgtcattgttgaggttggtccccggatgacattttcaacggcgttctcgaccaatgctgtctcaatctgtaaatctctctcattagtagaagtgacacgattggagagatcaagaagataccttttgtgcctagagcctggtagtgacccacttgatgaaggtcagctcaaagaattcactgcattggttcatgatagaatgacagagtgcatttatcgcaataagctcacatcatttcaatcagatgtagttcctgaacctgtctgcattgttccagtcattgaaaggggagaagaagcattgaaagaaataaatgtgaagatgggacttgcttttgataaacaagatattgactattatacacacctttttagagatgatatcaaacgcaatccaactactgtggaactttttgatattgcacaatccaacagcgaacatagcagacattggttttttaatggaaagcttgtaatagacggagagaccatgccaaccactttgttccagttagtgaagagtcccctaaaagccaacctcaataactctgtcattggttttaaggataactcgagtgcaataaaaggattcccagtaaatcagctacgcccaacaattccggggttcacttcaccattatccattatcatgcgtgagctagatattttattcacagcagaaacccataatttcccatgtgctgttgcaccataccctggagccgagacaggtgcaggtggccgtataagggacacacatgccactggaaagggttcttttgtcgttgcttccactgctggttactgtgttggtaatctgcgaattgacaattcaaatgcaccctgggaagatccttcattttcttacccagtgaatctggcttctccattgcaaattcttgttgacgctagtgatggtgcatctgactatgggaacaagtttggtgagcctctaattcagggatataccagaacatttgggatgaggttgctaaatggggagcggcgtgaatggttgaagcctataatgttcagtggagctatagggcaaattgaccatgcacacatatcaaagggtgacccagaaattggcatgctagttgtgaagattggtggtccagcatacagaattggtatgggcggtggtgctgcctcgagtatggttagtggccagaatgatgcagaacttgatttcaacgcagtacagcgtggagatgctgagatggcacagaaattgtatcgcgtagtcagggcatgtgcagaaatgggagagagcaatcctatcatcagcattcatgatcagggcgcaggaggaaattgtaatgttgtgaaggaaataatatatcccaagggagctgaaattgatatccgttcaattgttgttggtgatcatacattgtcggtcttagagatatggggtgctgagtaccaggaacaggatgcactacttgtaaaacttgagagcagaagcctcttagaatcgctttgtgagagggaaagagtttcgatggctgtcattgggaaaattgatggcagtggaaaaattgtgttgattgatagcgctgctgtggagtattccaagctgaatgacctccctcctccaacccctgttgaagaacttgagcttgaaaaggttttaggagatatgcctcagaagaccttcgagtttaggcgtgtttctcaagtcacagagcccttggacattgcacctggggtaacactattagatgctctgaagcgagtattaaggctcccatctgtgtgttcaaaacgtttcttgaccactaaggttgataggtgtgtgacaggtcttgttgcacaacagcagacagttggtcctctccaactcccgcttgctgatgtggctgtgattgcacagacgtacacagacctaacaggtggtgcttgcagcattggagaacaaccaataaaggggttgcttaatcctaaggccatggccagacttgctgttggggaggccttgactaatcttgtttgggctaaggttacatcacttgctgatgtgaaagcaagcgggaactggatgtatgctgcaaagcttgatggtgaaggtgcagatatgtatgatgcagctgttgcattggctgactgtatgattgaacttggtattgcaatagatgggggaaaggacagtctttccatggcagctcaatgtgatggtgaagtcatcaaggctcctggaaatctggttatcagtacatacgtgacatgtcctgatataacattgacagtaacccctgatttgaagcttggtgaggatgggattcttctacatattgatctcgctaaaggaaatcgccgtcttggtggttctgctcttgcacaagcatttgatcaaattggaaatgactgcccggacattgatgatgttctgtacttgaagaaggtatttgaggccattcaagaattgctcagtcaacgtcttatttcagcaggccatgacataagtgatggtggccttattgtttgtgttcttgagatggcatttgctggtaactgtggttttaagcttgacatagacttagaagataggagccttattgaaggactttttgcagaggagcttggcctcattattgaagtacactcgaaatatctcaacattgtgaagcaaaagcttgaaatagcaggcatttctgctaatgttattggagaagttactaactcaccagaaatagaagtttttattgatggcaatctgcatctcaaggaaaaaacttcagatctcagggatctgtgggaggaaacaagcttccagcttgaggagttacaacgtctgaaatcttgtgtaaaacttgagaaagaaggattaaaatgcaggacatcaccatcatggtctctgtcttttaccccaaaattcacagatgggaaactgttgactgcttccttgaaaccaaaggttgccatcattcgtgaggaagggagcaatggggacagggaaatggctgctgcattccacgctgctggatttgaaccatgggatattacaatgtcagacctcttggctgggaagtcttctctcaaggagttccgtgggattgcatttgttggtggtttcagctatgcagatgtgctggattcagcgaaaggctgggctgcatcaatcaggtttaaccaacccctcattcagcaattccaggacttctaccataggccagacacgtttagccttggagtgtgcaatggttgtcagcttatggctcttcttggctgggtgccaggatcaggtgttggaggttctcttggtacaggtggagatatgtcccagccgaggtttattcacaatgaatctggtcgttttgagtgccggtttaccagtgtgtccattggcgattctcctgctattatgttcaaagggatggaaggttccaccttaggtgtttggagtgctcatgccctttgctcacctgacgggaggcacctggctatgatgccgcatccagagcgttgcttcatgatgtggcaatatccatggtatcccaaggaatggcaggttgagaagagtggccccagcccttggctgcgaatgttccagaatgctagagaatggtgttcatagtgcagggaagcttcctgctgcaaggatgtagtcatccaggcaccggctgctacgagtatatggatgattggtggttgtatggcccaattgatgacccctttttggcagaataaatgtgttttgaccatcaatacattatcttgtaataatgtatcgaatttggaattttgaaaatggagaaccgtctggtttccgaagtcggaaggcctcagatatgactccactagtttaaaacatttactagtggaaaagaaatgagtgggttaattaataatgcaaaaggtacattgggaagacactgtacctagggatgaaaacggacggaaacggacgg

SEQ ID NO: 10919 - DNA, 2522 bp, Zea Mays
gtcacaacatcctaatcgatcctggacaactaaggctgtagtctatatagtgcaattgaccgcttctggagaatttgaggaggcgctagcattgtgtaagctacttccaccagaggattcaaatttacgggcagcaaaggaaagctcaatacacataagatatggacactttttgttcgataacgggagttatgaggaggcaatggaacagttttcagattcacatgtggacattacttacgtgttatctctgtacccatctattgttctgcctcaaacaaatattataggtgatcatgacaagctgctggacatgccagaattagcaagggaatcctccgatgtgacagatgagatggaatcatactctttacagcttcaagaaccagatgataaatctccattggaggtaaagaaaatgagtcacaatgctctagctgcccttgtgaagtatttgcagaagaaaagaagtggcataattgagagagcgacggctgaagtaacagaggaggtggtctctggagctgttcaccacagcttaaaattatctgagccatataagtcaaagaagctgagcaagaaacgagctcagacacatacaagctctattgctagagaaatggcaactgtactggatacttgtctgcttcaagctcttattcttactgggcagtcatcaggggcaatagagttgttgaaaggactcaattattgtgacctgaagatatgcgaagagtttttgaaggaaaggagagaatatatggttttacttgaactctataaaagcaatgaaatgcaccgtgatgctctccaactactcaatcaattagttgaagaatcaaaatctgaaatggagaatacatattttaataaaaaatttaactctcaaatgatacttgaatatctcaggcccctttgtagatctgacccaatgctggttttagagtcttccttgtacgtccttgagcgcaacccatcagaaactattgagctctttttgtctgaaaatgttccagcagatttggtaaattcatatctgaagcagcatgccccaaatttgcagtcaacttacttagagctaatgctctcaatgaatgatactgggatcaaccctaatctgcaaaacgagctggtacaactgtacctttctgaagttctagactggtacaagattctgaaggaagagggaaactggacagagaagacatattccccaacacggaagaagttaatatctacgttggagagcaattcaggttacaatacagacgcacttcttaagcgccttccccaggacgctctttttgaggagcgagctatattgtatgggaaaataaatcaacacctcagagctctctctctctatgttcacaagcttcagatgccagagcgagcagttgcatattgtgaccgtgtttatgaagaaagagaacaacaaccgtccaaatcaaatatctattttaatcttctacagattcatctgaacccaagaaaagctgaaaaggaatttgagcagaaaattattccagttgcatcacaatactctggaatccaaaaggctagtgctactaagcccaaagggggtcgcgtaggtaaaaaggttgtagagattgagggggctgatgacatacgctttagccccagcggaacagatagtggccgaagtgatggtgatggagatgatgtaaatgaccgaggccctataatgttaaatgaagcactggaactgttgagccaacggtgggacaggataaatggtgctcaggctcttaggctgttaccaagagatactaaactccaggatcttgtatcatttcttgagccactattgcgtaactctagtgaacatcggcgcaattatttggttatcaaaaacttgattttgcgggcaaacttgcaggtcaaggaggatctgtataatcggtgtcaagctgttgtgaagattgatggagatagtttggttgatgccagcttatggaattccctctctttggcttcacactggattttagtggactgcttcagaagtttttactggagtaatcttcactctcttcagagatcgagtttatagccgtgcgtgtgtgctcgctctctgttttctggccatcgtactggaaaactggaacccctttcttttggttttcatgtacagaatgtaaatgatactgtaaagtttcggttaacagattgatgatggtcttgattatagtgccgcaatgtgtgctccaaataggtttggacattattattattggatccatgtcattataattctctaagttttgaatggcgctattataattcgtatattcggaggtctaccattttaattctctcttcttaatcgccattacaatttgtcaattcggagatctgccattataataatctctctccacatccatggcatttcggacacctgccgtatactggtatatgagttcactgtcactgtcagtcgtgtatgcgtaccgtataggaacatctatgcgcgtctgtcaactttgttagactgagac

SEQ ID NO: 10920 - DNA, 2727 bp, Zea Mays
ctcagtcacaacatcctaatcgatcctggacaactaaggctgtagtctatatagtgcaattgaccgcttctggagaatttgaggaggcgctagcattgtgtaagctacttccaccagaggattcaaatttacgggcagcaaaggaaagctcaatacacataagatatggacactttttgttcgataacgggagttatgaggaggcaatggaacagttttcagattcacatgtggacattacttacgtgttatctctgtacccatctattgttctgcctcaaacaaatattataggtgatcatgacaagctgctggacatgccagaattagcaagggaatcctccgatgtgacagatgagatggaatcatactctttacagcttcaagaaccagatgataaatctccattggaggtaaagaaaatgagtcacaatgctctagctgcccttgtgaagtatttgcagaagaaaagaagtggcataattgagagagcgacggctgaagtaacagaggaggtggtctctggagctgttcaccacagcttaaaattatctgagccatataagtcaaagaagctgagcaagaaacgagctcagacacatacaagctctattgctagagaaatggcaactgtactggatacttgtctgcttcaagctcttattcttactgggcagtcatcaggggcaatagagttgttgaaaggactcaattattgtgacctgaagatatgcgaagagtttttgaaggaaaggagagaatatatggttttacttgaactctataaaagcaatgaaatgcaccgtgatgctctccaactactcaatcaattagttgaagaatcaaaatctgaaatggagaatacatattttaataaaaaatttaactctcaaatgatacttgaatatctcaggcccctttgtagatctgacccaatgctggttttagagtcttccttgtacgtccttgagcgcaacccatcagaaactattgagctctttttgtctgaaaatgttccagcagatttggtaaattcatatctgaagcagcatgccccaaatttgcagtcaacttacttagagctaatgctctcaatgaatgatactgggatcaaccctaatctgcaaaacgagctggtacaactgtacctttctgaagttctagactggtacaagattctgaaggaagagggaaactggacagagaagacatattccccaacacggaagaagttaatatctacgttggagagcaattcaggttacaatacagacgcacttcttaagcgccttccccaggacgctctttttgaggagcgagctatattgtatgggaaaataaatcaacacctcagagctctctctctctatgttcacaagcttcagatgccagagcgagcagttgcatattgtgaccgtgtttatgaagaaagagaacaacaaccgtccaaatcaaatatctattttaatcttctacagattcatctgaacccaagaaaagctgaaaaggaatttgagcagaaaattattccagttgcatcacaatactctggaatccaaaaggctagtgctactaagcccaaagggggtcgcgtaggtaaaaaggttgtagagattgagggggctgatgacatacgctttagccccagcggaacagatagtggccgaagtgatggtgatggagatgatgtaaatgaccgaggccctataatgttaaatgaagcactggaactgttgagccaacggtgggacaggataaatggtgctcaggctcttaggctgttaccaagagatactaaactccaggatcttgtatcatttcttgagccactattgcgtaactctagtgaacatcggcgcaattatttggttatcaaaaacttgattttgcgggcaaacttgcaggtcaaggaggatctgtataatcggtgtcaagctgttgtgaagattgatggagatagtacgtgttctctttgccataagcgtgttgcaaatagtgcttttgcaatatatccaaatggacaggctttggtgcattttgtctgctttaaagaatcacagcaaattaaggccgtcagaggagcaaactctgtgaaacgtagataatatggccgtgatccaggtacacccttgaacgggacactgacaaatcaatatcgaggtttggttgatgccagcttatggaattccctctctttggcttcacactggattttagtggactgcttcagaagtttttactggagtaatcttcactctcttcagagatcgagtttatagccgtgcgtgtgtgctcgctctctgttttctggccatcgtactggaaaactggaacccctttcttttggttttcatgtacagaatgtaaatgatactgtaaagtttcggttaacagattgatgatggtcttgattatagtgccgcaatgtgtgctccaaataggtttggacattattattattggatccatgtcattataattctctaagttttgaatggcgctattataattcgtatattcggaggtctaccattttaattctctcttcttaatcgccattacaatttgtcaattcggagatctgccattataataatctctctccacatccatggcatttcggacacctgccgtatactggtatatgagttcactgtcactgtcagtcgtgtatgcgtaccgtataggaacatctatgcgcgtctgtcaactttgttagactgagac

SEQ ID NO: 10921 - DNA, 2406 bp, Zea Mays
gagaaatcctactcagtcacaacatcctaatcgatcctggacaactaaggctgtagtctatatagtgcaattgaccgcttctggagaatttgaggaggcgctagcattgtgtaagctacttccaccagaggattcaaatttacgggcagcaaaggaaagctcaatacacataaggtgatcatgacaagctgctggacatgccagaattagcaagggaatcctccgatgtgacagatgagatggaatcatactctttacagcttcaagaaccagatgataaatctccattggaggtaaagaaaatgagtcacaatgctctagctgcccttgtgaagtatttgcagaagaaaagaagtggcataattgagagagcgacggctgaagtaacagaggaggtggtctctggagctgttcaccacagcttaaaattatctgagccatataagtcaaagaagctgagcaagaaacgagctcagacacatacaagctctattgctagagaaatggcaactgtactggatacttgtctgcttcaagctcttattcttactgggcagtcatcaggggcaatagagttgttgaaaggactcaattattgtgacctgaagatatgcgaagagtttttgaaggaaaggagagaatatatggttttacttgaactctataaaagcaatgaaatgcaccgtgatgctctccaactactcaatcaattagttgaagaatcaaaatctgaaatggagaatacatattttaataaaaaatttaactctcaaatgatacttgaatatctcaggcccctttgtagatctgacccaatgctggttttagagtcttccttgtacgtccttgagcgcaacccatcagaaactattgagctctttttgtctgaaaatgttccagcagatttggtaaattcatatctgaagcagcatgccccaaatttgcagtcaacttacttagagctaatgctctcaatgaatgatactgggatcaaccctaatctgcaaaacgagctggtacaactgtacctttctgaagttctagactggtacaagattctgaaggaagagggaaactggacagagaagacatattccccaacacggaagaagttaatatctacgttggagagcaattcaggttacaatacagacgcacttcttaagcgccttccccaggacgctctttttgaggagcgagctatattgtatgggaaaataaatcaacacctcagagctctctctctctatgttcacaagcttcagatgccagagcgagcagttgcatattgtgaccgtgtttatgaagaaagagaacaacaaccgtccaaatcaaatatctattttaatcttctacagattcatctgaacccaagaaaagctgaaaaggaatttgagcagaaaattattccagttgcatcacaatactctggaatccaaaaggctagtgctactaagcccaaagggggtcgcgtaggtaaaaaggttgtagagattgagggggctgatgacatacgctttagccccagcggaacagatagtggccgaagtgatggtgatggagatgatgtaaatgaccgaggccctataatgttaaatgaagcactggaactgttgagccaacggtgggacaggataaatggtgctcaggctcttaggctgttaccaagagatactaaactccaggatcttgtatcatttcttgagccactattgcgtaactctagtgaacatcggcgcaattatttggttatcaaaaacttgattttgcgggcaaacttgcaggtcaaggaggatctgtataatcggtgtcaagctgttgtgaagattgatggagatagtttggttgatgccagcttatggaattccctctctttggcttcacactggattttagtggactgcttcagaagtttttactggagtaatcttcactctcttcagagatcgagtttatagccgtgcgtgtgtgctcgctctctgttttctggccatcgtactggaaaactggaacccctttcttttggttttcatgtacagaatgtaaatgatactgtaaagtttcggttaacagattgatgatggtcttgattatagtgccgcaatgtgtgctccaaataggtttggacattattattattggatccatgtcattataattctctaagttttgaatggcgctattataattcgtatattcggaggtctaccattttaattctctcttcttaatcgccattacaatttgtcaattcggagatctgccattataataatctctctccacatccatggcatttcggacacctgccgtatactggtatatgagttcactgtcactgtcagtcgtgtatgcgtaccgtataggaacatctatgcgcgtctgtcaactttgttagactgagac

SEQ ID NO: 10922 - DNA, 3617 bp, Zea Mays
accgggtatacgctcatcggttcctcggcgctcgcctcgacctccgactcgaagcggccctcctccctcgccggacgacggcgacggccgtggccgtctaacacatccgtggggaaccgctcccttagttgggcctcctccggccatggtgcacagcgcgtacgatgctgtcgagctggtggctgacgtgccgggccacatcgaggccgtcgcctcccacgctgggaagctcctcgtcgcggtttccgacaccgaaggcttcctctggggctccgactgctccttgcgcatctactccgctccttccccctccgacggcggcggcgagatccggtgggacgggccctacgcgctcgagcggcaggagccgcggttctggcggcgcccgcccttagccatggaggtcagcgccagccgcgacctcctgatctcgctctccgagtggatcgcgctccaccgcctccccgggctcgagaccgtcgctgtcgtctctagcaagacaaagggggccaacgtctttgcttgggacgagcggcggggcttccttgccgtcggtcgacagaagcgactcaccgtcttccgcctcgacagtgggcgagaatttgttgaagtgaaggaatttggagtgccagatattctgaaatcaatggcctggtgtggtgataacatatgtcttggaatcaggcgggaatatatgataataaatagcatgaccggggcactaacagaagtgttttcttctgggaggatcgctcctcctttagttgtgcctctccttactggggaactgatccttggcaaggataacattggggtattcgttgatcaaaatggtaaacttattcaagacggcagaattatttggtcagacacaccagcttctgttgttatacataaaccatatgccgtggcccgcctgccacgacatgtcgagatacgctctcttaggccccccaatgcattggttcagacagttgtgctccgtgatgttcaaaagcttgtccaaactgaccactgtatacttgctgctctatctaactctgttcatggtttgttgcctgttcctattggagctcagatagtgcaattgaccgcttctggagaatttgaggaggcgctagcattgtgtaagctacttccaccagaggattcaaatttacgggcagcaaaggaaagctcaatacacataagatatggacactttttgttcgataacgggagttatgaggaggcaatggaacagttttcagattcacatgtggacattacttacgtgttatctctgtacccatctattgttctgcctcaaacaaatattataggtgatcatgacaagctgctggacatgccagaattagcaagggaatcctccgatgtgacagatgagatggaatcatactctttacagcttcaagaaccagatgataaatctccattggaggtaaagaaaatgagtcacaatgctctagctgcccttgtgaagtatttgcagaagaaaagaagtggcataattgagagagcgacggctgaagtaacagaggaggtggtctctggagctgttcaccacagcttaaaattatctgagccatataagtcaaagaagctgagcaagaaacgagctcagacacatacaagctctattgctagagaaatggcaactgtactggatacttgtctgcttcaagctcttattcttactgggcagtcatcaggggcaatagagttgttgaaaggactcaattattgtgacctgaagatatgcgaagagtttttgaaggaaaggagagaatatatggttttacttgaactctataaaagcaatgaaatgcaccgtgatgctctccaactactcaatcaattagttgaagaatcaaaatctgaaatggagaatacatattttaataaaaaatttaactctcaaatgatacttgaatatctcaggcccctttgtagatctgacccaatgctggttttagagtcttccttgtacgtccttgagcgcaacccatcagaaactattgagctctttttgtctgaaaatgttccagcagatttggtaaattcatatctgaagcagcatgccccaaatttgcagtcaacttacttagagctaatgctctcaatgaatgatactgggatcaaccctaatctgcaaaacgagctggtacaactgtacctttctgaagttctagactggtacaagattctgaaggaagagggaaactggacagagaagacatattccccaacacggaagaagttaatatctacgttggagagcaattcaggttacaatacagacgcacttcttaagcgccttccccaggacgctctttttgaggagcgagctatattgtatgggaaaataaatcaacacctcagagctctctctctctatgttcacaagattcatctgaacccaagaaaagctgaaaaggaatttgagcagaaaattattccagttgcatcacaatactctggaatccaaaaggctagtgctactaagcccaaagggggtcgcgtaggtaaaaaggttgtagagattgagggggctgatgacatacgctttagccccagcggaacagatagtggccgaagtgatggtgatggagatgatgtaaatgaccgaggccctataatgttaaatgaagcactggaactgttgagccaacggtgggacaggataaatggtgctcaggctcttaggctgttaccaagagatactaaactccaggatcttgtatcatttcttgagccactattgcgtaactctagtgaacatcggcgcaattatttggttatcaaaaacttgattttgcgggcaaacttgcaggtcaaggaggatctgtataatcggtgtcaagctgttgtgaagattgatggagatagtacgtgttctctttgccataagcgtgttgcaaatagtgcttttgcaatatatccaaatggacaggctttggtgcattttgtctgctttaaagaatcacagcaaattaaggccgtcagaggagcaaactctgtgaaacgtagataatatggccgtgatccaggtttggttgatgccagcttatggaattccctctctttggcttcacactggattttagtggactgcttcagaagtttttactggagtaatcttcactctcttcagagatcgagtttatagccgtgcgtgtgtgctcgctctctgttttctggccatcgtactggaaaactggaacccctttcttttggttttcatgtacagaatgtaaatgatactgtaaagtttcggttaacagattgatgatggtcttgattatagtgccgcaatgtgtgctccaaataggtttggacattattattattggatccatgtcattataattctctaagttttgaatggcgctattataattcgtatattcggaggtctaccattttaattctctcttcttaatcgccattacaatttgtcaattcggagatctgccattataataatctctctccacatccatggcatttcggacacctgccgtatactggtatatgagttcactgtcactgtcagtcgtgtatgcgtaccgtataggaacatctatgcgcgtctgtcaactttgttagactgagac

SEQ ID NO: 10923 - DNA, 3590 bp, Zea Mays
cccaaaccgggtatacgctcatcggttcctcggcgctcgcctcgacctccgactcgaagcggccctcctccctcgccggacgacggcgacggccgtggccgtctaacacatccgtggggaaccgctcccttagttgggcctcctccggccatggtgcacagcgcgtacgatgctgtcgagctggtggctgacgtgccgggccacatcgaggccgtcgcctcccacgctgggaagctcctcgtcgcggtttccgacaccgaaggcttcctctggggctccgactgctccttgcgcatctactccgctccttccccctccgacggcggcggcgagatccggtgggacgggccctacgcgctcgagcggcaggagccgcggttctggcggcgcccgcccttagccatggaggtcagcgccagccgcgacctcctgatctcgctctccgagtggatcgcgctccaccgcctccccgggctcgagaccgtcgctgtcgtctctagcaagacaaagggggccaacgtctttgcttgggacgagcggcggggcttccttgccgtcggtcgacagaagcgactcaccgtcttccgcctcgacagtgggcgagaatttgttgaagtgaaggaatttggagtgccagatattctgaaatcaatggcctggtgtggtgataacatatgtcttggaatcaggcgggaatatatgataataaatagcatgaccggggcactaacagaagtgttttcttctgggaggatcgctcctcctttagttgtgcctctccttactggggaactgatccttggcaaggataacattggggtattcgttgatcaaaatggtaaacttattcaagacggcagaattatttggtcagacacaccagcttctgttgttatacataaaccatatgccgtggcccgcctgccacgacatgtcgagatacgctctcttaggccccccaatgcattggttcagacagttgtgctccgtgatgttcaaaagcttgtccaaactgaccactgtatacttgctgctctatctaactctgttcatggtttgttgcctgttcctattggagctcagatagtgcaattgaccgcttctggagaatttgaggaggcgctagcattgtgtaagctacttccaccagaggattcaaatttacgggcagcaaaggaaagctcaatacacataaggtgatcatgacaagctgctggacatgccagaattagcaagggaatcctccgatgtgacagatgagatggaatcatactctttacagcttcaagaaccagatgataaatctccattggaggtaaagaaaatgagtcacaatgctctagctgcccttgtgaagtatttgcagaagaaaagaagtggcataattgagagagcgacggctgaagtaacagaggaggtggtctctggagctgttcaccacagcttaaaattatctgagccatataagtcaaagaagctgagcaagaaacgagctcagacacatacaagctctattgctagagaaatggcaactgtactggatacttgtctgcttcaagctcttattcttactgggcagtcatcaggggcaatagagttgttgaaaggactcaattattgtgacctgaagatatgcgaagagtttttgaaggaaaggagagaatatatggttttacttgaactctataaaagcaatgaaatgcaccgtgatgctctccaactactcaatcaattagttgaagaatcaaaatctgaaatggagaatacatattttaataaaaaatttaactctcaaatgatacttgaatatctcaggcccctttgtagatctgacccaatgctggttttagagtcttccttgtacgtccttgagcgcaacccatcagaaactattgagctctttttgtctgaaaatgttccagcagatttggtaaattcatatctgaagcagcatgccccaaatttgcagtcaacttacttagagctaatgctctcaatgaatgatactgggatcaaccctaatctgcaaaacgagctggtacaactgtacctttctgaagttctagactggtacaagattctgaaggaagagggaaactggacagagaagacatattccccaacacggaagaagttaatatctacgttggagagcaattcaggttacaatacagacgcacttcttaagcgccttccccaggacgctctttttgaggagcgagctatattgtatgggaaaataaatcaacacctcagagctctctctctctatgttcacaagcttcagatgccagagcgagcagttgcatattgtgaccgtgtttatgaagaaagagaacaacaaccgtccaaatcaaatatctattttaatcttctacagattcatctgaacccaagaaaagctgaaaaggaatttgagcagaaaattattccagttgcatcacaatactctggaatccaaaaggctagtgctactaagcccaaagggggtcgcgtaggtaaaaaggttgtagagattgagggggctgatgacatacgctttagccccagcggaacagatagtggccgaagtgatggtgatggagatgatgtaaatgaccgaggccctataatgttaaatgaagcactggaactgttgagccaacggtgggacaggataaatggtgctcaggctcttaggctgttaccaagagatactaaactccaggatcttgtatcatttcttgagccactattgcgtaactctagtgaacatcggcgcaattatttggttatcaaaaacttgattttgcgggcaaacttgcaggtcaaggaggatctgtataatcggtgtcaagctgttgtgaagattgatggagatagtacgtgttctctttgccataagcgtgttgcaaatagtgcttttgcaatatatccaaatggacaggctttggtgcattttgtctgctttaaagaatcacagcaaattaaggccgtcagaggagcaaactctgtgaaacgtagataatatggccgtgatccaggtttggttgatgccagcttatggaattccctctctttggcttcacactggattttagtggactgcttcagaagtttttactggagtaatcttcactctcttcagagatcgagtttatagccgtgcgtgtgtgctcgctctctgttttctggccatcgtactggaaaactggaacccctttcttttggttttcatgtacagaatgtaaatgatactgtaaagtttcggttaacagattgatgatggtcttgattatagtgccgcaatgtgtgctccaaataggtttggacattattattattggatccatgtcattataattctctaagttttgaatggcgctattataattcgtatattcggaggtctaccattttaattctctcttcttaatcgccattacaatttgtcaattcggagatctgccattataataatctctctccacatccatggcatttcggacacctgccgtatactggtatatgagttcactgtcactgtcagtcgtgtatgcgtaccgtataggaacatctatgcgcgtctgtcaactttgttagactgagac

SEQ ID NO: 10924 - DNA, 3130 bp, Zea Mays
ctgcagttctgcaggcgcagaggcactgacaggaggggcctggtgttgaggtgggcgagaatttgttgaagtgaaggaatttggagtgccagatattctgaaatcaatggcctggtgtggtgataacatatgtcttggaatcaggcgggaatatatgataataaatagcatgaccggggcactaacagaagtgttttcttctgggaggatcgctcctcctttagttgtgcctctccttactggggaactgatccttggcaagacggcagaattatttggtcagacacaccagcttctgttgttatacataaaccatatgccgtggcccgcctgccacgacatgtcgagatacgctctcttaggccccccaatgcattggttcagacagttgtgctccgtgatgttcaaaagcttgtccaaactgaccactgtatacttgctgctctatctaactctgttcatggtttgttgcctgttcctattggagctcagatagtgcaattgaccgcttctggagaatttgaggaggcgctagcattgtgtaagctacttccaccagaggattcaaatttacgggcagcaaaggaaagctcaatacacataagatatggacactttttgttcgataacgggagttatgaggaggcaatggaacagttttcagattcacatgtggacattacttacgtgttatctctgtacccatctattgttctgcctcaaacaaatattataggtgatcatgacaagctgctggacatgccagaattagcaagggaatcctccgatgtgacagatgagatggaatcatactctttacagcttcaagaaccagatgataaatctccattggaggtaaagaaaatgagtcacaatgctctagctgcccttgtgaagtatttgcagaagaaaagaagtggcataattgagagagcgacggctgaagtaacagaggaggtggtctctggagctgttcaccacagcttaaaattatctgagccatataagtcaaagaagctgagcaagaaacgagctcagacacatacaagctctattgctagagaaatggcaactgtactggatacttgtctgcttcaagctcttattcttactgggcagtcatcaggggcaatagagttgttgaaaggactcaattattgtgacctgaagatatgcgaagagtttttgaaggaaaggagagaatatatggttttacttgaactctataaaagcaatgaaatgcaccgtgatgctctccaactactcaatcaattagttgaagaatcaaaatctgaaatggagaatacatattttaataaaaaatttaactctcaaatgatacttgaatatctcaggcccctttgtagatctgacccaatgctggttttagagtcttccttgtacgtccttgagcgcaacccatcagaaactattgagctctttttgtctgaaaatgttccagcagatttggtaaattcatatctgaagcagcatgccccaaatttgcagtcaacttacttagagctaatgctctcaatgaatgatactgggatcaaccctaatctgcaaaacgagctggtacaactgtacctttctgaagttctagactggtacaagattctgaaggaagagggaaactggacagagaagacatattccccaacacggaagaagttaatatctacgttggagagcaattcaggttacaatacagacgcacttcttaagcgccttccccaggacgctctttttgaggagcgagctatattgtatgggaaaataaatcaacacctcagagctctctctctctatgttcacaagcttcagatgccagagcgagcagttgcatattgtgaccgtgtttatgaagaaagagaacaacaaccgtccaaatcaaatatctattttaatcttctacagattcatctgaacccaagaaaagctgaaaaggaatttgagcagaaaattattccagttgcatcacaatactctggaatccaaaaggctagtgctactaagcccaaagggggtcgcgtaggtaaaaaggttgtagagattgagggggctgatgacatacgctttagccccagcggaacagatagtggccgaagtgatggtgatggagatgatgtaaatgaccgaggccctataatgttaaatgaagcactggaactgttgagccaacggtgggacaggataaatggtgctcaggctcttaggctgttaccaagagatactaaactccaggatcttgtatcatttcttgagccactattgcgtaactctagtgaacatcggcgcaattatttggttatcaaaaacttgattttgcgggcaaacttgcaggtcaaggaggatctgtataatcggtgtcaagctgttgtgaagattgatggagatagtacgtgttctctttgccataagcgtgttgcaaatagtgcttttgcaatatatccaaatggacaggctttggtgcattttgtctgctttaaagaatcacagcaaattaaggccgtcagaggagcaaactctgtgaaacgtagataatatggccgtgatccaggtttggttgatgccagcttatggaattccctctctttggcttcacactggattttagtggactgcttcagaagtttttactggagtaatcttcactctcttcagagatcgagtttatagccgtgcgtgtgtgctcgctctctgttttctggccatcgtactggaaaactggaacccctttcttttggttttcatgtacagaatgtaaatgatactgtaaagtttcggttaacagattgatgatggtcttgattatagtgccgcaatgtgtgctccaaataggtttggacattattattattggatccatgtcattataattctctaagttttgaatggcgctattataattcgtatattcggaggtctaccattttaattctctcttcttaatcgccattacaatttgtcaattcggagatctgccattataataatctctctccacatccatggcatttcggacacctgccgtatactggtatatgagttcactgtcactgtcagtcgtgtatgcgtaccgtataggaacatctatgcgcgtctgtcaactttgttagactgagac

SEQ ID NO: 10925 - DNA, 3192 bp, Zea Mays
agcttccttccgaattcccaaaccgggtatacgctcatcggttcctcggcgctcgcctcgacctccgactcgaagcggccctcctccctcgccggacgacggcgacggccgtggccgtctaacacatccgtggggaaccgctcccttagttgggcctcctccggccatggtgcacagcgcgtacgatgctgtcgagctggtggctgacgtgccgggccacatcgaggccgtcgcctcccacgctgggaagctcctcgtcgcggtttccgacaccgaaggcttcctctggggctccgactgctccttgcgcatctactccgctccttccccctccgacggcggcggcgagatccggtgggacgggccctacgcgctcgagcggcaggagccgcggttctggcggcgcccgcccttagccatggaggtcagcgccagccgcgacctcctgatctcgctctccgagtggatcgcgctccaccgcctccccgggctcgagaccgtcgctgtcgtctctagcaagacaaagggggccaacgtctttgcttgggacgagcggcggggcttccttgccgtcggtcgacagaagcgactcaccgtcttccgcctcgacagtgggcgagaatttgttgaagtgaaggaatttggagtgccagatattctgaaatcaatggcctggtgtggtgataacatatgtcttggaatcaggcgggaatatatgataataaatagcatgaccggggcactaacagaagtgttttcttctgggaggatcgctcctcctttagttgtgcctctccttactggggaactgatccttggcaaggataacattggggtattcgttgatcaaaatggtaaacttattcaagacggcagaattatttggtcagacacaccagcttctgttgttatacataaaccatatgccgtggcccgcctgccacgacatgtcgagatacgctctcttaggccccccaatgcattggttcagacagttgtgctccgtgatgttcaaaagcttgtccaaactgaccactgtatacttgctgctctatctaactctgttcatggtttgttgcctgttcctattggagctcagatagtgcaattgaccgcttctggagaatttgaggaggcgctagcattgtgtaagctacttccaccagaggattcaaatttacgggcagcaaaggaaagctcaatacacataagatatggacactttttgttcgataacgggagttatgaggaggcaatggaacagttttcagattcacatgtggacattacttacgtgttatctctgtacccatctattgttctgcctcaaacaaatattataggtgatcatgacaagctgctggacatgccagaattagcaagggaatcctccgatgtgacagatgagatggaatcatactctttacagcttcaagaaccagatgataaatctccattggaggtaaagaaaatgagtcacaatgctctagctgcccttgtgaagtatttgcagaagaaaagaagtggcataattgagagagcgacggctgaagtaacagaggaggtggtctctggagctgttcaccacagcttaaaattatctgagccatataagtcaaagaagctgagcaagaaacgagctcagacacatacaagctctattgctagagaaatggcaactgtactggatacttgtctgcttcaagctcttattcttactgggcagtcatcaggggcaatagagttgttgaaaggactcaattattgtgacctgaagatatgcgaagagtttttgaaggaaaggagagaatatatggttttacttgaactctataaaagcaatgaaatgcaccgtgatgctctccaactactcaatcaattagttgaagaatcaaaatctgaaatggagaatacatattttaataaaaaatttaactctcaaatgatacttgaatatctcaggcccctttgtagatctgacccaatgctggttttagagtcttccttgtacgtccttgagcgcaacccatcagaaactattgagctctttttgtctgaaaatgttccagcagatttggtaaattcatatctgaagcagcatgccccaaatttgcagtcaacttacttagagctaatgctctcaatgaatgatactgggatcaaccctaatctgcaaaacgagctggtacaactgtacctttctgaagttctagactggtacaagattctgaaggaagagggaaactggacagagaagacatattccccaacacggaagaagttaatatctacgttggagagcaattcaggttacaatacagacgcacttcttaagcgccttccccaggacgctctttttgaggagcgagctatattgtatgggaaaataaatcaacacctcagagctctctctctctatgttcacaagcttcagatgccagagcgagcagttgcatattgtgaccgtgtttatgaagaaagagaacaacaaccgtccaaatcaaatatctattttaatcttctacagattcatctgaacccaagaaaagctgaaaaggaatttgagcagaaaattattccagttgcatcacaatactctggaatccaaaaggctagtgctactaagcccaaagggggtcgcgtaggtaaaaaggttgtagagattgagggggctgatgacatacgctttagccccagcggaacagatagtggccgaagtgatggtgatggagatgatgtaaatgaccgaggccctataatgttaaatgaagcactggaactgttgagccaacggtgggacaggataaatggtgctcaggctcttaggctgttaccaagagatactaaactccaggatcttgtatcatttcttgagccactattgcgtaactctagtgaacatcggcgcaattatttggttatcaaaaacttgattttgcgggcaaacttgcaggtcaaggaggatctgtataatcggtgtcaagctgttgtgaagattgatggagatagtacgtgttctctttgccataagcgtgttgcaaatagtgcttttgcaatatatccaaatggacaggctttggtgcattttgtctgctttaaagaatcacagcaaattaaggccgtcagaggagcaaactctgtgaaacgtagataatatggccgtgatccagtgtagcatgatgtatcgatcga

SEQ ID NO: 10926 - DNA, 3769 bp, Zea Mays
agcttccttccgaattcccaaaccgggtatacgctcatcggttcctcggcgctcgcctcgacctccgactcgaagcggccctcctccctcgccggacgacggcgacggccgtggccgtctaacacatccgtggggaaccgctcccttagttgggcctcctccggccatggtgcacagcgcgtacgatgctgtcgagctggtggctgacgtgccgggccacatcgaggccgtcgcctcccacgctgggaagctcctcgtcgcggtttccgacaccgaaggcttcctctggggctccgactgctccttgcgcatctactccgctccttccccctccgacggcggcggcgagatccggtgggacgggccctacgcgctcgagcggcaggagccgcggttctggcggcgcccgcccttagccatggaggtcagcgccagccgcgacctcctgatctcgctctccgagtggatcgcgctccaccgcctccccgggctcgagaccgtcgctgtcgtctctagcaagacaaagggggccaacgtctttgcttgggacgagcggcggggcttccttgccgtcggtcgacagaagcgactcaccgtcttccgcctcgacagtgggcgagaatttgttgaagtgaaggaatttggagtgccagatattctgaaatcaatggcctggtgtggtgataacatatgtcttggaatcaggcgggaatatatgataataaatagcatgaccggggcactaacagaagtgttttcttctgggaggatcgctcctcctttagttgtgcctctccttactggggaactgatccttggcaaggataacattggggtattcgttgatcaaaatggtaaacttattcaagacggcagaattatttggtcagacacaccagcttctgttgttatacataaaccatatgccgtggcccgcctgccacgacatgtcgagatacgctctcttaggccccccaatgcattggttcagacagttgtgctccgtgatgttcaaaagcttgtccaaactgaccactgtatacttgctgctctatctaactctgttcatggtttgttgcctgttcctattggagctcagatagtgcaattgaccgcttctggagaatttgaggaggcgctagcattgtgtaagctacttccaccagaggattcaaatttacgggcagcaaaggaaagctcaatacacataagatatggacactttttgttcgataacgggagttatgaggaggcaatggaacagttttcagattcacatgtggacattacttacgtgttatctctgtacccatctattgttctgcctcaaacaaatattataggtgatcatgacaagctgctggacatgccagaattagcaagggaatcctccgatgtgacagatgagatggaatcatactctttacagcttcaagaaccagatgataaatctccattggaggtaaagaaaatgagtcacaatgctctagctgcccttgtgaagtatttgcagaagaaaagaagtggcataattgagagagcgacggctgaagtaacagaggaggtggtctctggagctgttcaccacagcttaaaattatctgagccatataagtcaaagaagctgagcaagaaacgagctcagacacatacaagctctattgctagagaaatggcaactgtactggatacttgtctgcttcaagctcttattcttactgggcagtcatcaggggcaatagagttgttgaaaggactcaattattgtgacctgaagatatgcgaagagtttttgaaggaaaggagagaatatatggttttacttgaactctataaaagcaatgaaatgcaccgtgatgctctccaactactcaatcaattagttgaagaatcaaaatctgaaatggagaatacatattttaataaaaaatttaactctcaaatgatacttgaatatctcaggcccctttgtagatctgacccaatgctggttttagagtcttccttgtacgtccttgagcgcaacccatcagaaactattgagctctttttgtctgaaaatgttccagcagatttggtaaattcatatctgaagcagcatgccccaaatttgcagtcaacttacttagagctaatgctctcaatgaatgatactgggatcaaccctaatctgcaaaacgagctggtacaactgtacctttctgaagttctagactggtacaagattctgaaggaagagggaaactggacagagaagacatattccccaacacggaagaagttaatatctacgttggagagcaattcaggttacaatacagacgcacttcttaagcgccttccccaggacgctctttttgaggagcgagctatattgtatgggaaaataaatcaacacctcagagctctctctctctatgttcacaagcttcagatgccagagcgagcagttgcatattgtgaccgtgtttatgaagaaagagaacaacaaccgtccaaatcaaatatctattttaatcttctacagattcatctgaacccaagaaaagctgaaaaggaatttgagcagaaaattattccagttgcatcacaatactctggaatccaaaaggctagtgctactaagcccaaagggggtcgcgtaggtaaaaaggttgtagagattgagggggctgatgacatacgctttagccccagcggaacagatagtggccgaagtgatggtgatggagatgatgtaaatgaccgaggccctataatgttaaatgaagcactggaactgttgagccaacggtgggacaggataaatggtgctcaggctcttaggctgttaccaagagatactaaactccaggatcttgtatcatttcttgagccactattgcgtaactctagtgaacatcggcgcaattatttggttatcaaaaacttgattttgcgggcaaacttgcaggtcaaggaggatctgtataatcggtgtcaagctgttgtgaagattgatggagatagtacgtgttctctttgccataagcgtgttgcaaatagtgcttttgcaatatatccaaatggacaggctttggtgcattttgtctgctttaaagaatcacagcaaattaaggccgtcagaggagcaaactctgtgaaacgtagataatatggccgtgatccaggtcgggcgaccagctggtcattccagaggaccgaccaggcgcctaatcacgattagggcgacaattaggacgcttaatcggtcctggtcgacctctggtcgtcccctaatcgtcctatatatttctgggcatatgtatatataatatgatatatgtatatataagcaatactgcaataggcattatataagtctgaaagtatgaaattgaaactgagtaacagactgaaaggcaatatagacatatagcactatagcagaactgaaactgaaatatggaatacaaggctacaagcagtaatgcagtacctactacctagagcatatcatcatccaagcaaaaagcagcagcagcttctccaacagattcagattcatcagaatttagacaataggaaagataggaaagggggagaagggggaaccttgagatgaggagctcatctcgtcgctagtgttttggagacgccgccggtgttcttgagctgctgctggtgttctagagccgcagcctatgttctggactcggcagaggagaggaaaagtttcaaggggcggtggcgcattgcctttatactactgtagatgggccgaaaaaat

SEQ ID NO: 10927 - DNA, 3808 bp, Zea Mays
agcttccttccgaattcccaaaccgggtatacgctcatcggttcctcggcgctcgcctcgacctccgactcgaagcggccctcctccctcgccggacgacggcgacggccgtggccgtctaacacatccgtggggaaccgctcccttagttgggcctcctccggccatggtgcacagcgcgtacgatgctgtcgagctggtggctgacgtgccgggccacatcgaggccgtcgcctcccacgctgggaagctcctcgtcgcggtttccgacaccgaaggcttcctctggggctccgactgctccttgcgcatctactccgctccttccccctccgacggcggcggcgagatccggtgggacgggccctacgcgctcgagcggcaggagccgcggttctggcggcgcccgcccttagccatggaggtcagcgccagccgcgacctcctgatctcgctctccgagtggatcgcgctccaccgcctccccgggctcgagaccgtcgctgtcgtctctagcaagacaaagggggccaacgtctttgcttgggacgagcggcggggcttccttgccgtcggtcgacagaagcgactcaccgtcttccgcctcgacagtgggcgagaatttgttgaagtgaaggaatttggagtgccagatattctgaaatcaatggcctggtgtggtgataacatatgtcttggaatcaggcgggaatatatgataataaatagcatgaccggggcactaacagaagtgttttcttctgggaggatcgctcctcctttagttgtgcctctccttactggggaactgatccttggcaaggataacattggggtattcgttgatcaaaatggtaaacttattcaagacggcagaattatttggtcagacacaccagcttctgttgttatacataaaccatatgccgtggcccgcctgccacgacatgtcgagatacgctctcttaggccccccaatgcattggttcagacagttgtgctccgtgatgttcaaaagcttgtccaaactgaccactgtatacttgctgctctatctaactctgttcatggtttgttgcctgttcctattggagctcagatagtgcaattgaccgcttctggagaatttgaggaggcgctagcattgtgtaagctacttccaccagaggattcaaatttacgggcagcaaaggaaagctcaatacacataagatatggacactttttgttcgataacgggagttatgaggaggcaatggaacagttttcagattcacatgtggacattacttacgtgttatctctgtacccatctattgttctgcctcaaacaaatattataggtgatcatgacaagctgctggacatgccagaattagcaagggaatcctccgatgtgacagatgagatggaatcatactctttacagcttcaagaaccagatgataaatctccattggaggtaaagaaaatgagtcacaatgctctagctgcccttgtgaagtatttgcagaagaaaagaagtggcataattgagagagcgacggctgaagtaacagaggaggtggtctctggagctgttcaccacagcttaaaattatctgagccatataagtcaaagaagctgagcaagaaacgagctcagacacatacaagctctattgctagagaaatggcaactgtactggatacttgtctgcttcaagctcttattcttactgggcagtcatcaggggcaatagagttgttgaaaggactcaattattgtgacctgaagatatgcgaagagtttttgaaggaaaggagagaatatatggttttacttgaactctataaaagcaatgaaatgcaccgtgatgctctccaactactcaatcaattagttgaagaatcaaaatctgaaatggagaatacatattttaataaaaaatttaactctcaaatgatacttgaatatctcaggcccctttgtagatctgacccaatgctggttttagagtcttccttgtacgtccttgagcgcaacccatcagaaactattgagctctttttgtctgaaaatgttccagcagatttggtaaattcatatctgaagcagcatgccccaaatttgcagtcaacttacttagagctaatgctctcaatgaatgatactgggatcaaccctaatctgcaaaacgagctggtacaactgtacctttctgaagttctagactggtacaagattctgaaggaagagggaaactggacagagaagacatattccccaacacggaagaagttaatatctacgttggagagcaattcaggttacaatacagacgcacttcttaagcgccttccccaggacgctctttttgaggagcgagctatattgtatgggaaaataaatcaacacctcagagctctctctctctatgttcacaagcttcagatgccagagcgagcagttgcatattgtgaccgtgtttatgaagaaagagaacaacaaccgtccaaatcaaatatctattttaatcttctacagattcatctgaacccaagaaaagctgaaaaggaatttgagcagaaaattattccagttgcatcacaatactctggaatccaaaaggctagtgctactaagcccaaagggggtcgcgtaggtaaaaaggttgtagagattgagggggctgatgacatacgctttagccccagcggaacagatagtggccgaagtgatggtgatggagatgatgtaaatgaccgaggccctataatgttaaatgaagcactggaactgttgagccaacggtgggacaggataaatggtgctcaggctcttaggctgttaccaagagatactaaactccaggatcttgtatcatttcttgagccactattgcgtaactctagtgaacatcggcgcaattatttggttatcaaaaacttgattttgcgggcaaacttgcaggtcaaggaggatctgtataatcggtgtcaagctgttgtgaagattgatggagatagtacgtgttctctttgccataagcgtgttgcaaatagtgcttttgcaatatatccaaatggacaggctttggtgcattttgtctgctttaaagaatcacagcaaattaaggccgtcagaggagcaaactctgtgaaacgtagataatatggccgtgatccaggtacacccttgaacgggacactgacaaatcaatatcgaggtcgggcgaccagctggtcattccagaggaccgaccaggcgcctaatcacgattagggcgacaattaggacgcttaatcggtcctggtcgacctctggtcgtcccctaatcgtcctatatatttctgggcatatgtatatataatatgatatatgtatatataagcaatactgcaataggcattatataagtctgaaagtatgaaattgaaactgagtaacagactgaaaggcaatatagacatatagcactatagcagaactgaaactgaaatatggaatacaaggctacaagcagtaatgcagtacctactacctagagcatatcatcatccaagcaaaaagcagcagcagcttctccaacagattcagattcatcagaatttagacaataggaaagataggaaagggggagaagggggaaccttgagatgaggagctcatctcgtcgctagtgttttggagacgccgccggtgttcttgagctgctgctggtgttctagagccgcagcctatgttctggactcggcagaggagaggaaaagtttcaaggggcggtggcgcattgcctttatactactgtagatgggccgaaaaaat

SEQ ID NO: 10928 - DNA, 801 bp, Zea Mays
ctttgattgaccttgcgatcaactagaataagtttatttgcagattactggacgagtgaccacaaaagctgatgtcttcagctttggtgtcatcttgatggaactgattacagggcgcaaggcacttgatgagactcggccagaggatagcatgcatctagttacatggttccggagaatgcagctgaacaaggaaacattccgcaaagcaatcgaccctgttattgaccttgatgaggagacatatgctagcaagtttggaaaccaactgatccagactcggacgacagctacggtattgacctgaacatgaccctccctcaggctctgaagagatggcaggcttttgaagatagcagccactttgacggcgcaacctcttcattcgttgcaagtttggataacactcagacgagcatccctacaaggcctcctggattcgcggagtcgttcacctctgctgacggaagatagacgggttagctgctagggcgtgccaaaccttgtgtgcttccgttgaaatagaaggctcacgcgatccttgtgttcattcttttagtctcttcgctcctaatctttcatgtccccttattcggctctgtactgccgtgtagctgctctttgatcctgtcccaaaaattgcctggaagttggaaaaaatttgctaaccggttatgtcatttgctaagattaaagtagaagtatgctagggttgttgggttgtatcggatgctgacaatttccaaatgaaggtgatcctgtattcgtcaaaaagtatggccctggcctgaagtttttcca

SEQ ID NO: 10929 - DNA, 880 bp, Zea Mays
attatactctggcatcgctcctgttactggacgagtgaccacaaaagctgatgtcttcagctttggtgtcatcttgatggaactgattacagggcgcaaggcacttgatgagactcggccagaggatagcatgcatctagttacatggttccggagaatgcagctgaacaaggaaacattccgcaaagcaatcgaccctgttattgaccttgatgaggagacatatgctagcgttagtactgtctcagagcttgctggtcactgctgcgctagggaagcacaccagaggcctgacatgggccatgctgttaatgtgctctctaccctttcagaagtttggaaaccaactgatccagactcggacgacagctacggtattgacctgaacatgaccctccctcaggctctgaagagatggcaggcttttgaagatagcagccactttgacggcgcaacctcttcattcgttgcaagtttggataacactcagacgagcatccctacaaggcctcctggattcgcggagtcgttcacctctgctgacggaagatagacgggttagctgctagggcgtgccaaaccttgtgtgcttccgttgaaatagaaggctcacgcgatccttgtgttcattcttttagtctcttcgctcctaatctttcatgtccccttattcggctctgtactgccgtgtagctgctctttgatcctgtcccaaaaattgcctggaagttggaaaaaatttgctaaccggttatgtcatttgctaagattaaagtagaagtatgctagggttgttgggttgtatcggatgctgacaatttccaaatgaaggtgatcctgtattcgtcaaaaagtatggccctggcctgaagtttttcca

SEQ ID NO: 10930 - DNA, 3162 bp, Zea Mays
tctctctctcttctcctctcttctctaactctgcctctctgacgcaatgccgttccccaccgccttcaccgcgcggcggcggcggcacgagggcgccgcgggtcgttggtgcgggctcgtggtcctggttctgatggcgctcgaggctggcgcggcggcggagacgtcgccgtcggacgtggcggcgatgcgggctgtggcgaaggcgcttggcgcggacaagacgctgggatgggacgtcgccggcgacccctgctcgccgaagcggtgggacggggtgtcatgcgactcgtcgggccgcgtcaccgcgatccaggtcggtgcgcgcggcctcacggggaccctgcctccggaggtgggcgacctcaccgagctcacccgcctcgaggttttcgacaacaagctctccggcccgctgcccttgctcccggggctctcctcgcttcaggttttacttgcccataacaatagcttcgcctccatccccgccgacttcttcaaaggcctcaccgggctcaccgccgtcgccatcgactacaacccgttcgcgtcgtggacgctccccgcctccctcgccgcctgcgcctccctcgccaacttctcggccatcagtgccaacgtctctggcacgctcccggacttcttgggtgcgatgccggcgctccagcggctgtcgctttcctttaaccagctgtcaggacccgtaccggcgtcgctggccggcgcgccgctggtgcagctctggctcaacggcgcgcacctcaatgggtcgattagctttgtcagcaacatgacgtctctggagcaactgtggctgcattctaacgaattcactgggcccttgccggacttcgcggggtttgatgatctatgggatttgcaacttcgcgacaacatgctcacagggccggtgcctgagagtcttttcaagctgaaggctctgaagaacgtgaccctgacgaataatttgctgcagggtccgatgcctcagattcccaatggacttcatgctgatatcgaagcagatacagagcggttctgtgtgcaggaagccgggaagccgtgcaatccccttgtgagcctgctgcttgaggttgcggctgggttcatgtacccaaaggcacttgctgaggattggagggggaatgatccatgtatgtttccgggtgttacttgcatccaaggtaacattactgggctgacttttgccaacaagggtctcagtggtagtatctcaccggccattgggaagattagctcacttaaggtgctagatcttgctaacaataacatcactggtactgtgcctgaggaggttgccgtgttgcctttgctgacaaaaattgatttgtcaaacaacaatctctatgggaaacttcctacctttgcttccaagaatgtggcggtgaatactgctggtaaccctaacataggcaaggatgctcctgcaccaactgcaggaccaggtagtagcaacaacagtccatcgggaggaagcagtagcggaagcagtggtaacaatgggaatgggggctcctcttcatcttctgttggagtcattgctggctcagtggctggtacagttgctggactaggccttgttgctgcattaggattctattgttacaagagaaaacagaagcctttcggaagggtgcagagtccacatgccatggttatccatccgaggcactcaggttcagatgacatggttaaaatcacagttgcagggggaaatgctaatggtggtgctcgcgcaagtgagacatatagccaagcgagcagtggtccacgggacatccatgttgttgaaagtggaaatatggtcatttcaatccaagttctccgcaatgtgaccaacaacttcagcgaggacaacatccttggtcgaggagggtttggcactgtttacaagggtgaacttcatgatggcacgaaaattgctgtaaagcggatggaggctggtgtgatgggtaacaaggggctaaatgagtttaaatcagagattgctgttttgaccaaggttcgtcaccggaaccttgtttcgctgctgggctactgccttgatggcaatgagaggattcttgtgtatgagtacatgccacaggggacactgagccaacacctgtttgagtggtcagagaacaatttgcgaccattggaatggaaaaagcggcttagtattgcacttgatgttgcaaggggcgttgagtaccttcacagccttgcccagcagacctttatccacagagacttgaagccatcaaacatacttcttggtgatgacatgaaggccaaggtggcagactttggattggtcaggcttgcaccagatgatgggaagtgcgtctccatagagacaagacttgctggcacttttgggtaccttgcaccagagtatgcagttactggacgagtgaccacaaaagctgatgtcttcagctttggtgtcatcttgatggaactgattacagggcgcaaggcacttgatgagactcggccagaggatagcatgcatctagttacatggttccggagaatgcagctgaacaaggaaacattccgcaaagcaatcgaccctgttattgaccttgatgaggagacatatgctagcaagtttggaaaccaactgatccagactcggacgacagctacggtattgacctgaacatgaccctccctcaggctctgaagagatggcaggcttttgaagatagcagccactttgacggcgcaacctcttcattcgttgcaagtttggataacactcagacgagcatccctacaaggcctcctggattcgcggagtcgttcacctctgctgacggaagatagacgggttagctgctagggcgtgccaaaccttgtgtgcttccgttgaaatagaaggctcacgcgatccttgtgttcattcttttagtctcttcgctcctaatctttcatgtccccttattcggctctgtactgccgtgtagctgctctttgatcctgtcccaaaaattgcctggaagttggaaaaaatttgctaaccggttatgtcatttgctaagattaaagtagaagtatgctagggttgttgggttgtatcggatgctgacaatttccaaatgaaggtgatcctgtattcgtcaaaaagtatggccctggcctgaagtttttcca

SEQ ID NO: 10931 - DNA, 1537 bp, Zea Mays
aacgataccatttgggtggttggacagcgcagaatccaccacatagtgctgaggagtatttcaatatgtgtcatgctcgagcaagaaatattatagagagggcttttggaaggcttaaagggcgatgggcgattcttagatccccttcatattttcctataaagactcaatgtcgtataataatggcatgtgcccttttgcacaatctaattttgcaaaaaatgtctagagaccctatggaaagtgaggaacaatcggtggtagattctgaaatgcctgagggagaagttggtgaaccagaattcattatgggtatctccacaacaaatgcgtggagtacttttcgtgacactcttgcggcaggggatgtataatgcttatagggcttctcattgattatttcatgaatggacattttggagggctctattgctgttcgtggtagggggaaaaacaaaaggaagtggattcctgttgaagatgatgaactgatcaaagcattggttgatgtttctttggatccgaggtggaggagtgatgggagtttcaagaatggttacacttcagtacttgaagctcgcctcgctgaaaagctacctgattcaaaaatttctgcaactcctcatatcgagtcaaggttaagatacttcaagacaaagtattatgctttggagcagatgttgaacaagagtgggttcacatgggatccgaccaagaagatgattcagtgcgagaaacaacaatatgagacacattgcaagaataatctagatgcaaaagggttgtatggagtgtcctttccttactatgatgaactttcaatggtatattccaaggacatggccacaggtgaaggtgcggaagacatgacagatgctgttcaaaacttggaagaagagttagttcgtgtaaatgctaatgatgaagaggatggagaggatatgacatctgtagagacaccaaggcgttctgttgactcaacatcatctagctccaagaagcggaagaaagagtggaaaggaaaaaaagacttcatcaagtgacccgcttcttgatgtgttcaatgaagtgagtggtgatctcaaggttgccaccatgtcaattggaaaaatggcgcaagctatggatcgtgaggcatccaaccaagagaaggcaagagatgaggatccacaacaaaagctaagagagaaggcgatcaatgaggtccggagacttgaatttactggctcagaagttatcaaagcagctggtgtgtttgttaggatgccagatcaaatggggatgttgtttgcacttccagaaccactgaggagggaatacattgtcgacatgctacgtgatgaagaagcaaggagagagaggtcaaagtgaaggtgatggtctagatgttgaatgatggagctttggaagttgctgttggtttagttggtctcaatctgtttacctttagtgttcttcatatgttgttgttgaatgacggtgaatgatgataaaaactgaatttttatgatgttgaacgttgttgaatgttcacgaa

SEQ ID NO: 10932 - DNA, 2333 bp, Zea Mays
caaatatcttctttctactccggccgaagaagactggacaccgcaccactgaacgaacgaaggcgacggatacgacgtgaaggtggcaggtgacttcgatgccgcaaagcacgcgacttggacatcctcctcatctatcctgctgccaaaaattgccaacgcttccttccagtccttcacaacatcaatctaggcatctggctctgttgaagcagcaaatcttcacggatagcacgtagcgaaagcaaatctacacgcgatctgtgcggattggcaaattcccggtggccatcacggtgtgacactgcagaactgagccagtgcgttgcgtaattggggcaaaaaaatgaatctgacggttgtagaagtatgcggccatccccgattcaatccaatgtcatcccaaatccgagcacagacgcaatagcaacatctcctaatctcctttctcttcctccccacatcaacggctccacccggccggcttttttttcctttaatttttcccacaacatgcaagctatccactctcgtcggctttctctgtatgtatcctattgttcccctctgctgcatcctagtagatctgtacagtcttaagtattatgattccaatcaccaaatattgcgctgatttcgtatagacaccgtgtgtgtttatgaagaaatatatatgtgttagtgtgttactctgttacccataactatggccttgtatggttacctagagattctcataattagataaaatctatccgttagagatccaaacattttgctttccatgtcttggttaatgtgttgtgtgaaagaatctcaattattatccttacgttgcattttcttgggtattgtcaaatgtcatcttattatacattatgcattacatctaacatagtttattcatcttacacaaattaacattttcatagcttacttaaacctgataccaatatataattgaaaataactcttctattcaggccatgtttgttttggattataatctctctagattatataatccagcataaataatttagcaagtaaacaaacacctagattatgggttcagattatataatctaaagcctagattatgataatctcataatctcctcaagagtagcttatttgagatcattttggcaaaaggcccactacccatggttatgtaaatagaaattacaatatatgccatccttttttacccacctcaaataaacaaataagggtaccgctgtctttatgaataatctacatttatataatctaaactaccaaacaactatatgtagattataatatatctagattatataatctataagctgaaacaaacagggccttcaatacagttcctcctttcattgcatacgcatgcatacttttgtacaagttttacaacgcatccagcatccaggtttcagatttactatattaaccgcgggagcatagaagctcagtcgagatggccacgccatttctttcgactgaaatcgtacgatctttatccaacggccaggtaaagcgagtaggtctctcaccagtagcacgacaagagagttctagagaaatcttcgttgctctgaagcaggtctctcagcagcagcacaacgagatcgttctagataaatcttcgtcgctctcatgatcccatcccttcccatatttcgccgtccacaaatagtcgaactgaatcccagatcactcagaaattgccaccaaaaagggaacagagtgagcgagacctcgccaaattgccaaccaagcctgctccccccgcctaggccagtatgataatagagaaaaagcaagcaggagggatgggcgagtgagatgcttcgttcacgttccagcgacggttaaagctggtggagctggtgccattggcgatgcccagatgcgagcatgtgcagcctggttgacgtcagacgagctaggcacgttggacgggcctaaagcgttcgacgaaatacctccccaagagtgcgctgtgtgccagaccggcatagcgtcttggtttcgttgcacattaatctaacctttgatgcaactaggagagattttattatccaagattgtgaaagtcagacatttgcttgtaccttcccattatgaatggatattctcgaagatggaaaatattctcgaagatagaaagtatgagctaatattcattgacacatatacatacatacgtttacatgaatggttttattaaattctgtaagcaaggggattatgattctattttgttgtcagccctagaaattttgtgttttttattaatattgtggaccttgcagcctttgcacatggtcagtctcttg

SEQ ID NO: 10933 - DNA, 2484 bp, Zea Mays
gtgcgtgcggcctcgaagcgtagtattcttattattaaccgcgggagcaaggctgtcacgtagtttggccacgtgttctaaaaaaatatttgccgtccgatccaagatcaacgctgcacgttaagtgtttgtatacggcatctacggtgtcctggaagtatccggagatcgccatatggataaaaaaggaaagccaaatatcttctttctactccggccgaagaagactggacaccgcaccactgaacgaacgaaggcgacggatacgacgtgaaggtggcaggtgacttcgatgccgcaaagcacgcgacttggacatcctcctcatctatcctgctgccaaaaattgccaacgcttccttccagcaaatcttcacggatagcacgtagcgaaagcaaatctacacgcgatctgtgcggattggcaaattcccggtggccatcacggtgtgacactgcagaactgagccagtgcgttgcgtaattggggcaaaaaaatgaatctgacggttgtagaagtatgcggccatccccgattcaatccaatgtcatcccaaatccgagcacagacgcaatagcaacatctcctaatctcctttctcttcctccccacatcaacggctccacccggccggcttttttttcctttaatttttcccacaacatgcaagctatccactctcgtcggctttctctgtatgtatcctattgttcccctctgctgcatcctagtagatctgtacagtcttaagtattatgattccaatcaccaaatattgcgctgatttcgtatagacaccgtgtgtgtttatgaagaaatatatatgtgttagtgtgttactctgttacccataactatggccttgtatggttacctagagattctcataattagataaaatctatccgttagagatccaaacattttgctttccatgtcttggttaatgtgttgtgtgaaagaatctcaattattatccttacgttgcattttcttgggtattgtcaaatgtcatcttattatacattatgcattacatctaacatagtttattcatcttacacaaattaacattttcatagcttacttaaacctgataccaatatataattgaaaataactcttctattcaggccatgtttgttttggattataatctctctagattatataatccagcataaataatttagcaagtaaacaaacacctagattatgggttcagattatataatctaaagcctagattatgataatctcataatctcctcaagagtagcttatttgagatcattttggcaaaaggcccactacccatggttatgtaaatagaaattacaatatatgccatccttttttacccacctcaaataaacaaataagggtaccgctgtctttatgaataatctacatttatataatctaaactaccaaacaactatatgtagattataatatatctagattatataatctataagctgaaacaaacagggccttcaatacagttcctcctttcattgcatacgcatgcatacttttgtacaagttttacaacgcatccagcatccaggtttcagatttactatattaaccgcgggagcatagaagctcagtcgagatggccacgccatttctttcgactgaaatcgtacgatctttatccaacggccaggtaaagcgagtaggtctctcaccagtagcacgacaagagagttctagagaaatcttcgttgctctgaagcaggtctctcagcagcagcacaacgagatcgttctagataaatcttcgtcgctctcatgatcccatcccttcccatatttcgccgtccacaaatagtcgaactgaatcccagatcactcagaaattgccaccaaaaagggaacagagtgagcgagacctcgccaaattgccaaccaagcctgctccccccgcctaggccagtatgataatagagaaaaagcaagcaggagggatgggcgagtgagatgcttcgttcacgttccagcgacggttaaagctggtggagctggtgccattggcgatgcccagatgcgagcatgtgcagcctggttgacgtcagacgagctaggcacgttggacgggcctaaagcgttcgacgaaatacctccccaagagtgcgctgtgtgccagaccggcatagcgtcttggtttcgttgcacattaatctaacctttgatgcaactaggagagattttattatccaagattgtgaaagtcagacatttgcttgtaccttcccattatgaatggatattctcgaagatggaaaatattctcgaagatagaaagtatgagctaatattcattgacacatatacatacatacgtttacatgaatggttttattaaattctgtaagcaaggggattatgattctattttgttgtcagccctagaaattttgtgttttttattaatattgtggaccttgcagcctttgcacatggtcagtctcttg

SEQ ID NO: 10934 - DNA, 909 bp, Zea Mays
cttcaaaagaaatttaggttggtgttgtgatgacatcattgttctggaggatacatgggagaggttggagctaattttgaggtttatcgcaatgatgagatcactgtggaagaaattaagaatttgttgcttgttctacaggatttctcctagaggaatacttatttccccaggccctggcactcctcaagattcaggaatatccttgcaaacagttacagagcttgggccctcaataccgttgtttggggtttgcatgggtttacagtgcattggagaggcatttggagggaaggttgttcgatccccttacggcgttgtgcacggaaagggctcccttgttcattatgatgagaaacttgatggaactctgttttatgatattcctaacccattccaggctggaaggtatcacagccttgtaatcgagaaggatagtttcccgcatgataccctggaaattgttgcgtggacagatgatgggttgatcatggctgctcgccacaggatatacaaacatattcagggcgtgcagttccatccggagagcatcataactactgaagggaggctcatggtcaacaattttatcaagattattgaaggctacgaagcctcgaattgctctccgtgatttatctagttggaagcagcagcagccctgcgtggggcgggtgacaataagatgatgtaaaagcttgtaactacatagctcgaacatgtaaactcagatgtatatgttcggatgtcacaaactcacgacactcagagtccaactactgtacatggtcgcatgtggcgtgtcgatgtcaaatcaaatcattgaacttttagctcggtgaccgctatatttgtttttttacagtagttaccactatatttgttcatttggcatctaattccttgttc

SEQ ID NO: 10935 - DNA, 1512 bp, Zea Mays
taaaatatcaaacttatgccccttgagagtatactccttctaacttctcaggctacacttattataaatgcattggagaagagaaaccataacttgactatatactgaacacccatcatcactatgatcatactggtggaaacttggaattgaaagaaaaatatggtgcaaaggtcatggctgctattattttgctggttgtggagctatatcgacagtaggactggctcaataaaaaaatggtaagaattgacggaaacgtaagagaaaagaatggaacgcagaccgtccccggtgtggcacactggcactgtcccccttccaccaaacgcgagaaacttgattccaggcagcaacccctcttccattccattcccgccgaccccgacgccgccctgtctcctcggctcctctctccgatccaatggcctacgccgcacgcctcgtagccaaggtccacctcgccgcgacgccgcaggccgagccgcgccacctctccagcttccgcgtaggagcactcagtcgatccacaaccgttcaacggcaaaagtttgttgctaaatctgctatctcggctgtggaaagtggtgatacatttgttggagtaaagcaaaatactagacctatcatagtcatagacaactatgatagcttcacatataatttatgccagtacatgggagaggttggagctaattttgaggtttatcgcaatgatgagatcactgtggaagaaattaagaagatttctcctagaggaatacttatttccccaggccctggcactcctcaagattcaggaatatccttgcaaacagttacagagcttgggccctcaataccgttgtttggggtttgcatgggtttacagtgcattggagaggcatttggagggaaggttgttcgatccccttacggcgttgtgcacggaaagggctcccttgttcattatgatgagaaacttgatggaactctgttttatgatattcctaacccattccaggctggaaggtatcacagccttgtaatcgagaaggatagtttcccgcatgataccctggaaattgttgcgtggacagatgatgggttgatcatggctgctcgccacaggatatacaaacatattcagggcgtgcagttccatccggagagcatcataactactgaagggaggctcatggtcaacaattttatcaagattattgaaggctacgaagcctcgaattgctctccgtgatttatctagttggaagcagcagcagccctgcgtggggcgggtgacaataagatgatgtaaaagcttgtaactacatagctcgaacatgtaaactcagatgtatatgttcggatgtcacaaactcacgacactcagagtccaactactgtacatggtcgcatgtggcgtgtcgatgtcaaatcaaatcattgaacttttagctcggtgaccgctatatttgtttttttacagtagttaccactatatttgttcatttggcatctaattccttgttc

SEQ ID NO: 10936 - DNA, 1504 bp, Zea Mays
aagaagagtagtgttgtgtgagatttttcattcctttgatctattgcatgatatttgtaccccaatcaacaaaataaatgggactcaattcaggagaaaatcatcagtcctgttcacaatccaattcactatggctaaaatatcaaacttatgccccttgaggtttgttttttcctgctcttcctttaatatctgatgactgatggactcgtgagttcatgatctgcttcatgcttttccttttatatatggtcactacatcactggttagttcatgatctgtttgatgtctaaacctaccatatattggcagagtatactccttctaacttctcaggctacacttattataaatgcattggagaagagaaaccataacttgactatatactgaacacccatcatcactatgatcatactggtggaaacttggaattgaaagaaaaatatggtgcaaaggtcatggctgctattattttgctggttgtggagctatatcgacaggagcactcagtcgatccacaaccgttcaacggcaaaagtttgttgctaaatctgctatctcggctgtggaaagtggtgatacatttgttggagtaaagcaaaatactagacctatcatagtcatagacaactatgatagcttcacatataatttatgccagtacatgggagaggttggagctaattttgaggtttatcgcaatgatgagatcactgtggaagaaattaagaagatttctcctagaggaatacttatttccccaggccctggcactcctcaagattcaggaatatccttgcaaacagttacagagcttgggccctcaataccgttgtttggggtttgcatgggtttacagtgcattggagaggcatttggagggaaggttgttcgatccccttacggcgttgtgcacggaaagggctcccttgttcattatgatgagaaacttgatggaactctgttttatgatattcctaacccattccaggctggaaggtatcacagccttgtaatcgagaaggatagtttcccgcatgataccctggaaattgttgcgtggacagatgatgggttgatcatggctgctcgccacaggatatacaaacatattcagggcgtgcagttccatccggagagcatcataactactgaagggaggctcatggtcaacaattttatcaagattattgaaggctacgaagcctcgaattgctctccgtgatttatctagttggaagcagcagcagccctgcgtggggcgggtgacaataagatgatgtaaaagcttgtaactacatagctcgaacatgtaaactcagatgtatatgttcggatgtcacaaactcacgacactcagagtccaactactgtacatggtcgcatgtggcgtgtcgatgtcaaatcaaatcattgaacttttagctcggtgaccgctatatttgtttttttacagtagttaccactatatttgttcatttggcatctaattccttgttc

SEQ ID NO: 10937 - DNA, 1317 bp, Zea Mays
taccttggtactgttgccacaatggacaaaagaagagctacacttattataaatgcattggagaagagaaaccataacttgactatatactgaacacccatcatcactatgatcatactggtggaaacttggaattgaaagaaaaatatggtgcaaaggtaaattgttctgagaaggataaggacataatacatggtattgacatcattcttaaggagggtgacacatggatgtttgctggccattcggttcttgtactagaaactcctaggcatacagcaggtcatggctgctattattttgctggttgtggagctatatcgacaggagcactcagtcgatccacaaccgttcaacggcaaaagtttgttgctaaatctgctatctcggctgtggaaagtggtgatacatttgttggagtaaagcaaaatactagacctatcatagtcatagacaactatgatagcttcacatataatttatgccagtacatgggagaggttggagctaattttgaggtttatcgcaatgatgagatcactgtggaagaaattaagaagatttctcctagaggaatacttatttccccaggccctggcactcctcaagattcaggaatatccttgcaaacagttacagagcttgggccctcaataccgttgtttggggtttgcatgggtttacagtgcattggagaggcatttggagggaaggttgttcgatccccttacggcgttgtgcacggaaagggctcccttgttcattatgatgagaaacttgatggaactctgttttatgatattcctaagctggaaggtatcacagccttgtaatcgagaaggatagtttcccgcatgataccctggaaattgttgcgtggacagatgatgggttgatcatggctgctcgccacaggatatacaaacatattcagggcgtgcagttccatccggagagcatcataactactgaagggaggctcatggtcaacaattttatcaagattattgaaggctacgaagcctcgaattgctctccgtgatttatctagttggaagcagcagcagccctgcgtggggcgggtgacaataagatgatgtaaaagcttgtaactacatagctcgaacatgtaaactcagatgtatatgttcggatgtcacaaactcacgacactcagagtccaactactgtacatggtcgcatgtggcgtgtcgatgtcaaatcaaatcattgaacttttagctcggtgaccgctatatttgtttttttacagtagttaccactatatttgttcatttggcatctaattccttgttc

SEQ ID NO: 10938 - DNA, 1851 bp, Zea Mays
gttgcatttgcgcagcaaaaaggaggaaaaagtgaggagaaagaagagaggaaacaggaaagagtacaactcggcggcgacaccaccgctcgcagcctcccgccgcgatggcgatgcgttcgctcgccaggctccaccgccaactctccccttctctcctccaccgccatagcacacggcgtgggtggcctcccgcttctgacgcggcctttctctggcgcgggctcgcctcgtcatcaccttccgcggccggtcgggagaagagctcgagacggactttggggtaccttctcggcgttgcggtcgccatggtcggcgcctcgtacgccgccgtaccgctataccgtcgcttctgccaggctaccggctacggcggcaccgtccaacgacgcgagagtgtggaggagaagatctcacggcatgctcgagacggaactacgacatcacgagaaataattgttcaatttaatgctgatgttgctgatggaatgccgtggaagttcatccctacacagagagaggtcagggttaaacctggtgaaagtgctcttgctttttatactgctgagaatcgcagttcagctccaattactggtgtatccacgtataatgttgctcctatgaaggctgcgatttacttcaataagatacaatgtttctgctttgaggagcaaacacttcttcctggagaacagattgacatgccagtattcttctatatcgatcctgagtttgagacagaccccaaaatggacggggtgaacaatatcgttctttcgtatacattcttcaaggtgaacgatagttaggaaacgtgccaacagcattgttgtattaggaaaacaacacttgaacaatccatatgcagatatgctgcggaatagcatctcatgtaacaccaagagttttttttggtagttagctcacgttagtctgtggagaattttgcaaataatctgtaacggtgtacccgatggccaagggggtcaatgtggctaccagttttcatatgcaatctcaagaatcctacaggacgaagtgattgcatctcatcatgaaatcaggggcggcgaggatttcccatccttgtgtagctgagcgcacctgcaatacagctgcaaaagcgaagcaagacagccgtccggcggggatcggtggtcctttctgttgctccgacggccagcagggagacgggagacaggcaggccaacgaggaatcgaggatggcacgcgcggcgacctgcgtttccatgccacggccggcgcacgcggaaatggaagcaccctgcccagctacgggtcgtcactcgtcaggttcctgcagccgcacccgtttttttttttttttttttactcttccgtcccgctgccgccgcagcggcacaatgcaagcagcactgctccggcgtgaacgcacgtcacgccagcgcagggggtacgatacgaatccgccgtaccgaacgcactgcccctgccccgtggagactaggggactagagggagtagagggaaggcgggagaggtacgagcccggcgacggccctacacggctgcattttccctgccgcgacgcaattatctttacctgggcgttgactcctacctgtcgcgtctcgcgtggagggtcccaaggatcatgtcaatatgttcggtatgaatacttcacttggtatggcatccccacccgttgttcccggctacatgtttctgtcttcttgctgcattgaggctcagaggcacattgaattttatgtagtaatctagtagtatgtttggagtaaggacatgttttgaacctttagaactaacaatgagttattaaaaattagttgtagggttctaaacacccac

SEQ ID NO: 10939 - DNA, 1846 bp, Zea Mays
gttgcatttgcgcagcaaaaaggaggaaaaagtgaggagaaagaagagaggaaacaggaaagagtacaactcggcggcgacaccaccgctcgcagcctcccgccgcgatggcgatgcgttcgctcgccaggctccaccgccaactctccccttctctcctccaccgccatagcacacggcgtgggtggcctcccgcttctgacgcggcctttctctggcgcgggctcgcctcgtcatcaccttccgcggccggtcgggagaagagctcgagacggactttggggtaccttctcggcgttgcggtcgccatggtcggcgcctcgtacgccgccgtaccgctataccgtcgcttctgccaggctaccggctacggcggcaccgtccaacgacgcgagagtgtggaggagaagatctcacggcatgctcgagacggaactacgacatcacgagaaataattgttcaatttaatgctgatgttgctgatggaatgccgtggaagttcatccctacacagagagagggttaaacctggtgaaagtgctcttgctttttatactgctgagaatcgcagttcagctccaattactggtgtatccacgtataatgttgctcctatgaaggctgcgatttacttcaataagatacaatgtttctgctttgaggagcaaacacttcttcctggagaacagattgacatgccagtattcttctatatcgatcctgagtttgagacagaccccaaaatggacggggtgaacaatatcgttctttcgtatacattcttcaaggtgaacgatagttaggaaacgtgccaacagcattgttgtattaggaaaacaacacttgaacaatccatatgcagatatgctgcggaatagcatctcatgtaacaccaagagttttttttggtagttagctcacgttagtctgtggagaattttgcaaataatctgtaacggtgtacccgatggccaagggggtcaatgtggctaccagttttcatatgcaatctcaagaatcctacaggacgaagtgattgcatctcatcatgaaatcaggggcggcgaggatttcccatccttgtgtagctgagcgcacctgcaatacagctgcaaaagcgaagcaagacagccgtccggcggggatcggtggtcctttctgttgctccgacggccagcagggagacgggagacaggcaggccaacgaggaatcgaggatggcacgcgcggcgacctgcgtttccatgccacggccggcgcacgcggaaatggaagcaccctgcccagctacgggtcgtcactcgtcaggttcctgcagccgcacccgtttttttttttttttttttactcttccgtcccgctgccgccgcagcggcacaatgcaagcagcactgctccggcgtgaacgcacgtcacgccagcgcagggggtacgatacgaatccgccgtaccgaacgcactgcccctgccccgtggagactaggggactagagggagtagagggaaggcgggagaggtacgagcccggcgacggccctacacggctgcattttccctgccgcgacgcaattatctttacctgggcgttgactcctacctgtcgcgtctcgcgtggagggtcccaaggatcatgtcaatatgttcggtatgaatacttcacttggtatggcatccccacccgttgttcccggctacatgtttctgtcttcttgctgcattgaggctcagaggcacattgaattttatgtagtaatctagtagtatgtttggagtaaggacatgttttgaacctttagaactaacaatgagttattaaaaattagttgtagggttctaaacacccac

SEQ ID NO: 10940 - DNA, 1466 bp, Zea Mays
ctcacacctaggtgaaggcttgctgggaaaccgtccaccagcaaagtttcctgttcctctaccaccatcaccttcaatgaaggatgacgagattcttgctccatctcaggagctgagcaagcaagggtgtatcctggaggctgttattgaagcaagtgctactgaaattatcaatctcatggatagcctaaatgaatgggacagtaaagtgggcgatggtgactgtggaagcacaatgtatagaggtgcaacagctattcttgaagatatgaaaaagcgttaccctatgaatgatgcagcgggaacaataaatgaaattggggcaacaatccgaagggtgatgggtggaacaagtggaatcttgtatgccatactctgcaaggctgcgtatgcaagcttaaagcagagctcaactgtcactgcgaataaatgggctgatgctttagaggcctccattgctgctgttagcaaatatggtggtgccagcgcaggataccgcacaatgttggatgccctaattcctgcttctgctgttctgaaacagagacttgaggctggggatgatcccgtgactgctttcatcgcgtcttctgaagcagcatcagctggcgctgaatccaccaaacaaatgcaagcgaaggctggacggtcatcatacatcgctccagatctcctggcctcaatccctgatcctggtgcaatggctgcagctgcatggtacagagctgctgcccttgcagtgaagaacaaagtgcacggttcaaagagctagtagcatacgcaatgcttcattgctagacccaaaatagactgacaggaaaaatcactggggcattttctcactccccttagatttggtttccgcttgtgcttttgcatgggccgagaaaaaaaatgacttccatattgtctcacccttctcacatcatacaaagagatgttcaaagagttcgtcgtccgtacaagttaagggaagctatgcttttgcactgccgtgatatctcagcatgctgtcagtgttggaatgaccattgtttaatttgcccgagtttcgttttaatggctgagcccatgctgtcagtggtgggaatgatcgttgtttattctgcccgagtcccgtttcaattgtgcgcatttcggtaggatgtttaacaaaaaaacgttgtctttgaccgaggggtagtttgcactactgttgacttgtaatgttttttatcttgatcaatggcttgctgcatggtttctttctttctgggcaagattctcgaatggaacctaagacgtctatttatcgaggttttgcatatcatgaccaaattatcttgaggaaaacttgttactcgtacttgcctttgtatgcctgaacatctaattgtttttgtggttccgcaatttgcactttgatagcccgtaaataaaatattcaaatggagagatgcctatttaaaaaaaaagaaaagcaactg

SEQ ID NO: 10941 - DNA, 1735 bp, Zea Mays
atatgagaggattgggagcttgtggcagcatgtttatgatactgtctacctatatcaaatcctacttagagattaggagccactcctatcatggaacttatgattgcagcgagaaaagcagttcctgagttgcaattggtgtatggcattgctgttgacagagtctacactggcacacttatgacatcacttgatatggcaggattatctattaccattatgaagtccggcgaaagcattttgaagagacttgatgctcccactaaagctccagcttggcctgttggttctgaaggaaaccgtccaccagcaaagtttcctgttcctctaccaccatcaccttcaatgaaggatgacgagattcttgctccatctcaggagctgagcaagcaagggtgtatcctggaggctgttattgaagcaagtgctactgaaattatcaatctcatggatagcctaaatgaatgggacagtaaagtgggcgatggtgactgtggaagcacaatgtatagaggtgcaacagctattcttgaagatatgaaaaagcgttaccctatgaatgatgcagcgggaacaataaatgaaattggggcaacaatccgaagggtgatgggtggaacaagtggaatcttgtatgccatactctgcaaggctgcgtatgcaagcttaaagcagagctcaactgtcactgcgaataaatgggctgatgctttagaggcctccattgctgctgttagcaaatatggtggtgccagcgcaggataccgcacaatgttggatgccctaattcctgcttctgctgttctgaaacagagacttgaggctggggatgatcccgtgactgctttcatcgcgtcttctgaagcagcatcagctggcgctgaatccaccaaacaaatgcaagcgaaggctggacggtcatcatacatcgctccagatctcctggcctcaatccctgatcctggtgcaatggctgcagctgcatggtacagagctgctgcccttgcagtgaagaacaaagtgcacggttcaaagagctagtagcatacgcaatgcttcattgctagacccaaaatagactgacaggaaaaatcactggggcattttctcactccccttagatttggtttccgcttgtgcttttgcatgggccgagaaaaaaaatgacttccatattgtctcacccttctcacatcatacaaagagatgttcaaagagttcgtcgtccgtacaagttaagggaagctatgcttttgcactgccgtgatatctcagcatgctgtcagtgttggaatgaccattgtttaatttgcccgagtttcgttttaatggctgagcccatgctgtcagtggtgggaatgatcgttgtttattctgcccgagtcccgtttcaattgtgcgcatttcggtaggatgtttaacaaaaaaacgttgtctttgaccgaggggtagtttgcactactgttgacttgtaatgttttttatcttgatcaatggcttgctgcatggtttctttctttctgggcaagattctcgaatggaacctaagacgtctatttatcgaggttttgcatatcatgaccaaattatcttgaggaaaacttgttactcgtacttgcctttgtatgcctgaacatctaattgtttttgtggttccgcaatttgcactttgatagcccgtaaataaaatattcaaatggagagatgcctatttaaaaaaaaagaaaagcaactg

SEQ ID NO: 10942 - DNA, 1727 bp, Zea Mays
gtcacctgtacccaagtcgttatcttttatggataatttctttgtttactgatggtggccgggattaggagccactcctatcatggaacttatgattgcagcgagaaaagcagttcctgagttgcaattggtgtatggcattgctgttgacagagtctacactggcacacttatgacatcacttgatatggcaggattatctattaccattatgaagtccggcgaaagcattttgaagagacttgatgctcccactaaagctccagcttggcctgttggttctgaaggaaaccgtccaccagcaaagtttcctgttcctctaccaccatcaccttcaatgaaggatgacgagattcttgctccatctcaggagctgagcaagcaagggtgtatcctggaggctgttattgaagcaagtgctactgaaattatcaatctcatggatagcctaaatgaatgggacagtaaagtgggcgatggtgactgtggaagcacaatgtatagaggtgcaacagctattcttgaagatatgaaaaagcgttaccctatgaatgatgcagcgggaacaataaatgaaattggggcaacaatccgaagggtgatgggtggaacaagtggaatcttgtatgccatactctgcaaggctgcgtatgcaagcttaaagcagagctcaactgtcactgcgaataaatgggctgatgctttagaggcctccattgctgctgttagcaaatatggtggtgccagcgcaggataccgcacaatgttggatgccctaattcctgcttctgctgttctgaaacagagacttgaggctggggatgatcccgtgactgctttcatcgcgtcttctgaagcagcatcagctggcgctgaatccaccaaacaaatgcaagcgaaggctggacggtcatcatacatcgctccagatctcctggcctcaatccctgatcctggtgcaatggctgcagctgcatggtacagagctgctgcccttgcagtgaagaacaaagtgcacggttcaaagagctagtagcatacgcaatgcttcattgctagacccaaaatagactgacaggaaaaatcactggggcattttctcactccccttagatttggtttccgcttgtgcttttgcatgggccgagaaaaaaaatgacttccatattgtctcacccttctcacatcatacaaagagatgttcaaagagttcgtcgtccgtacaagttaagggaagctatgcttttgcactgccgtgatatctcagcatgctgtcagtgttggaatgaccattgtttaatttgcccgagtttcgttttaatggctgagcccatgctgtcagtggtgggaatgatcgttgtttattctgcccgagtcccgtttcaattgtgcgcatttcggtaggatgtttaacaaaaaaacgttgtctttgaccgaggggtagtttgcactactgttgacttgtaatgttttttatcttgatcaatggcttgctgcatggtttctttctttctgggcaagattctcgaatggaacctaagacgtctatttatcgaggttttgcatatcatgaccaaattatcttgaggaaaacttgttactcgtacttgcctttgtatgcctgaacatctaattgtttttgtggttccgcaatttgcactttgatagcccgtaaataaaatattcaaatggagagatgcctatttaaaaaaaaagaaaagcaactg

SEQ ID NO: 10943 - DNA, 1712 bp, Zea Mays
ggagacttctattttcccttgtcaatgtcaaagggatctggttggaagattaggagccactcctatcatggaacttatgattgcagcgagaaaagcagttcctgagttgcaattggtgtatggcattgctgttgacagagtctacactggcacacttatgacatcacttgatatggcaggattatctattaccattatgaagtccggcgaaagcattttgaagagacttgatgctcccactaaagctccagcttggcctgttggttctgaaggaaaccgtccaccagcaaagtttcctgttcctctaccaccatcaccttcaatgaaggatgacgagattcttgctccatctcaggagctgagcaagcaagggtgtatcctggaggctgttattgaagcaagtgctactgaaattatcaatctcatggatagcctaaatgaatgggacagtaaagtgggcgatggtgactgtggaagcacaatgtatagaggtgcaacagctattcttgaagatatgaaaaagcgttaccctatgaatgatgcagcgggaacaataaatgaaattggggcaacaatccgaagggtgatgggtggaacaagtggaatcttgtatgccatactctgcaaggctgcgtatgcaagcttaaagcagagctcaactgtcactgcgaataaatgggctgatgctttagaggcctccattgctgctgttagcaaatatggtggtgccagcgcaggataccgcacaatgttggatgccctaattcctgcttctgctgttctgaaacagagacttgaggctggggatgatcccgtgactgctttcatcgcgtcttctgaagcagcatcagctggcgctgaatccaccaaacaaatgcaagcgaaggctggacggtcatcatacatcgctccagatctcctggcctcaatccctgatcctggtgcaatggctgcagctgcatggtacagagctgctgcccttgcagtgaagaacaaagtgcacggttcaaagagctagtagcatacgcaatgcttcattgctagacccaaaatagactgacaggaaaaatcactggggcattttctcactccccttagatttggtttccgcttgtgcttttgcatgggccgagaaaaaaaatgacttccatattgtctcacccttctcacatcatacaaagagatgttcaaagagttcgtcgtccgtacaagttaagggaagctatgcttttgcactgccgtgatatctcagcatgctgtcagtgttggaatgaccattgtttaatttgcccgagtttcgttttaatggctgagcccatgctgtcagtggtgggaatgatcgttgtttattctgcccgagtcccgtttcaattgtgcgcatttcggtaggatgtttaacaaaaaaacgttgtctttgaccgaggggtagtttgcactactgttgacttgtaatgttttttatcttgatcaatggcttgctgcatggtttctttctttctgggcaagattctcgaatggaacctaagacgtctatttatcgaggttttgcatatcatgaccaaattatcttgaggaaaacttgttactcgtacttgcctttgtatgcctgaacatctaattgtttttgtggttccgcaatttgcactttgatagcccgtaaataaaatattcaaatggagagatgcctatttaaaaaaaaagaaaagcaactg

SEQ ID NO: 10944 - DNA, 2528 bp, Zea Mays
aagcaaaagcccacagaacgagtgaggccaggcgacttcatactgctcgcctcgccgtctttcccccaatctgttgctcctccaagctgcgggcgatcgccgtaccccggccgccgcagggaaccccctcgccatggccttgcaggggaagaagctcatcaacaaccccgacgatgtggtgacggagttcatcgaagggttggtggagacttacccgggtctgcagtacctcgacgggttccctcagattaaggtcgttcttcgtgctgatgtcgagcgcggttcctatgacaaagttgcagtcatctcgggtggtggaagtggccatgaaccttcccatgctggatttgttgggccagggatgttgacagctgctgtttctggagatgttttcgcctctccacctgttgattctattttagctgctattcgagctgtaactggtcccatggggtgccttctaatagtaaagaactacactggtgatagactcaattttggattagctgctgagcaggcaaaatctgaaggctataagatggagatggtcattgttggagacgattgtgcccttcctccacctagagggatagctggtagaagaggtttagctggaacaattcttgtgcataaggttgctggggccgcagcagatgctggtttatctcttgcagaggttgccgcagaagcaaaacatgcatctgaggttgttggtacgatgggagttgcactttctgtttgcacattgcctgggcaaataacttctgatcgtctaggtccaaggcaaatggagcttggccttggaattgaaactcagtatcttcctgtcacaagaggttgcaatgctgttctcctagtgaatggattaggagccactcctatcatggaacttatgattgcagcgagaaaagcagttcctgagttgcaattggtgtatggcattgctgttgacagagtctacactggcacacttatgacatcacttgatatggcaggattatctattaccattatgaagtccggcgaaagcattttgaagagacttgatgctcccactaaagctccagcttggcctgttggttctgaaggaaaccgtccaccagcaaagtttcctgttcctctaccaccatcaccttcaatgaaggatgacgagattcttgctccatctcaggagctgagcaagcaagggtgtatcctggaggctgttattgaagcaagtgctactgaaattatcaatctcatggatagcctaaatgaatgggacagtaaagtgggcgatggtgactgtggaagcacaatgtatagaggtgcaacagctattcttgaagatatgaaaaagcgttaccctatgaatgatgcagcgggaacaataaatgaaattggggcaacaatccgaagggtgatgggtggaacaagtggaatcttgtatgccatactctgcaaggctgcgtatgcaagcttaaagcagagctcaactgtcactgcgaataaatgggctgatgctttagaggcctccattgctgctgttagcaaatatggtggtgccagcgcaggataccgcacaatgttggatgccctaattcctgcttctgctgttctgaaacagagacttgaggctggggatgatcccgtgactgctttcatcgcgtcttctgaagcagcatcagctggcgctgaatccaccaaacaaatgcaagcgaaggctggacggtcatcatacatcgctccagatctcctggcctcaatccctgatcctggtgcaatggctgcagctgcatggtacagagctgctgcccttgcagtgaagaacaaagtgcacggttcaaagagctagtagcatacgcaatgcttcattgctagacccaaaatagactgacaggaaaaatcactggggcattttctcactccccttagatttggtttccgcttgtgcttttgcatgggccgagaaaaaaaatgacttccatattgtctcacccttctcacatcatacaaagagatgttcaaagagttcgtcgtccgtacaagttaagggaagctatgcttttgcactgccgtgatatctcagcatgctgtcagtgttggaatgaccattgtttaatttgcccgagtttcgttttaatggctgagcccatgctgtcagtggtgggaatgatcgttgtttattctgcccgagtcccgtttcaattgtgcgcatttcggtaggatgtttaacaaaaaaacgttgtctttgaccgaggggtagtttgcactactgttgacttgtaatgttttttatcttgatcaatggcttgctgcatggtttctttctttctgggcaagattctcgaatggaacctaagacgtctatttatcgaggttttgcatatcatgaccaaattatcttgaggaaaacttgttactcgtacttgcctttgtatgcctgaacatctaattgtttttgtggttccgcaatttgcactttgatagcccgtaaataaaatattcaaatggagagatgcctatttaaaaaaaaagaaaagcaactg

SEQ ID NO: 10945 - DNA, 2594 bp, Zea Mays
aagcaaaagcccacagaacgagtgaggccaggcgacttcatactgctcgcctcgccgtctttcccccaatctgttgctcctccaagctgcgggcgatcgccgtaccccggccgccgcagggaaccccctcgccatggccttgcaggggaagaagctcatcaacaaccccgacgatgtggtgacggagttcatcgaagggttggtggagacttacccgggtctgcagtacctcgacgggttccctcagattaaggtcgttcttcgtgctgatgtcgagcgcggttcctatgacaaagttgcagtcatctcgggtggtggaagtggccatgaaccttcccatgctggatttgttgggccagggatgttgacagctgctgtttctggagatgttttcgcctctccacctgttgattctattttagctgctattcgagctgtaactggtcccatggggtgccttctaatagtaaagaactacactggtgatagactcaattttggattagctgctgagcaggcaaaatctgaaggctataagatggagatggtcattgttggagacgattgtgcccttcctccacctagagggatagctggtagaagaggtttagctggaacaattcttgtgcataaggttgctggggccgcagcagatgctggtttatctcttgcagaggttgccgcagaagcaaaacatgcatctgaggttgttggtacgatgggagttgcactttctgtttgcacattgcctgggcaaataacttctgatcgtctaggtccaaggcaaatggagcttggccttggaattcatggagaacctggagttgctgttgttgaactccagccagttgacgtagtggtagaacatgtccttaaacagatattgtcacaggaaactcagtatcttcctgtcacaagaggttgcaatgctgttctcctagtgaatggattaggagccactcctatcatggaacttatgattgcagcgagaaaagcagttcctgagttgcaattggtgtatggcattgctgttgacagagtctacactggcacacttatgacatcacttgatatggcaggattatctattaccattatgaagtccggcgaaagcattttgaagagacttgatgctcccactaaagctccagcttggcctgttggttctgaaggaaaccgtccaccagcaaagtttcctgttcctctaccaccatcaccttcaatgaaggatgacgaggagctgagcaagcaagggtgtatcctggaggctgttattgaagcaagtgctactgaaattatcaatctcatggatagcctaaatgaatgggacagtaaagtgggcgatggtgactgtggaagcacaatgtatagaggtgcaacagctattcttgaagatatgaaaaagcgttaccctatgaatgatgcagcgggaacaataaatgaaattggggcaacaatccgaagggtgatgggtggaacaagtggaatcttgtatgccatactctgcaaggctgcgtatgcaagcttaaagcagagctcaactgtcactgcgaataaatgggctgatgctttagaggcctccattgctgctgttagcaaatatggtggtgccagcgcaggataccgcacaatgttggatgccctaattcctgcttctgctgttctgaaacagagacttgaggctggggatgatcccgtgactgctttcatcgcgtcttctgaagcagcatcagctggcgctgaatccaccaaacaaatgcaagcgaaggctggacggtcatcatacatcgctccagatctcctggcctcaatccctgatcctggtgcaatggctgcagctgcatggtacagagctgctgcccttgcagtgaagaacaaagtgcacggttcaaagagctagtagcatacgcaatgcttcattgctagacccaaaatagactgacaggaaaaatcactggggcattttctcactccccttagatttggtttccgcttgtgcttttgcatgggccgagaaaaaaaatgacttccatattgtctcacccttctcacatcatacaaagagatgttcaaagagttcgtcgtccgtacaagttaagggaagctatgcttttgcactgccgtgatatctcagcatgctgtcagtgttggaatgaccattgtttaatttgcccgagtttcgttttaatggctgagcccatgctgtcagtggtgggaatgatcgttgtttattctgcccgagtcccgtttcaattgtgcgcatttcggtaggatgtttaacaaaaaaacgttgtctttgaccgaggggtagtttgcactactgttgacttgtaatgttttttatcttgatcaatggcttgctgcatggtttctttctttctgggcaagattctcgaatggaacctaagacgtctatttatcgaggttttgcatatcatgaccaaattatcttgaggaaaacttgttactcgtacttgcctttgtatgcctgaacatctaattgtttttgtggttccgcaatttgcactttgatagcccgtaaataaaatattcaaatggagagatgcctatttaaaaaaaaagaaaagcaactg

SEQ ID NO: 10946 - DNA, 2484 bp, Zea Mays
aagcaaaagcccacagaacgagtgaggccaggcgacttcatactgctcgcctcgccgtctttcccccaatctgttgctcctccaagctgcgggcgatcgccgtaccccggccgccgcagggaaccccctcgccatggccttgcaggggaagaagctcatcaacaaccccgacgatgtggtgacggagttcatcgaagggttggtggagacttacccgggtctgcagtacctcgacgggttccctcagattaaggtcgttcttcgtgctgatgtcgagcgcggttcctatgacaaagttgcagtcatctcgggtggtggaagtggccatgaaccttcccatgctggatttgttgggccagggatgttgacagctgctgtttctggagatgttttcgcctctccacctgttgattctattttagctgctattcgagctgtaactggtcccatggggtgccttctaatagtaaagatggtcattgttggagacgattgtgcccttcctccacctagagggatagctggtagaagaggtttagctggaacaattcttgtgcataaggttgctggggccgcagcagatgctggtttatctcttgcagaggttgccgcagaagcaaaacatgcatctgaggttgttggtacgatgggagttgcactttctgtttgcacattgcctgggcaaataacttctgatcgtctaggtccaaggcaaatggagcttggccttggaattcatggagaacctggagttgctgttgttgaactccagccagttgacgtagtggtagaacatgtccttaaacagatattgtcacagattaggagccactcctatcatggaacttatgattgcagcgagaaaagcagttcctgagttgcaattggtgtatggcattgctgttgacagagtctacactggcacacttatgacatcacttgatatggcaggattatctattaccattatgaagtccggcgaaagcattttgaagagacttgatgctcccactaaagctccagcttggcctgttggttctgaaggaaaccgtccaccagcaaagtttcctgttcctctaccaccatcaccttcaatgaaggatgacgagattcttgctccatctcaggagctgagcaagcaagggtgtatcctggaggctgttattgaagcaagtgctactgaaattatcaatctcatggatagcctaaatgaatgggacagtaaagtgggcgatggtgactgtggaagcacaatgtatagaggtgcaacagctattcttgaagatatgaaaaagcgttaccctatgaatgatgcagcgggaacaataaatgaaattggggcaacaatccgaagggtgatgggtggaacaagtggaatcttgtatgccatactctgcaaggctgcgtatgcaagcttaaagcagagctcaactgtcactgcgaataaatgggctgatgctttagaggcctccattgctgctgttagcaaatatggtggtgccagcgcaggataccgcacaatgttggatgccctaattcctgcttctgctgttctgaaacagagacttgaggctggggatgatcccgtgactgctttcatcgcgtcttctgaagcagcatcagctggcgctgaatccaccaaacaaatgcaagcgaaggctggacggtcatcatacatcgctccagatctcctggcctcaatccctgatcctggtgcaatggctgcagctgcatggtacagagctgctgcccttgcagtgaagaacaaagtgcacggttcaaagagctagtagcatacgcaatgcttcattgctagacccaaaatagactgacaggaaaaatcactggggcattttctcactccccttagatttggtttccgcttgtgcttttgcatgggccgagaaaaaaaatgacttccatattgtctcacccttctcacatcatacaaagagatgttcaaagagttcgtcgtccgtacaagttaagggaagctatgcttttgcactgccgtgatatctcagcatgctgtcagtgttggaatgaccattgtttaatttgcccgagtttcgttttaatggctgagcccatgctgtcagtggtgggaatgatcgttgtttattctgcccgagtcccgtttcaattgtgcgcatttcggtaggatgtttaacaaaaaaacgttgtctttgaccgaggggtagtttgcactactgttgacttgtaatgttttttatcttgatcaatggcttgctgcatggtttctttctttctgggcaagattctcgaatggaacctaagacgtctatttatcgaggttttgcatatcatgaccaaattatcttgaggaaaacttgttactcgtacttgcctttgtatgcctgaacatctaattgtttttgtggttccgcaatttgcactttgatagcccgtaaataaaatattcaaatggagagatgcctatttaaaaaaaaagaaaagcaactg

SEQ ID NO: 10947 - DNA, 2517 bp, Zea Mays
aagcaaaagcccacagaacgagtgaggccaggcgacttcatactgctcgcctcgccgtctttcccccaatctgttgctcctccaagctgcgggcgatcgccgtaccccggccgccgcagggaaccccctcgccatggccttgcaggggaagaagctcatcaacaaccccgacgatgtggtgacggagttcatcgaagggttggtggagacttacccgggtctgcagtacctcgacgggttccctcagattaaggtcgttcttcgtgctgatgtcgagcgcggttcctatgacaaagttgcagtcatctcgggtggtggaagtggccatgaaccttcccatgctggatttgttgggccagggatgttgacagctgctgtttctggagatgttttcgcctctccacctgttgattctattttagctgctattcgagctgtaactggtcccatggggtgccttctaatagtaaagaactacactggtgatagactcaattttggattagctgctgagcaggcaaaatctgaaggctataagatggagatggtcattgttggagacgattgtgcccttcctccacctagagggatagctggtagaagaggtttagctggaacaattcttgtgcataaggttgctggggccgcagcagatgctggtttatctcttgcagaggttgccgcagaagcaaaacatgcatctgaggttgttgcatggagaacctggagttgctgttgttgaactccagccagttgacgtagtggtagaacatgtccttaaacagatattgtcacaggaaactcagtatcttcctgtcacaagaggttgcaatgctgttctcctagtgaatggattaggagccactcctatcatggaacttatgattgcagcgagaaaagcagttcctgagttgcaattggtgtatggcattgctgttgacagagtctacactggcacacttatgacatcacttgatatggcaggattatctattaccattatgaagtccggcgaaagcattttgaagagacttgatgctcccactaaagctccagcttggcctgttggttctgaaggaaaccgtccaccagcaaagtttcctgttcctctaccaccatcaccttcaatgaaggatgacgagattcttgctccatctcaggagctgagcaagcaagggtgtatcctggaggctgttattgaagcaagtgctactgaaattatcaatctcatggatagcctaaatgaatgggacagtaaagtgggcgatggtgactgtggaagcacaatgtatagaggtgcaacagctattcttgaagatatgaaaaagcgttaccctatgaatgatgcagcgggaacaataaatgaaattggggcaacaatccgaagggtgatgggtggaacaagtggaatcttgtatgccatactctgcaaggctgcgtatgcaagcttaaagcagagctcaactgtcactgcgaataaatgggctgatgctttagaggcctccattgctgctgttagcaaatatggtggtgccagcgcaggataccgcacaatgttggatgccctaattcctgcttctgctgttctgaaacagagacttgaggctggggatgatcccgtgactgctttcatcgcgtcttctgaagcagcatcagctggcgctgaatccaccaaacaaatgcaagcgaaggctggacggtcatcatacatcgctccagatctcctggcctcaatccctgatcctggtgcaatggctgcagctgcatggtacagagctgctgcccttgcagtgaagaacaaagtgcacggttcaaagagctagtagcatacgcaatgcttcattgctagacccaaaatagactgacaggaaaaatcactggggcattttctcactccccttagatttggtttccgcttgtgcttttgcatgggccgagaaaaaaaatgacttccatattgtctcacccttctcacatcatacaaagagatgttcaaagagttcgtcgtccgtacaagttaagggaagctatgcttttgcactgccgtgatatctcagcatgctgtcagtgttggaatgaccattgtttaatttgcccgagtttcgttttaatggctgagcccatgctgtcagtggtgggaatgatcgttgtttattctgcccgagtcccgtttcaattgtgcgcatttcggtaggatgtttaacaaaaaaacgttgtctttgaccgaggggtagtttgcactactgttgacttgtaatgttttttatcttgatcaatggcttgctgcatggtttctttctttctgggcaagattctcgaatggaacctaagacgtctatttatcgaggttttgcatatcatgaccaaattatcttgaggaaaacttgttactcgtacttgcctttgtatgcctgaacatctaattgtttttgtggttccgcaatttgcactttgatagcccgtaaataaaatattcaaatggagagatgcctatttaaaaaaaaagaaaagcaactg

SEQ ID NO: 10948 - DNA, 2510 bp, Zea Mays
aagcaaaagcccacagaacgagtgaggccaggcgacttcatactgctcgcctcgccgtctttcccccaatctgttgctcctccaagctgcgggcgatcgccgtaccccggccgccgcagggaaccccctcgccatggccttgcaggggaagaagctcatcaacaaccccgacgatgtggtgacggagttcatcgaagggttggtggagacttacccgggtctgcagtacctcgacgggttccctcagattaaggtcgttcttcgtgctgatgtcgagcgcggttcctatgacaaagttgcagtcatctcgggtggtggaagtggccatgaaccttcccatgctggatttgttgggccagggatgttgacagctgctgtttctggagatgttttcgcctctccacctgttgattctattttagctgctattcgagctgtaactggtcccatggggtgccttctaatagtaaagaactacactggtgatagactcaattttggattagctgctgagcaggcaaaatctgaaggctataagatggagatggtcattgttggagacgattgtgcccttcctccacctagagggatagctggtagaagaggtttagctggaacaattcttgtgcataaggttgctggggccgcagcagatgctggtttatctcttgcagaggttgccgcagaagcaaaacatgcatctgagcatggagaacctggagttgctgttgttgaactccagccagttgacgtagtggtagaacatgtccttaaacagatattgtcacaggaaactcagtatcttcctgtcacaagaggttgcaatgctgttctcctagtgaatggattaggagccactcctatcatggaacttatgattgcagcgagaaaagcagttcctgagttgcaattggtgtatggcattgctgttgacagagtctacactggcacacttatgacatcacttgatatggcaggattatctattaccattatgaagtccggcgaaagcattttgaagagacttgatgctcccactaaagctccagcttggcctgttggttctgaaggaaaccgtccaccagcaaagtttcctgttcctctaccaccatcaccttcaatgaaggatgacgagattcttgctccatctcaggagctgagcaagcaagggtgtatcctggaggctgttattgaagcaagtgctactgaaattatcaatctcatggatagcctaaatgaatgggacagtaaagtgggcgatggtgactgtggaagcacaatgtatagaggtgcaacagctattcttgaagatatgaaaaagcgttaccctatgaatgatgcagcgggaacaataaatgaaattggggcaacaatccgaagggtgatgggtggaacaagtggaatcttgtatgccatactctgcaaggctgcgtatgcaagcttaaagcagagctcaactgtcactgcgaataaatgggctgatgctttagaggcctccattgctgctgttagcaaatatggtggtgccagcgcaggataccgcacaatgttggatgccctaattcctgcttctgctgttctgaaacagagacttgaggctggggatgatcccgtgactgctttcatcgcgtcttctgaagcagcatcagctggcgctgaatccaccaaacaaatgcaagcgaaggctggacggtcatcatacatcgctccagatctcctggcctcaatccctgatcctggtgcaatggctgcagctgcatggtacagagctgctgcccttgcagtgaagaacaaagtgcacggttcaaagagctagtagcatacgcaatgcttcattgctagacccaaaatagactgacaggaaaaatcactggggcattttctcactccccttagatttggtttccgcttgtgcttttgcatgggccgagaaaaaaaatgacttccatattgtctcacccttctcacatcatacaaagagatgttcaaagagttcgtcgtccgtacaagttaagggaagctatgcttttgcactgccgtgatatctcagcatgctgtcagtgttggaatgaccattgtttaatttgcccgagtttcgttttaatggctgagcccatgctgtcagtggtgggaatgatcgttgtttattctgcccgagtcccgtttcaattgtgcgcatttcggtaggatgtttaacaaaaaaacgttgtctttgaccgaggggtagtttgcactactgttgacttgtaatgttttttatcttgatcaatggcttgctgcatggtttctttctttctgggcaagattctcgaatggaacctaagacgtctatttatcgaggttttgcatatcatgaccaaattatcttgaggaaaacttgttactcgtacttgcctttgtatgcctgaacatctaattgtttttgtggttccgcaatttgcactttgatagcccgtaaataaaatattcaaatggagagatgcctatttaaaaaaaaagaaaagcaactg

SEQ ID NO: 10949 - DNA, 2567 bp, Zea Mays
gctccctgtgcaagcaaaagcccacagaacgagtgaggccaggcgacttcatactgctcgcctcgccgtctttcccccaatctgttgctcctccaagctgcgggcgatcgccgtaccccggccgccgcagggaaccccctcgccatggccttgcaggggaagaagctcatcaacaaccccgacgatgtggtgacggagttcatcgaagggttggtggagacttacccgggtctgcagtacctcgacgggttccctcagattaaggtcgttcttcgtgctgatgtcgagcgcggttcctatgacaaagttgcagtcatctcgggtggtggaagtggccatgaaccttcccatgctggatttgttgggccagggatgttgacagctgctgtttctggagatgttttcgcctctccacctgttgattctattttagctgctattcgagctgtaactggtcccatggggtgccttctaatagtaaagaactacactggtgatagactcaattttggattagctgctgagcaggcaaaatctgaaggctataagatggagatggtcattgttggagacgattgtgcccttcctccacctagagggatagctggtagaagaggtttagctggaacaattcttgtgcataaggttgctggggccgcagcagatgctggtttatctcttgcagaggttgccgcagaagcaaaacatgcatctgaggttgttggtacgatgggagttgcactttctgtttgcacattgcctgggcaaataacttctgatcgtctaggtccaaggcaaatggagcttggccttggaattcatggagaacctggagttgctgttgttgaactccagccagttgacgtagtggtagaacatgtccttaaacagatattgtcacagattaggagccactcctatcatggaacttatgattgcagcgagaaaagcagttcctgagttgcaattggtgtatggcattgctgttgacagagtctacactggcacacttatgacatcacttgatatggcaggattatctattaccattatgaagtccggcgaaagcattttgaagagacttgatgctcccactaaagctccagcttggcctgttggttctgaaggaaaccgtccaccagcaaagtttcctgttcctctaccaccatcaccttcaatgaaggatgacgagattcttgctccatctcaggagctgagcaagcaagggtgtatcctggaggctgttattgaagcaagtgctactgaaattatcaatctcatggatagcctaaatgaatgggacagtaaagtgggcgatggtgactgtggaagcacaatgtatagaggtgcaacagctattcttgaagatatgaaaaagcgttaccctatgaatgatgcagcgggaacaataaatgaaattggggcaacaatccgaagggtgatgggtggaacaagtggaatcttgtatgccatactctgcaaggctgcgtatgcaagcttaaagcagagctcaactgtcactgcgaataaatgggctgatgctttagaggcctccattgctgctgttagcaaatatggtggtgccagcgcaggataccgcacaatgttggatgccctaattcctgcttctgctgttctgaaacagagacttgaggctggggatgatcccgtgactgctttcatcgcgtcttctgaagcagcatcagctggcgctgaatccaccaaacaaatgcaagcgaaggctggacggtcatcatacatcgctccagatctcctggcctcaatccctgatcctggtgcaatggctgcagctgcatggtacagagctgctgcccttgcagtgaagaacaaagtgcacggttcaaagagctagtagcatacgcaatgcttcattgctagacccaaaatagactgacaggaaaaatcactggggcattttctcactccccttagatttggtttccgcttgtgcttttgcatgggccgagaaaaaaaatgacttccatattgtctcacccttctcacatcatacaaagagatgttcaaagagttcgtcgtccgtacaagttaagggaagctatgcttttgcactgccgtgatatctcagcatgctgtcagtgttggaatgaccattgtttaatttgcccgagtttcgttttaatggctgagcccatgctgtcagtggtgggaatgatcgttgtttattctgcccgagtcccgtttcaattgtgcgcatttcggtaggatgtttaacaaaaaaacgttgtctttgaccgaggggtagtttgcactactgttgacttgtaatgttttttatcttgatcaatggcttgctgcatggtttctttctttctgggcaagattctcgaatggaacctaagacgtctatttatcgaggttttgcatatcatgaccaaattatcttgaggaaaacttgttactcgtacttgcctttgtatgcctgaacatctaattgtttttgtggttccgcaatttgcactttgatagcccgtaaataaaatattcaaatggagagatgcctatttaaaaaaaaagaaaagcaactg

SEQ ID NO: 10950 - DNA, 2619 bp, Zea Mays
ataagctccctgtgcaagcaaaagcccacagaacgagtgaggccaggcgacttcatactgctcgcctcgccgtctttcccccaatctgttgctcctccaagctgcgggcgatcgccgtaccccggccgccgcagggaaccccctcgccatggccttgcaggggaagaagctcatcaacaaccccgacgatgtggtgacggagttcatcgaagggttggtggagacttacccgggtctgcagtacctcgacgggttccctcagattaaggtcgttcttcgtgctgatgtcgagcgcggttcctatgacaaagttgcagtcatctcgggtggtggaagtggccatgaaccttcccatgctggatttgttgggccagggatgttgacagctgctgtttctggagatgttttcgcctctccacctgttgattctattttagctgctattcgagctgtaactggtcccatggggtgccttctaatagtaaagaactacactggtgatagactcaattttggattagctgctgagcaggcaaaatctgaaggctataagatggagatggtcattgttggagacgattgtgcccttcctccacctagagggatagctggtagaagaggtttagctggaacaattcttgtgcataaggttgctggggccgcagcagatgctggtttatctcttgcagaggttgccgcagaagcaaaacatgcatctgaggttgttggtacgatgggagttgcactttctgtttgcacattgcctgggcaaataacttctgatcgtctaggtccaaggcaaatggagcttggccttggaattcatggagaacctggagttgctgttgttgaactccagccagttgacgtagtggtagaacatgtccttaaacagatattgtcacaggaaactcagtatcttcctgtcacaagaggttgcaatgctgttctcctagtgaatggattaggagccactcctatcatggaacttatgattgcagcgagaaaagcagttcctgagttgcaattggtgtatggcattgctgttgacagagtctacactggcacacttatgacatcacttgatatggcaggattatctattaccattatgaagtccggcgaaagcattttgaagagacttgatgctcccactaaagctccagcttggcctgttggttctgaaggaaaccgtccaccagcaaagtttcctgttcctctaccaccatcaccttcaatgaaggatgacgagattcttgctccatctcaggagctgagcaagcaagggtgtatcctggaggctgttattgaagcaagtgctactgaaattatcaatctcatggatagcctaaatgaatgggacagtaaagtgggcgatggtgactgtggaagcacaaggtgcaacagctattcttgaagatatgaaaaagcgttaccctatgaatgatgcagcgggaacaataaatgaaattggggcaacaatccgaagggtgatgggtggaacaagtggaatcttgtatgccatactctgcaaggctgcgtatgcaagcttaaagcagagctcaactgtcactgcgaataaatgggctgatgctttagaggcctccattgctgctgttagcaaatatggtggtgccagcgcaggataccgcacaatgttggatgccctaattcctgcttctgctgttctgaaacagagacttgaggctggggatgatcccgtgactgctttcatcgcgtcttctgaagcagcatcagctggcgctgaatccaccaaacaaatgcaagcgaaggctggacggtcatcatacatcgctccagatctcctggcctcaatccctgatcctggtgcaatggctgcagctgcatggtacagagctgctgcccttgcagtgaagaacaaagtgcacggttcaaagagctagtagcatacgcaatgcttcattgctagacccaaaatagactgacaggaaaaatcactggggcattttctcactccccttagatttggtttccgcttgtgcttttgcatgggccgagaaaaaaaatgacttccatattgtctcacccttctcacatcatacaaagagatgttcaaagagttcgtcgtccgtacaagttaagggaagctatgcttttgcactgccgtgatatctcagcatgctgtcagtgttggaatgaccattgtttaatttgcccgagtttcgttttaatggctgagcccatgctgtcagtggtgggaatgatcgttgtttattctgcccgagtcccgtttcaattgtgcgcatttcggtaggatgtttaacaaaaaaacgttgtctttgaccgaggggtagtttgcactactgttgacttgtaatgttttttatcttgatcaatggcttgctgcatggtttctttctttctgggcaagattctcgaatggaacctaagacgtctatttatcgaggttttgcatatcatgaccaaattatcttgaggaaaacttgttactcgtacttgcctttgtatgcctgaacatctaattgtttttgtggttccgcaatttgcactttgatagcccgtaaataaaatattcaaatggagagatgcctatttaaaaaaaaagaaaagcaactg

SEQ ID NO: 10951 - DNA, 2665 bp, Zea Mays
ctcgcttctataaaaggataagctccctgtgcaagcaaaagcccacagaacgagtgaggccaggcgacttcatactgctcgcctcgccgtctttcccccaatctgttgctcctccaagctgcgggcgatcgccgtaccccggccgccgcagggaaccccctcgccatggccttgcaggggaagaagctcatcaacaaccccgacgatgtggtgacggagttcatcgaagggttggtggagacttacccgggtctgcagtacctcgacgggttccctcagattaaggtcgttcttcgtgctgatgtcgagcgcggttcctatgacaaagttgcagtcatctcgggtggtggaagtggccatgaaccttcccatgctggatttgttgggccagggatgttgacagctgctgtttctggagatgttttcgcctctccacctgttgattctattttagctgctattcgagctgtaactggtcccatggggtgccttctaatagtaaagaactacactggtgatagactcaattttggattagctgctgagcaggcaaaatctgaaggctataagatggagatggtcattgttggagacgattgtgcccttcctccacctagagggatagctggtagaagaggtttagctggaacaattcttgtgcataaggttgctggggccgcagcagatgctggtttatctcttgcagaggttgccgcagaagcaaaacatgcatctgaggttgttggtacgatgggagttgcactttctgtttgcacattgcctgggcaaataacttctgatcgtctaggtccaaggcaaatggagcttggccttggaattcatggagaacctggagttgctgttgttgaactccagccagttgacgtagtggtagaacatgtccttaaacagatattgtcacaggaaactcagtatcttcctgtcacaagaggttgcaatgctgttctcctagtgaatggattaggagccactcctatcatggaacttatgattgcagcgagaaaagcagttcctgagttgcaattggtgtatggcattgctgttgacagagtctacactggcacacttatgacatcacttgatatggcaggattatctattaccattatgaagtccggcgaaagcattttgaagagacttgatgctcccactaaagctccagcttggcctgttggttctgaaggaaaccgtccaccagcaaagtttcctgttcctctaccaccatcaccttcaatgaaggatgacgagattcttgctccatctcaggagctgagcaagcaagggtgtatcctggaggctgttattgaagcaagtgctactgaaattatcaatctcatggatagcctaaatgaatgggacagtaaagtgggcgatggtgactgtggaagcacaatgtatagaggtgcaacagctattcttgaagatatgaaaaagcgtgcattttttctctattccagttaccctatgaatgatgcagcgggaacaataaatgaaattggggcaacaatccgaagggtgatgggtggaacaagtggaatcttgtatgccatactctgcaaggctgcgtatgcaagcttaaagcagagctcaactgtcactgcgaataaatgggctgatgctttagaggcctccattgctgctgttagcaaatatggtggtgccagcgcaggataccgcacaatgttggatgccctaattcctgcttctgctgttctgaaacagagacttgaggctggggatgatcccgtgactgctttcatcgcgtcttctgaagcagcatcagctggcgctgaatccaccaaacaaatgcaagcgaaggctggacggtcatcatacatcgctccagatctcctggcctcaatccctgatcctggtgcaatggctgcagctgcatggtacagagctgctgcccttgcagtgaagaacaaagtgcacggttcaaagagctagtagcatacgcaatgcttcattgctagacccaaaatagactgacaggaaaaatcactggggcattttctcactccccttagatttggtttccgcttgtgcttttgcatgggccgagaaaaaaaatgacttccatattgtctcacccttctcacatcatacaaagagatgttcaaagagttcgtcgtccgtacaagttaagggaagctatgcttttgcactgccgtgatatctcagcatgctgtcagtgttggaatgaccattgtttaatttgcccgagtttcgttttaatggctgagcccatgctgtcagtggtgggaatgatcgttgtttattctgcccgagtcccgtttcaattgtgcgcatttcggtaggatgtttaacaaaaaaacgttgtctttgaccgaggggtagtttgcactactgttgacttgtaatgttttttatcttgatcaatggcttgctgcatggtttctttctttctgggcaagattctcgaatggaacctaagacgtctatttatcgaggttttgcatatcatgaccaaattatcttgaggaaaacttgttactcgtacttgcctttgtatgcctgaacatctaattgtttttgtggttccgcaatttgcactttgatagcccgtaaataaaatattcaaatggagagatgcctatttaaaaaaaaagaaaagcaactg

SEQ ID NO: 10952 - DNA, 2568 bp, Zea Mays
actgctaactcgcttctataaaaggataagctccctgtgcaagcaaaagcccacagaacgagtgaggccaggcgacttcatactgctcgcctcgccgtctttcccccaatctgttgctcctccaagctgcgggcgatcgccgtaccccggccgccgcagggaaccccctcgccatggccttgcaggggaagaagctcatcaacaaccccgacgatgtggtgacggagttcatcgaagggttggtggagacttacccgggtctgcagtacctcgacgggttccctcagattaaggtcgttcttcgtgctgatgtcgagcgcggttcctatgacaaagttgcagtcatctcgggtggtggaagtggccatgaaccttcccatgctggatttgttgggccagggatgttgacagctgctgtttctggagatgttttcgcctctccacctgttgattctattttagctgctattcgagctgtaactggtcccatggggtgccttctaatagtaaagaactacactggtgatagactcaattttggattagctgctgagcaggcaaaatctgaaggctataagatggagatggtcattgttggagacgattgtgcccttcctccacctagagggatagctggtagaagaggtttagctggaacaattcttgtgcataaggttgctggggccgcagcagatgctggtttatctcttgcagaggttgccgcagaagcaaaacatgcatctgaggttgttggtacgatgggagttgcactttctgtttgcacattgcctgggcaaataacttctgatcgtctaggtccaaggcaaatggagcttggccttggaattcatggagaacctggagttgctgttgttgaactccagccagttgacgtagtggtagaacatgtccttaaacagatattgtcacaggaaactcagtatcttcctgtcacaagaggttgcaatgctgttctcctagtgaatggattaggagccactcctatcatggaacttatgattgcagcgagaaaagcagttcctgagttgcaattggtgtatggcattgctgttgacagagtctacactggcacacttatgacatcacttgatatggcaggattatctattaccattatgaagtccggcgaaagcattttgaagagacttgatgctcccactaaagctccagcttggcctgttggttctgaaggaaaccgtccaccagcaaagtttcctgttcctctaccaccatcaccttcaatgaaggatgacgagattcttgctccatctcaggagctgagcaagcaagggtgtatcctggaggctgttattgaagcaagtgctactgaaattatcaatctcatggatagcctaaatgaatgggacagtaaagtgggcgatggtgactgtggaagcacaatgtatagaggtgcaacagctattcttgaagatatgaaaaagcggtatgccatactctgcaaggctgcgtatgcaagcttaaagcagagctcaactgtcactgcgaataaatgggctgatgctttagaggcctccattgctgctgttagcaaatatggtggtgccagcgcaggataccgcacaatgttggatgccctaattcctgcttctgctgttctgaaacagagacttgaggctggggatgatcccgtgactgctttcatcgcgtcttctgaagcagcatcagctggcgctgaatccaccaaacaaatgcaagcgaaggctggacggtcatcatacatcgctccagatctcctggcctcaatccctgatcctggtgcaatggctgcagctgcatggtacagagctgctgcccttgcagtgaagaacaaagtgcacggttcaaagagctagtagcatacgcaatgcttcattgctagacccaaaatagactgacaggaaaaatcactggggcattttctcactccccttagatttggtttccgcttgtgcttttgcatgggccgagaaaaaaaatgacttccatattgtctcacccttctcacatcatacaaagagatgttcaaagagttcgtcgtccgtacaagttaagggaagctatgcttttgcactgccgtgatatctcagcatgctgtcagtgttggaatgaccattgtttaatttgcccgagtttcgttttaatggctgagcccatgctgtcagtggtgggaatgatcgttgtttattctgcccgagtcccgtttcaattgtgcgcatttcggtaggatgtttaacaaaaaaacgttgtctttgaccgaggggtagtttgcactactgttgacttgtaatgttttttatcttgatcaatggcttgctgcatggtttctttctttctgggcaagattctcgaatggaacctaagacgtctatttatcgaggttttgcatatcatgaccaaattatcttgaggaaaacttgttactcgtacttgcctttgtatgcctgaacatctaattgtttttgtggttccgcaatttgcactttgatagcccgtaaataaaatattcaaatggagagatgcctatttaaaaaaaaagaaaagcaactg

SEQ ID NO: 10953 - DNA, 3848 bp, Zea Mays
tggaatgacatgggtgtttctttattacagtgtagtggagtatatatacaagagtttccaaggggtgtgtcccttggaaaataactatcacatagatggattagatcatatgtacaaaatattttgtaacagcaaacatgatccattaggtggacacgggcaactccacctgtcgctgacgatgatattatatatttccagagatgaggactccggcgcgtccctctcccagatcgcgctcgctcctggtacgtggttggcaaataagagcccgaacaaagcagcgcacgcctccgcctccctttcctccctcttctttttgttgagaagataataatccgccgacatctccggacgagcaggagcaggtttatcgtgctcgcaactcgcaaacgcacggtccgcctcgctcgccggccgcgcgcgtcactgccagactgcctcactgcgccgtgttttttgccccgggtcggccctagtaaaataaggagcactagacgtaagaaaacctgctaataaatttttatacgattttaaaacacttttacttattttagagctctactatagagtgggtccgagatgtggctgcacacaagggcacgggcaggcaccgcacagtcccgtgtgccggtggtccgcatatgcgtcgacgttcccgagagttctagatgccgctgaacccgtccgttcctttctcatgccttgccaatgccaccacagggccacaggccgccccgcgagaatctagaggggacgacgagagccacggccccgcgcgagtcgcgacgctacctagggcccggtggagataataaacgagataagcgacggcgaccggccgcggcccacccagaccagctgccatacggggcccgccacgcccgacccacgccgcgcgtctcttttagcggctccccagccgccactgtggcgccacgcggcctgacgctttgccgccgtccacacgtttgcctggaggaggctgtgtgggacccagtcgttccccgccacgtgggcccgtgcgcggccacgacccccgcccgccgcggcccggcaagagacgtttcggtagactctcccttgccgcctccgcctccacctcctacaggctacaggcctacagctgcgacctgcgagcgacggctataaaaccttcgcctccactcccagccgcgaagccctactcaacttctccttttcccccggcgattattccggccactgaccttcgttgcgtgccgctcgagaacccggttcgagaatcgacggcgcgcggctgcatgagagggtgatataaaatcgataaaaaggacgagcagcacgactctcatttttttgggggagggttgcggtggaagaggattgcgctggagagaacccaattttagggcggtgccggcgcgaccgttccgggatcgggagctttatctggggggcgcgagggatcacggccgcggcgacgaccgaccgaccggccggccaacccaaccccaccaccaccagtccccgcggcccgcgtcgaggaagaagaagggataggagacggagacggagacggagccggtggtcgcaaggatggccgggggcatgcaggcggcggacgcggcgggccggctgagcgcgctgctctcgctgctcgcgctgcgccggctcctcgccgtgctccagccgctggccctgctcctgctcctgcccttccggtggcgcgcgcggccggccggggccgtggccgcggccgtggcgtccgatgccgccacggcctccgcgccgggggccagcgggaggaaggggaaggcgtcgtcgtcgtcgtcggtggttctgcgggtgccggccgggtcccccatggtcgccgcgcggaggcaggcgtccgcgcgcagggagatcgccgtgcgccgggcgcgggaggccgggcgggagtacgagctcgtccccaccgctcgcggcgagacgctcttcacgcagtgctggtggccgcacccgccctccaccgttaaaccgagggcgctagttgttgtcatgcacgggctaaacgagcacagtgggaggtatgaccatttagcgaggcgattgaatggcatcggcatcaaggtgtacgggatggactggactggtcatggtggaagtgatggtctccatggatatgtgcaatctcttgatcatgctgtcagtgatttgaaaatgtacctcaagaaagtgttagctgagaaccctggtcttccatgcttctgcttcggtcactcgactggtggaggtatcattctgaaggctgcacttgatccagaggtagaaactctccttagaggtattgtcttgacatcaccagctgtccgtgttcagcctacacacccaatcatagcggtatgccttgttcttccttaatctatatttaatctagtacagtacttgtatccttgaaaaaacgaagtaggtggcatgtggagtaatatttgtcatgttgtttatttaaacaatcctcgctcgtccaaattgaaactacatgtctccaaataggtttactatgaaaatgtatttcacaatcaatctaataattagttatttgatattagaatgttagtacttccccaaataaagtggtcaaagttaaaattgtttgactccaaataactagtagaatttctataccttgaagaaatgaagcagaaacacggttccttgtggtttcctaaacattgtgtcctaggttcagtaaaatttgggctataacatattgatccacatttttatgatttgatttgcctgagataaaatagtacttacgcttgctaccaattttgtggttattatagttatagagtgtgaagtccgcaggcaacatatgtcctcctcacccatctcaagaaaaaaaacatttctgcttccaactacaggtcatggcaccgatttttgccctcatcgcgccgaggtatcagttcacggcgtcccacaggaacggcccgccggtgtcgcgcgaccccgaggccctgcgggccaaatacacggacccgctcgtgttcacgggcgccatccgcgtgaggacgggctacgagatcctccgcctgacgtcgtacctgcagcagcacctgcaccggatcgcggtgccgctgctggtgctgcacggcgccgacgacctggtgaccgaccccaggggctcgcgggcgctgtacgagcgggcctcgtccgcggacaagtccctcaagctttacgacgggctgctgcacgacctcctgatcgagcccgagaaggacagggtgatggacgacatcgtcgcgtggctgagccccagggtctgacgccgccggcgcgttgcggtgctggccgtaggacgcgagcggcttttcgatcatctgcaggccaaggacgcctcgcctccggatggtgggtgatgacgcggtctggtctggtaggctgcggaccgagggagagcgggtgtgccttctcgcccccttggtgtgctgaactgctgagtgctgatacgatacgaggagcaggacaggagtacggagaactactactacctacggctatgggcgatggctttactcgcgcctcccggtgtgtcccgagattttttttcggggacacgtacgaattatgtaacggagttcgtttcgccgtgccacacgcacgagcggtgtccgatacacctatagaaaatgactttccatattgcgagttgtgtgatgtattcacacaattgtgaatcagagttgcaacttgcaacggattcttatcttctgctcttctcacagtacctcctagcaccgtaggcattggtttatagtgactaattttttagtccctctattttagttcctaatggcaaatacggaaactataagtttgac

SEQ ID NO: 10954 - DNA, 2908 bp, Zea Mays
ctttctttccccgacgtttcatctttctatagttgttttgctttccattcatcttcttttttccccgaagtgtgaggtggaagacgtacaatcggcagtagttggttgtctgtcagtcaaggtattgcagaagatacctccgatctggtatctggttttgcaacacttgctgacgattcacttgaatatccaattggtgaatactgggattctgatgagtatgacgacgacgacgatgttggctacacccggcaaccaattgaggatgaaacctggtttttagcacatgagattgattatcctagcgacaatgagaaggcgactggccacacaagagggaacgatcgtcatgatcgccctacaaaggatgaagatgatgaccagtcatttgttgaggaagattcctacatatctggtgagcaatattttcatggaaagaatattgcacaaataggtacttctgagggcccaatggtccatgggattcctgataatgatatgatagctcagtatgatggccaacttttagattctgaagagcttaatttgatgcattctgaaccagcctggcagggctttgtatcacagaacagtgagctaggtatgctaggcaatgggaaattccttaatgattccgaacgacctcatcctgatgacctttttgtggaggatgatcagcatggctctgttaggtcaattggtgttgggataagcagtgatgctgctgacattggcagtgaggtgcgagaaagtctgattggaggtagcagtgaaggggatattgaatacttcaatgagagcagcttgagcgttagtggaaaaagacatcctcatcaggatactgaaaagaagagagtaggtgctaaaggagtaaaacatgaccaaatcatttacgctgctgatatccagaagggcaatctaccaccaggagcggctgatgtaggattttcttttcctccacctttgcattctgggaaaaatcatgagtctgatgctaaatctttgtggtcaaagaaggatgaaatgtattgcattaatgatcctgatgactgtcaaaatggcatggtatcagatgatatgcttgccacatggaggaaaaagaacagtgagtcttctctaaggagctctagagatgaaatgacgtctgatgttgttagatcaagaaattcaagtgcatcctatgacgaaacagaggacacatcgaatgctcggcaccacaaactagatgacgcacaagaagaagacactggaaccaacttggatgatgaggaagcagcagcgttgcaagagcaagtcaggcagataaaggcgcaggaggaagagtttgaaacgttcaatcttaagattgtgcatagaaaaaacagaactggctttgaagaagacaaaaacttccatgttgttctcaattctgtcattgctgggcgttatcatgtatcagagtatttgggttcagctgcattcagcaaagccatccaagcacatgatttacatacaggaatggatgtatgcgttaaaattataaaaaataacaaagattttttcgatcaaagtcttgatgagatcaagcttctgaagtatgttaacaagcatgatccagctgacaaataccaccttttgcgtctgtatgattacttctactatcgggaacatttgctgatagtctgtgaacttctgaaggcaaatctgtatgagtttcagaaattcaacagagaatcagggggtgaggtttacttcacaatgccaagactccagtcaatagctattcagtgtctggaggcgctgcagtttctgcatggtctcggtctaatccactgtgatttaaagccagaaaacatattggtaaagagctacagcagatgtgaaataaaagtaattgatcttgggagcagctgctttgagacagatcatctatgttcatatgtgcaatcacgatcttaccgtgcacctgaggttatactgggcttgccttatgacaaaaagatagatgtatggtcacttggttgtatattagcagagctttgcaccggaaatgtccttttccaaaatgattctcctgcaacattacttgctcgcgtgatgggcatcattggctccatagaacaagctatgcttgcacagggacgcgacacctacaaatatttcacaaagaaccacatgttgtacgaaagaaatcaggaaagtaacaggcttgagtacttgattccgaaaaagacatccttgcggcaccgattgcccatggctgatcaagggtttatcgagtttgttgcgtaccttctggaggtgaacccaaagaagcgcccaagcgcctcagaagcattgaaacatccatggctttcttttccttacgagccaatatcttcatgaggctaactgctattggatcctgtgtggctttagcatttgtctcaacacctaagcaccatgaaattttgatagatcaagacggaagattttctaccacgactgagccatggcatcagccgaaatcccaaacgcaaatgcagattcggttcgatcatgtcttggtgccacaatcagctggtcttaggcgccatgtaaaatcaatgcatgccatgtgttgtgcttgtaatataacttgttttttttacccttcatttccagccccgatgtaacaggccattttggttttctaggtacttggtgactcatttctagcaatagggctgtcatgttgtacatggtgtgatcattgttgagcggccccgtgccatgctgtgcacctgttacgcttctaacccaagtcatgaatgccgttcgtcgtgcttgtctttgaaggagcttaatggtcttgcatgccttttaggactgccaacgagtcgtatagagactgtatatgatgatgtataatcatgtatctagggaattctcaaaaaaaactagaaaaggt

SEQ ID NO: 10955 - DNA, 4483 bp, Zea Mays
caccaccaccaccaccaccaccccgaacccgaatatgctgcccccagccgcgccggccgcgccctgatcccctcacccgatgcgccatccccgccgcctccccctcctccgctgccacgccgccgccggatccgttcccgcccggccaccctgcgctctcggcggcgacgggtcccgctgaccgccctgggcccggcccgctgcccccatcgtgcttgccccacccacctccgcctcgcgccggcgcggggtgcggcgacggccgctagggtttccggggctgtcgcctcgcggtcccctccccccgcggattcgcgcccttcccctacgggcgcgcgtcgcgcttagggtgtgcgtgggtttggacttctcctcagcttggcttgcggtcgcgcggtcccgaggagctccacggaagcttgatttgtcaggtgggggggtttcgaggcagagacgccgatctgcggctgccggcgccgcggcattgcgccgcttcctaagtccccgagtgtccggagcctccgattcggctggtctgggagctgggctgcgacgggtgctgccttcagctcctcttcggcatcactgtaagcgtttcagggttctcgcttctggctggggctacctgatattggagggaaacatgtcggagaacattgatctggtgctcgagttcctgcggaagaaccggttcgccaaggcagaggcagctctccgtggggagctcaccggacgcgctgattcgaacgacatggccacgcagaggcgcgttgctgagctgaaagaaggcgaggagcagcaggagggcttggtgggttccaatgtagggcccaagggtgctgcggcagcgaggagtgcggactcgtcgagggagttcatcgtgaaggagattgatgttggagccctgccgaatggttcggatgggaagaaggggtccgggattggccagcctcaggataacgtgggggatctgtatccttggaccttcagcattgcaaacagcactgcagaacagctagctgagctgctggtgtcggaggaggtgccaagacataggcgtggtgcggtgctggcagagaagagggatcgaggtgttgggaccgagcaacctggcccggtgctggagcaaaaagtctcttttggaagagggaaaggaaaagttgatgctgctgggaggactgagaacagtgaacagtgccattttagggataaaagtctagtaccagaaaaagaggagatgctgaatggttgcacagttaagacggtgcttccattccccacggaaaacccgtcatctagctacaatagcacacaccatgaaaatgagaggaaagaagtaaagaggagcagtaatgcagatggtgttggaaaaggagcaaaaggacatcttgatgaggggaacaggcaatactactttgaaaaatccctagatacagatctggtgtctgaccgatgcttcgatttacagcttgttggagatagtcagcgtgaggagcttccgaagttacctccagtgaggctcaagtccgaagataagctagtcaacatgaactgggaggaaaagatcaatcaccatggatctggggccaagcaatctagtgctgatcatgcttttatgattgggtcttatctcgatgttcccattgggcaagagataacatcttcaggtggaagacgtacaatcggcagtagttggttgtctgtcagtcaaggtattgcagaagatacctccgatctggtatctggttttgcaacacttgctgacgattcacttgaatatccaattggtgaatactgggattctgatgagtatgacgacgacgacgatgttggctacacccggcaaccaattgaggatgaaacctggtttttagcacatgagattgattatcctagcgacaatgagaaggcgactggccacacaagagggaacgatcgtcatgatcgccctacaaaggatgaagatgatgaccagtcatttgttgaggaagattcctacatatctggtgagcaatattttcatggaaagaatattgcacaaataggtacttctgagggcccaatggtccatgggattcctgataatgatatgatagctcagtatgatggccaacttttagattctgaagagcttaatttgatgcattctgaaccagcctggcagggctttgtatcacagaacagtgagctaggtatgctaggcaatgggaaattccttaatgattccgaacgacctcatcctgatgacctttttgtggaggatgatcagcatggctctgttaggtcaattggtgttgggataagcagtgatgctgctgacattggcagtgaggtgcgagaaagtctgattggaggtagcagtgaaggggatattgaatacttcaatgagagcagcttgagcgttagtggaaaaagacatcctcatcaggatactgaaaagaagagagtaggtgctaaaggagtaaaacatgaccaaatcatttacgctgctgatatccagaagggcaatctaccaccaggagcggctgatgtaggattttcttttcctccacctttgcattctgggaaaaatcatgagtctgatgctaaatctttgtggtcaaagaaggatgaaatgtattgcattaatgatcctgatgactgtcaaaatggcatggtatcagatgatatgcttgccacatggaggaaaaagaacagtgagtcttctctaaggagctctagagatgaaatgacgtctgatgttgttagatcaagaaattcaagtgcatcctatgacgaaacagaggacacatcgaatgctcggcaccacaaactagatgacgcacaagaagaagacactggaaccaacttggatgatgaggaagcagcagcgttgcaagagcaagtcaggcagataaaggcgcaggaggaagagtttgaaacgttcaatcttaagattgtgcatagaaaaaacagaactggctttgaagaagacaaaaacttccatgttgttctcaattctgtcattgctgggcgttatcatgtatcagagtatttgggttcagctgcattcagcaaagccatccaagcacatgatttacatacaggaatggatgtatgcgttaaaattataaaaaataacaaagattttttcgatcaaagtcttgatgagatcaagcttctgaagtatgttaacaagcatgatccagctgacaaataccaccttttgcgtctgtatgattacttctactatcggtctgtgaacttctgaaggcaaatctgtatgagtttcagaaattcaacagagaatcagggggtgaggtttacttcacaatgccaagactccagtcaatagctattcagtgtctggaggcgctgcagtttctgcatggtctcggtctaatccactgtgatttaaagccagaaaacatattggtaaagagctacagcagatgtgaaataaaagtaattgatcttgggagcagctgctttgagacagatcatctatgttcatatgtgcaatcacgatcttaccgtgcacctgaggttatactgggcttgccttatgacaaaaagatagatgtatggtcacttggttgtatattagcagagctttgcaccggaaatgtccttttccaaaatgattctcctgcaacattacttgctcgcgtgatgggcatcattggctccatagaacaagctatgcttgcacagggacgcgacacctacaaatatttcacaaagaaccacatgttgtacgaaagaaatcaggaaagtaacaggcttgagtacttgattccgaaaaagacatccttgcggcaccgattgcccatggctgatcaagggtttatcgagtttgttgcgtaccttctggaggtgaacccaaagaagcgcccaagcgcctcagaagcattgaaacatccatggctttcttttccttacgagccaatatcttcatgaggctaactgctattggatcctgtgtggctttagcatttgtctcaacacctaagcaccatgaaattttgatagatcaagacggaagattttctaccacgactgagccatggcatcagccgaaatcccaaacgcaaatgcagattcggttcgatcatgtcttggtgccacaatcagctggtcttaggcgccatgtaaaatcaatgcatgccatgtgttgtgcttgtaatataacttgttttttttacccttcatttccagccccgatgtaacaggccattttggttttctaggtacttggtgactcatttctagcaatagggctgtcatgttgtacatggtgtgatcattgttgagcggccccgtgccatgctgtgcacctgttacgcttctaacccaagtcatgaatgccgttcgtcgtgcttgtctttgaaggagcttaatggtcttgcatgccttttaggactgccaacgagtcgtatagagactgtatatgatgatgtataatcatgtatctagggaattctcaaaaaaaactagaaaaggt

SEQ ID NO: 10956 - DNA, 4544 bp, Zea Mays
ccggtctcacgcacgcacaccaccaccaccaccaccaccccgaacccgaatatgctgcccccagccgcgccggccgcgccctgatcccctcacccgatgcgccatccccgccgcctccccctcctccgctgccacgccgccgccggatccgttcccgcccggccaccctgcgctctcggcggcgacgggtcccgctgaccgccctgggcccggcccgctgcccccatcgtgcttgccccacccacctccgcctcgcgccggcgcggggtgcggcgacggccgctagggtttccggggctgtcgcctcgcggtcccctccccccgcggattcgcgcccttcccctacgggcgcgcgtcgcgcttagggtgtgcgtgggtttggacttctcctcagcttggcttgcggtcgcgcggtcccgaggagctccacggaagcttgatttgtcaggtgggggggtttcgaggcagagacgccgatctgcggctgccggcgccgcggcattgcgccgcttcctaagtccccgagtgtccggagcctccgattcggctggtctgggagctgggctgcgacgggtgctgccttcagctcctcttcggcatcactgtaagcgtttcagggttctcgcttctggctggggctacctgatattggagggaaacatgtcggagaacattgatctggtgctcgagttcctgcggaagaaccggttcgccaaggcagaggcagctctccgtggggagctcaccggacgcgctgattcgaacgacatggccacgcagaggcgcgttgctgagctgaaagaaggcgaggagcagcaggagggcttggtgggttccaatgtagggcccaagggtgctgcggcagcgaggagtgcggactcgtcgagggagttcatcgtgaaggagattgatgttggagccctgccgaatggttcggatgggaagaaggggtccgggattggccagcctcaggataacgtgggggatctgtatccttggaccttcagcattgcaaacagcactgcagaacagctagctgagctgctggtgtcggaggaggtgccaagacataggcgtggtgcggtgctggcagagaagagggatcgaggtgttgggaccgagcaacctggcccggtgctggagcaaaaagtctcttttggaagagggaaaggaaaagttgatgctgctgggaggactgagaacagtgaacagtgccattttagggataaaagtctagtaccagaaaaagaggagatgctgaatggttgcacagttaagacggtgcttccattccccacggaaaacccgtcatctagctacaatagcacacaccatgaaaatgagaggaaagaagtaaagaggagcagtaatgcagatggtgttggaaaaggagcaaaaggacatcttgatgaggggaacaggcaatactactttgaaaaatccctagatacagatctggtgtctgaccgatgcttcgatttacagcttgttggagatagtcagcgtgaggagcttccgaagttacctccagtgaggctcaagtccgaagataagctagtcaacatgaactgggaggaaaagatcaatcaccatggatctggggccaagcaatctagtgctgatcatgcttttatgattgggtcttatctcgatgttcccattgggcaagagataacatcttcagaataatgacattgcactcacatattcaggtggaagacgtacaatcggcagtagttggttgtctgtcagtcaaggtattgcagaagatacctccgatctggtatctggttttgcaacacttgctgacgattcacttgaatatccaattggtgaatactgggattctgatgagtatgacgacgacgacgatgttggctacacccggcaaccaattgaggatgaaacctggtttttagcacatgagattgattatcctagcgacaatgagaaggcgactggccacacaagagggaacgatcgtcatgatcgccctacaaaggatgaagatgatgaccagtcatttgttgaggaagattcctacatatctggtgagcaatattttcatggaaagaatattgcacaaataggtacttctgagggcccaatggtccatgggattcctgataatgatatgatagctcagtatgatggccaacttttagattctgaagagcttaatttgatgcattctgaaccagcctggcagggctttgtatcacagaacagtgagctaggtatgctaggcaatgggaaattccttaatgattccgaacgacctcatcctgatgacctttttgtggaggatgatcagcatggctctgttaggtcaattggtgttgggataagcagtgatgctgctgacattggcagtgaggtgcgagaaagtctgattggaggtagcagtgaaggggatattgaatacttcaatgagagcagcttgagcgttagtggaaaaagacatcctcatcaggatactgaaaagaagagagtaggtgctaaaggagtaaaacatgaccaaatcatttacgctgctgatatccagaagggcaatctaccaccaggagcggctgatgtaggattttcttttcctccacctttgcattctgggaaaaatcatgagtctgatgctaaatctttgtggtcaaagaaggatgaaatgtattgcattaatgatcctgatgactgtcaaaatggcatggtatcagatgatatgcttgccacatggaggaaaaagaacagtgagtcttctctaaggagctctagagatgaaatgacgtctgatgttgttagatcaagaaattcaagtgcatcctatgacgaaacagaggacacatcgaatgctcggcaccacaaactagatgacgcacaagaagaagacactggaaccaacttggatgatgaggaagcagcagcgttgcaagagcaagtcaggcagataaaggcgcaggaggaagagtttgaaacgttcaatcttaagattgtgcatagaaaaaacagaactggctttgaagaagacaaaaacttccatgttgttctcaattctgtcattgctgggcgttatcatgtatcagagtatttgggttcagctgcattcagcaaagccatccaagcacatgatttacatacaggaatggatgtatgcgttaaaattataaaaaataacaaagattttttcgatcaaagtcttgatgagatcaagcttctgaagtatgttaacaagcatgatccagctgacaaataccaccttttgcgtctgtatgattacttctactatcgggaacatttgctgatagtctgtgaacttctgaaggcaaatctgtatgagtttcagaaattcaacagagaatcagggggtgaggtttacttcacaatgccaagactccagtcaatagctattcagtgtctggaggcgctgcagtttctgcatggtctcggtctaatccactgtgatttaaagccagaaaacatattggtaaagagctacagcagatgtgaaataaaagtaattgatcttgggagcagctgctttgagacagatcatctatgttcatatgtgcaatcacgatcttaccgtgcacctgaggttatactgggcttgccttatgacaaaaagatagatgtatggtcacttggttgtatattagcagagctttgcaccggaaatgtccttttccaaaatgattctcctgcaacattacttgctcgcgtgatgggcatcattggctccatagaacaagctatgcttgcacagggacgcgacacctacaaatatttcacaaagaaccacatgttgtacgaaagaaatcaggaaagtaacaggcttgagtacttgattccgaaaaagacatccttgcggcaccgattgcccatggctgatcaagggtttatcgagtttgttgcgtaccttctggaggtgaacccaaagaagcgcccaagcgcctcagaagcattgaaacatccatggctttcttttccttacgagccaatatcttcatgaggctaactgctattggatcctgtgtggctttagcatttgtctcaacacctaagcaccatgaaattttgatagatcaagacggaagattttctaccacgactgagccatggcatcagccgaaatcccaaacgcaaatgcagattcggttcgatcatgtcttggtgccacaatcagctggtcttaggcgccatgtaaaatcaatgcatgccatgtgttgtgcttgtaatataacttgttttttttacccttcatttccagccccgatgtaacaggccattttggttttctaggtacttggtgactcatttctagcaatagggctgtcatgttgtacatggtgtgatcattgttgagcggccccgtgccatgctgtgcacctgttacgcttctaacccaagtcatgaatgccgttcgtcgtgcttgtctttgaaggagcttaatggtcttgcatgccttttaggactgccaacgagtcgtatagagactgtatatgatgatgtataatcatgtatctagggaattctcaaaaaaaactagaaaaggt

SEQ ID NO: 10957 - DNA, 4620 bp, Zea Mays
gagacaccaacaaacgagctggactggaacgggaagaaaggagagagaaaaaaacatttcccatttcccttccttttcctctctcgctgggtcatggtcatggggctctttccggtctcacgcacgcacaccaccaccaccaccaccaccccgaacccgaatatgctgcccccagccgcgccggccgcgccctgatcccctcacccgatgcgccatccccgccgcctccccctcctccgctgccacgccgccgccggatccgttcccgcccggccaccctgcgctctcggcggcgacgggtcccgctgaccgccctgggcccggcccgctgcccccatcgtgcttgccccacccacctccgcctcgcgccggcgcggggtgcggcgacggccgctagggtttccggggctgtcgcctcgcggtcccctccccccgcggattcgcgcccttcccctacgggcgcgcgtcgcgcttagggtgtgcgtgggtttggacttctcctcagcttggcttgcggtcgcgcggtcccgaggagctccacggaagcttgatttgtcaggtgggggggtttcgaggcagagacgccgatctgcggctgccggcgccgcggcattgcgccgcttcctaagtccccgagtgtccggagcctccgattcggctggtctgggagctgggctgcgacgggtgctgccttcagctcctcttcggcatcactgtaagcgtttcagggttctcgcttctggctggggctacctgatattggagggaaacatgtcggagaacattgatctggtgctcgagttcctgcggaagaaccggttcgccaaggcagaggcagctctccgtggggagctcaccggacgcgctgattcgaacgacatggccacgcagaggcgcgttgctgagctgaaagaaggcgaggagcagcaggagggcttggtgggttccaatgtagggcccaagggtgctgcggcagcgaggagtgcggactcgtcgagggagttcatcgtgaaggagattgatgttggagccctgccgaatggttcggatgggaagaaggggtccgggattggccagcctcaggataacgtgggggatctgtatccttggaccttcagcattgcaaacagcactgcagaacagctagctgagctgctggtgtcggaggaggtgccaagacataggcgtggtgcggtgctggcagagaagagggatcgaggtgttgggaccgagcaacctggcccggtgctggagcaaaaagtctcttttggaagagggaaaggaaaagttgatgctgctgggaggactgagaacagtgaacagtgccattttagggataaaagtctagtaccagaaaaagaggagatgctgaatggttgcacagttaagacggtgcttccattccccacggaaaacccgtcatctagctacaatagcacacaccatgaaaatgagaggaaagaagtaaagaggagcagtaatgcagatggtgttggaaaaggagcaaaaggacatcttgatgaggggaacaggcaatactactttgaaaaatccctagatacagatctggtgtctgaccgatgcttcgatttacagcttgttggagatagtcagcgtgaggagcttccgaagttacctccagtgaggctcaagtccgaagataagctagtcaacatgaactgggaggaaaagatcaatcaccatggatctggggccaagcaatctagtgctgatcatgcttttatgattgggtcttatctcgatgttcccattgggcaagagataacatcttcaggtggaagacgtacaatcggcagtagttggttgtctgtcagtcaaggtattgcagaagatacctccgatctggtatctggttttgcaacacttgctgacgattcacttgaatatccaattggtgaatactgggattctgatgagtatgacgacgacgacgatgttggctacacccggcaaccaattgaggatgaaacctggtttttagcacatgagattgattatcctagcgacaatgagaaggcgactggccacacaagagggaacgatcgtcatgatcgccctacaaaggatgaagatgatgaccagtcatttgttgaggaagattcctacatatctggtgagcaatattttcatggaaagaatattgcacaaataggtacttctgagggcccaatggtccatgggattcctgataatgatatgatagctcagtatgatggccaacttttagattctgaagagcttaatttgatgcattctgaaccagcctggcagggctttgtatcacagaacagtgagctaggtatgctaggcaatgggaaattccttaatgattccgaacgacctcatcctgatgacctttttgtggaggatgatcagcatggctctgttaggtcaattggtgttgggataagcagtgatgctgctgacattggcagtgaggtgcgagaaagtctgattggaggtagcagtgaaggggatattgaatacttcaatgagagcagcttgagcgttagtggaaaaagacatcctcatcaggatactgaaaagaagagagtaggtgctaaaggagtaaaacatgaccaaatcatttacgctgctgatatccagaagggcaatctaccaccaggagcggctgatgtaggattttcttttcctccacctttgcattctgggaaaaatcatgagtctgatgctaaatctttgtggtcaaagaaggatgaaatgtattgcattaatgatcctgatgactgtcaaaatggcatggtatcagatgatatgcttgccacatggaggaaaaagaacagtgagtcttctctaaggagctctagagatgaaatgacgtctgatgttgttagatcaagaaattcaagtgcatcctatgacgaaacagaggacacatcgaatgctcggcaccacaaactagatgacgcacaagaagaagacactggaaccaacttggatgatgaggaagcagcagcgttgcaagagcaagtcaggcagataaaggcgcaggaggaagagtttgaaacgttcaatcttaagattgtgcatagaaaaaacagaactggctttgaagaagacaaaaacttccatgttgttctcaattctgtcattgctgggcgttatcatgtatcagagtatttgggttcagctgcattcagcaaagccatccaagcacatgatttacatacaggaatggatgtatgcgttaaaattataaaaaataacaaagattttttcgatcaaagtcttgatgagatcaagcttctgaagtatgttaacaagcatgatccagctgacaaataccaccttttgcgtctgtatgattacttctactatcgggaacatttgctgatagtctgtgaacttctgaaggcaaatctgtatgagtttcagaaattcaacagagaatcagggggtgaggtttacttcacaatgccaagactccagctattcagtgtctggaggcgctgcagtttctgcatggtctcggtctaatccactgtgatttaaagccagaaaacatattggtaaagagctacagcagatgtgaaataaaagtaattgatcttgggagcagctgctttgagacagatcatctatgttcatatgtgcaatcacgatcttaccgtgcacctgaggttatactgggcttgccttatgacaaaaagatagatgtatggtcacttggttgtatattagcagagctttgcaccggaaatgtccttttccaaaatgattctcctgcaacattacttgctcgcgtgatgggcatcattggctccatagaacaagctatgcttgcacagggacgcgacacctacaaatatttcacaaagaaccacatgttgtacgaaagaaatcaggaaagtaacaggcttgagtacttgattccgaaaaagacatccttgcggcaccgattgcccatggctgatcaagggtttatcgagtttgttgcgtaccttctggaggtgaacccaaagaagcgcccaagcgcctcagaagcattgaaacatccatggctttcttttccttacgagccaatatcttcatgaggctaactgctattggatcctgtgtggctttagcatttgtctcaacacctaagcaccatgaaattttgatagatcaagacggaagattttctaccacgactgagccatggcatcagccgaaatcccaaacgcaaatgcagattcggttcgatcatgtcttggtgccacaatcagctggtcttaggcgccatgtaaaatcaatgcatgccatgtgttgtgcttgtaatataacttgttttttttacccttcatttccagccccgatgtaacaggccattttggttttctaggtacttggtgactcatttctagcaatagggctgtcatgttgtacatggtgtgatcattgttgagcggccccgtgccatgctgtgcacctgttacgcttctaacccaagtcatgaatgccgttcgtcgtgcttgtctttgaaggagcttaatggtcttgcatgccttttaggactgccaacgagtcgtatagagactgtatatgatgatgtataatcatgtatctagggaattctcaaaaaaaactagaaaaggt

SEQ ID NO: 10958 - DNA, 3879 bp, Zea Mays
cacctagccgtcgactcggcgctgctcactcgcgctccacgcccacgcccacgcccaccgccccccgctatttatgcgtacttgcttgccgggagagtcgccggagagctgggcgtcctcctcccgttccagagcctcactgcttcgctccacccacccgtatggaaagacgaaaaggaaaacaaatcatttcacggtgctaggatttggtattttctatatttcctcaagttaagcaagagtggtatctggtggttttgtttttcaaaagaagacagaaatgtcttccttgaggcctgcccagtcttctagttcatccagcaggactcggcagagctcccaggcacggatactagcacaaacaacccttgatgctgaactcaatgcagagtatgaagaatctggtgattcctttgattactccaagttggttgaagcacaacggagcactccacctgagcagcaagggcgatcgggaaaggtcatagcctacttgcagcatattcaaagaggaaagctaatccaaccattcggttgcttgttggcccttgacgagaagagcttcagggtcattgcattcagtgagaatgcacctgaaatgcttacaacggtcagccatgctgtgccgaacgttgatgatcccccaaagctaggaattggtaccaatgtgcgctcccttttcactgaccctggtgctacagcactgcagaaggcactaggatttgctgatgtttctttgctgaatcctatcctagttcaatgcaagacctcaggcaagccattctatgccattgttcatagggcaactggttgtctggtggtagattttgagcctgtgaagcctacagaatttcctgccactgctgctggggctttgcagtcttacaagcttgctgccaaggcaatctctaagattcaatcgctaccaggtggaagcatgcaggccttatgcaataccgtggttaaggaagtcttcgaccttacaggttatgacagggttatggcttacaagttccatgaagatgagcatggggaggtctttgctgagatcaccaaacctggtattgagccctatctaggcctgcactatccggccactgatatccctcaagctgccaggtttctcttcatgaagaacaaagtcaggatgatctgtgattgccgtgcaagatcggtgaagattattgaagatgaggcgctctccattgatattagcttgtgtggttcaactcttagagcaccacatagctgtcaccttcagtatatggaaaacatgaactcgatcgcatcccttgtcatggctgttgtggttaatgaaaatgaagacgatgacgaacccgagtctgaacaaccaccacaacagcagaagaggaagaaactgtggggtctcattgtttgccaccacgagagccccagatatgtgccgtttccactgcggtatgcctgtgaattcttggcccaggtgtttgctgtccatgtaaataaggagtttgaattggagaagcagatacgagagaaaagcattctgcgaatgcagacaatgctctctgacatgctattcaaggaatcatctcccttgagtatcgtatccgggagtccaaatatcatggacctcgttaagtgtgatggtgctgctcttttgtatggggacaaagtatggcggcttcaaacggctccaactgagtctcagatacgtgatattgccttctggctttcagaagttcatggggattccactggcttgagcactgatagcctccaggatgctggatatccaggagccgcttcccttggtgacatgatctgtggaatggcagtggctaagatcacgtccaaggacattcttttctggttcaggtcacatacagctgctgaaatcaagtggggaggtgcaaagcatgatccatctgatgaggatgacagcagaaggatgcaccctaggctgtcctttaaggctttcctcgaggttgtcaagatgaagagtttgccatggagtgactacgagatggatgctattcactcgttgcaacttattcttagaggtacactgaacgatgccttgaagccggcccagtcatctggtttagataaccagattggtgatctcaaacttgatgggctcgccgaactgcaagcggtgacaagtgaaatggttcgcctgatggaaacggcaactgttccgatcttggcggtagatggcaacggattggtcaacggatggaaccaaaaggtggcggacttgtcggggttgcgagttgatgaagctataggaagacacatacttacacttgtggaggattcttctgtaccaattgttcagaggatgctatacttagctctgcagggcagagaagagaaggaggttcgatttgagttgaaaacccatggctccaagagggacgatggccctgttatcttggttgtaaatgcttgtgccagccgtgacatgcatgaccatgttgttggggtgtgctttgtagcccaggatatgactgttcataagttggtcatggacaaatttacccgggttgagggggactacagggccatcattcacaacccgaacccgctcattcctccgatatttggcgccgaccagttcggatggtgctctgagtggaacgcagccatgaccaagcttactgggtggcacagagatgaggtgatcgacaggatgctccttggcgaggttttcgacagcagcaatgcttcctgccttctgaagagcaaagacgctttcgtacgtctttgcattatcatcaacagcgcattagctggtgaagaggcagagaaggctccaatcggtttctttgaccgcgatggcaaatatattgagtgccttctgtcagtgaacagaaaagtgaatgcagatggcgtcgtcaccggagtgttctgtttcattcatgttcctagtgatgacctccagcatgcgctacatgtgcagcaagcctctgagcagacagcactgagaaggctgaaggctttctcgtacatgcgacatgccatcgacaaacctctctcaggtatgctctattctagggaaacactcaagggcacagacctggatgaagagcagatgaggcaggttcgtgtcgcggataattgccatcgccagctaaacaagatactcgccgacttagatcaagataacattactgacaagtcgagttgcttggatttggacatggctgagtttgtgctgcaagacgtggtggtgtctgctgtaagtcaagtactgataggttgccagggtaaaggcatcagagttgcttgcaacctgccggagagatccatgaagcaaaaggtttacggggatggtatacggctccagcagatcctctccgacttcttattcgtttcggtgaaattctctcctgctggtggctctgttgatatctcttccaaactgaccaagaacagcattggcgaaaaccttcatctcatagacttcgaacttaggatcaagcaccaaggagcaggagtcccagcagaaatactgtcacagatgtatggggaggacaatagagaacagtcggaggagggcttgagcctccttgtttctagaaaccttctgaggctcatgaatggcgacattcgtcacctcagggaagctggcatgtcaaccttcatcctcactgctgaactcgctgctgctccttcagcagctggacattgaagccgtcactgcaaacaagtgccaaatgctgcccagctccctcagagttcattcggaaagcaacggtggttcgcggagaatgggaaatgctgcagcctgtaggatcaccgaatgcataagaaataagattgacttgtatggttgtttgttaggcggggaagttgtgcaggcataagttctctgaacttcagtttgccgagagg

SEQ ID NO: 10959 - DNA, 3902 bp, Zea Mays
aacgaagtggcgcctcgaatcagcgctcgacacctcccgctgcgcccccatccgcgccgggcaggcatgggcaccgccgggtcggcgcgcgcccccacctagccgtcgactcggcgctgctcactcgcgctccacgcccacgcccacgcccaccgccccccgctatttatgcgtacttgcttgccgggagagtcgccggagagctgggcgtcctcctcccgttccagagcctcactgcttcgctccacccacccttaagcaagagtggtatctggtggttttgtttttcaaaagaagacagaaatgtcttccttgaggcctgcccagtcttctagttcatccagcaggactcggcagagctcccaggcacggatactagcacaaacaacccttgatgctgaactcaatgcagagtatgaagaatctggtgattcctttgattactccaagttggttgaagcacaacggagcactccacctgagcagcaagggcgatcgggaaaggtcatagcctacttgcagcatattcaaagaggaaagctaatccaaccattcggttgcttgttggcccttgacgagaagagcttcagggtcattgcattcagtgagaatgcacctgaaatgcttacaacggtcagccatgctgtgccgaacgttgatgatcccccaaagctaggaattggtaccaatgtgcgctcccttttcactgaccctggtgctacagcactgcagaaggcactaggatttgctgatgtttctttgctgaatcctatcctagttcaatgcaagacctcaggcaagccattctatgccattgttcatagggcaactggttgtctggtggtagattttgagcctgtgaagcctacagaatttcctgccactgctgctggggctttgcagtcttacaagcttgctgccaaggcaatctctaagattcaatcgctaccaggtggaagcatgcaggccttatgcaataccgtggttaaggaagtcttcgaccttacaggttatgacagggttatggcttacaagttccatgaagatgagcatggggaggtctttgctgagatcaccaaacctggtattgagccctatctaggcctgcactatccggccactgatatccctcaagctgccaggtttctcttcatgaagaacaaagtcaggatgatctgtgattgccgtgcaagatcggtgaagattattgaagatgaggcgctctccattgatattagcttgtgtggttcaactcttagagcaccacatagctgtcaccttcagtatatggaaaacatgaactcgatcgcatcccttgtcatggctgttgtggttaatgaaaatgaagacgatgacgaacccgagtctgaacaaccaccacaacagcagaagaggaagaaactgtggggtctcattgtttgccaccacgagagccccagatatgtgccgtttccactgcggtatgcctgtgaattcttggcccaggtgtttgctgtccatgtaaataaggagtttgaattggagaagcagatacgagagaaaagcattctgcgaatgcagacaatgctctctgacatgctattcaaggaatcatctcccttgagtatcgtatccgggagtccaaatatcatggacctcgttaagtgtgatggtgctgctcttttgtatggggacaaagtatggcggcttcaaacggctccaactgagtctcagatacgtgatattgccttctggctttcagaagttcatggggattccactggcttgagcactgatagcctccaggatgctggatatccaggagccgcttcccttggtgacatgatctgtggaatggcagtggctaagatcacgtccaaggacattcttttctggttcaggtcacatacagctgctgaaatcaagtggggaggtgcaaagcatgatccatctgatgaggatgacagcagaaggatgcaccctaggctgtcctttaaggctttcctcgaggttgtcaagatgaagagtttgccatggagtgactacgagatggatgctattcactcgttgcaacttattcttagaggtacactgaacgatgccttgaagccggcccagtcatctggtttagataaccagattggtgatctcaaacttgatgggctcgccgaactgcaagcggtgacaagtgaaatggttcgcctgatggaaacggcaactgttccgatcttggcggtagatggcaacggattggtcaacggatggaaccaaaaggtggcggacttgtcggggttgcgagttgatgaagctataggaagacacatacttacacttgtggaggattcttctgtaccaattgttcagaggatgctatacttagctctgcagggcagagaagagaaggaggttcgatttgagttgaaaacccatggctccaagagggacgatggccctgttatcttggttgtaaatgcttgtgccagccgtgacatgcatgaccatgttgttggggtgtgctttgtagcccaggatatgactgttcataagttggtcatggacaaatttacccgggttgagggggactacagggccatcattcacaacccgaacccgctcattcctccgatatttggcgccgaccagttcggatggtgctctgagtggaacgcagccatgaccaagcttactgggtggcacagagatgaggtgatcgacaggatgctccttggcgaggttttcgacagcagcaatgcttcctgccttctgaagagcaaagacgctttcgtacgtctttgcattatcatcaacagcgcattagctggtgaagaggcagagaaggctccaatcggtttctttgaccgcgatggcaaatatattgagtgccttctgtcagtgaacagaaaagtgaatgcagatggcgtcgtcaccggagtgttctgtttcattcatgttcctagtgatgacctccagcatgcgctacatgtgcagcaagcctctgagcagacagcactgagaaggctgaaggctttctcgtacatgcgacatgccatcgacaaacctctctcaggtatgctctattctagggaaacactcaagggcacagacctggatgaagagcagatgaggcaggttcgtgtcgcggataattgccatcgccagctaaacaagatactcgccgacttagatcaagataacattactgacaagtcgagttgcttggatttggacatggctgagtttgtgctgcaagacgtggtggtgtctgctgtaagtcaagtactgataggttgccagggtaaaggcatcagagttgcttgcaacctgccggagagatccatgaagcaaaaggtttacggggatggtatacggctccagcagatcctctccgacttcttattcgtttcggtgaaattctctcctgctggtggctctgttgatatctcttccaaactgaccaagaacagcattggcgaaaaccttcatctcatagacttcgaacttaggatcaagcaccaaggagcaggagtcccagcagaaatactgtcacagatgtatggggaggacaatagagaacagtcggaggagggcttgagcctccttgtttctagaaaccttctgaggctcatgaatggcgacattcgtcacctcagggaagctggcatgtcaaccttcatcctcactgctgaactcgctgctgctccttcagcagctggacattgaagccgtcactgcaaacaagtgccaaatgctgcccagctccctcagagttcattcggaaagcaacggtggttcgcggagaatgggaaatgctgcagcctgtaggatcaccgaatgcataagaaataagattgacttgtatggttgtttgttaggcggggaagttgtgcaggcataagttctctgaacttcagtttgccgagagg

SEQ ID NO: 10960 - DNA, 773 bp, Zea Mays
atccgcgccgggcaggcatgggcaccgccgggtcggcgcgcgcccccacctagccgtcgactcggcgctgctcactcgcgctccacgcccacgcccacgcccaccgccccccgctatttatgcgtacttgcttgccgggagagtcgccggagagctgggcgtcctcctcccgttccagagcctcactgcttcgctccacccacccgtcgagttgcttggatttggacatggctgagtttgtgctgcaagacgtggtggtgtctgctgtaagtcaagtactgataggttgccagggtaaaggcatcagagttgcttgcaacctgccggagagatccatgaagcaaaaggtttacggggatggtatacggctccagcagatcctctccgacttcttattcgtttcggtgaaattctctcctgctggtggctctgttgatatctcttccaaactgaccaagaacagcattggcgaaaaccttcatctcatagacttcgaacttaggatcaagcaccaaggagcaggagtcccagcagaaatactgtcacagatgtatggggaggacaatagagaacagtcggaggagggcttgagcctccttgtttctagaaaccttctgaggctcatgaatggcgacattcgtcacctcagggaagctggcatgtcaaccttcatcctcactgctgaactcgctgctgctccttcagcagctggacattgaagccgtcactgcaaacaagtgccaaatgagtattatttctgcccttggtgccag

SEQ ID NO: 10961 - DNA, 1674 bp, Zea Mays
ggagaggctgccacggcggtgcgagggctcctcttctccaacgctcaacaaccccgcaccccgactccaatcccggcaccaaccctagctcccgaagaggcagaacacaaaatcaacggaccaccggaacaggaagcaacagcagcggggcgccggtgccgtacccttcactcattccgcccctgaaagtgaaacgtacccagatctacaagctactccactcgacttccataaataccactcctgcgattccaccttgcagttggaccggccgttgttgctttgcttcttcgcaaaaaaaaaacaaaaaaacaaaataggcctgtcttgctccgatcaggcgtgttcttaggcttcgctgcccctaccgcgtcttcgccgggatcggtccatggccggcgccgagcgcgcggaggcggtcgcgctggaacaagggctcctcgatccggaggaatccaaccaagtagtatacactggagatggatcagtcgacttttctggaaatcctgttgtcaaggaaagaacgggtagatggaaggcatgtccattcatattagatgtttagataaggctgctacagttaccgaagttgatgtgaaaacggctgacttcaacaacccatggcggatatgcactgtcacccaggtggaagaactgaagatactagtaaggatgttccctgtctgggcaacaacaatagtgttttctgctgtatatgctcagatgtcaacaatgtttgtggaacaagggatggtgcttgacccatccttgggctctttcaagatccctccagcttcactatctactttcgacaccctaagtgtcatcatatgtgtcccgatgtatgattacatcgtggttccgatagccaggagattcactggcaacgagaggggctttacagagttgcagaggatgggtattggcctggtaatttccatcatggctatgtcagtcgccgcagtcctcgaaatcaagcggctagcagttgccagggaagcacacctggtggatcagaatgtcccggtcccactgagcatattctggcaaatccctcagtatttcctgattggtctagcggagattttcacattcattggggcgctcgagttcttctatgaccagtcaccagacgccatgaggagcctctgcagcgcgcttaatcttctcactactgcgtttgggaactatctcagcacgttcattttgacaatggttgcgtactttactacgaggggaggtaaccctgggtggattcctgacaacttgaacgaaggccatcttgattacttcttcttgctcatcgctggcatcagttttctgaacctgattgtttatgtcctctgtgctggcaaatacaagagcaagaaggcagcttgagttgtgaaggccaggggctggatggcgtgctgcgcgccatgttatggtggacacttcagttcaaaatctgtatatatgtttcccgcattaaccaccctagctgaagcaaccatctgcaattgttgcaaagtttatattcttcattgtgctggactaagttgattatacattcgtgcttctactttgtgtatgtatatatctgacctaaagttgctgaacatagacaatttcacttgcctctggtatccagggttttgattgttttttaacctagatatgtgaggtcacgtttta

SEQ ID NO: 10962 - DNA, 2368 bp, Zea Mays
atcgttgagatcgtctcctggagaggctgccacggcggtgcgagggctcctcttctccaacgctcaacaaccccgcaccccgactccaatcccggcaccaaccctagctcccgaagaggcagaacacaaaatcaacggaccaccggaacaggaagcaacagcagcggggcgccggtgccgtacccttcactcattccgcccctgaaagtgaaacgtacccagatctacaagctactccactcgacttccataaataccactcctgcgattccaccttgcagttggaccggccgttgttgctttgcttcttcgcaaaaaaaaaacaaaaaaacaaaataggcctgtcttgctccgatcaggcgtgttcttaggcttcgctgcccctaccgcgtcttcgccgggatcggtccatggccggcgccgagcgcgcggaggcggtcgcgctggaacaagggctcctcgatccggaggaatccaaccaagtagtatacactggagatggatcagtcgacttttctggaaatcctgttgtcaaggaaagaacgggtagatggaaggcatgtccattcatattagcagtgtgactacatggtcgggaacttgctacctaactccacttattggagcaatcctggctgatgcatactgggggaggtactggacaatcgcaacattttccacagtatacttcatcgggatgacactgctgactctttcagcatcagttcctatgctcatgcctccatcttgtgaaggatccttttgcccagcagcaagcccttttcagtatactgtcttttttcttggtctttatctgattgccctgggtactggtggaattaagccgtgtgtctcatcctttggagcggatcaatttgatgatacagatccagctgagcgaatccagaagggctctttcttcaattggttttatttttcaataaacattggtgctctcatatcaagcagctttctggtttgggtgcaagacaatgtaggatggggactggggtttggcattccgactgtattcatggggctggcaatcataagcttcttctctggtacatcactttataggttccaaaaaccaggaggtagtccaattacacgagtatgtcaggtgattgttgcctctttgcgcaagtggaatgtgcctgtcccagaggatagctctctcttgtatgagctacctaatggggtatcaacaattgaggggagtcggcaaatagagcacacagatgaactcagatgtttagataaggctgctacagttaccgaagttgatgtgaaaacggctgacttcaacaacccatggcggatatgcactgtcacccaggtggaagaactgaagatactagtaaggatgttccctgtctgggcaacaacaatagtgttttctgctgtatatgctcagatgtcaacaatgtttgtggaacaagggatggtgcttgacccatccttgggctctttcaagatccctccagcttcactatctactttcgacaccctaagtgtcatcatatgtgtcccgatgtatgattacatcgtggttccgatagccaggagattcactggcaacgagaggggctttacagagttgcagaggatgggtattggcctggtaatttccatcatggctatgtcagtcgccgcagtcctcgaaatcaagcggctagcagttgccagggaagcacacctggtggatcagaatgtcccggtcccactgagcatattctggcaaatccctcagtatttcctgattggtctagcggagattttcacattcattggggcgctcgagttcttctatgaccagtcaccagacgccatgaggagcctctgcagcgcgcttaatcttctcactactgcgtttgggaactatctcagcacgttcattttgacaatggttgcgtactttactacgaggggaggtaaccctgggtggattcctgacaacttgaacgaaggccatcttgattacttcttcttgctcatcgctggcatcagttttctgaacctgattgtttatgtcctctgtgctggcaaatacaagagcaagaaggcagcttgagttgtgaaggccaggggctggatggcgtgctgcgcgccatgttatggtggacacttcagttcaaaatctgtatatatgtttcccgcattaaccaccctagctgaagcaaccatctgcaattgttgcaaagtttatattcttcattgtgctggactaagttgattatacattcgtgcttctactttgtgtatgtatatatctgacctaaagttgctgaacatagacaatttcacttgcctctggtatccagggttttgattgttttttaacctagatatgtgaggtcacgtttta

SEQ ID NO: 10963 - DNA, 2365 bp, Zea Mays
atcgttgagatcgtctcctggagaggctgccacggcggtgcgagggctcctcttctccaacgctcaacaaccccgcaccccgactccaatcccggcaccaaccctagctcccgaagaggcagaacacaaaatcaacggaccaccggaacaggaagcaacagcagcggggcgccggtgccgtacccttcactcattccgcccctgaaagtgaaacgtacccagatctacaagctactccactcgacttccataaataccactcctgcgattccaccttgcagttggaccggccgttgttgctttgcttcttcgcaaaaaaaaaacaaaaaaacaaaataggcctgtcttgctccgatcaggcgtgttcttaggcttcgctgcccctaccgcgtcttcgccgggatcggtccatggccggcgccgagcgcgcggaggcggtcgcgctggaacaagggctcctcgatccggaggaatccaaccaagtagtatacactggagatggatcagtcgacttttctggaaatcctgttgtcaaggaaagaacgggtagatggaaggcatgtccattcatattagtgtgactacatggtcgggaacttgctacctaactccacttattggagcaatcctggctgatgcatactgggggaggtactggacaatcgcaacattttccacagtatacttcatcgggatgacactgctgactctttcagcatcagttcctatgctcatgcctccatcttgtgaaggatccttttgcccagcagcaagcccttttcagtatactgtcttttttcttggtctttatctgattgccctgggtactggtggaattaagccgtgtgtctcatcctttggagcggatcaatttgatgatacagatccagctgagcgaatccagaagggctctttcttcaattggttttatttttcaataaacattggtgctctcatatcaagcagctttctggtttgggtgcaagacaatgtaggatggggactggggtttggcattccgactgtattcatggggctggcaatcataagcttcttctctggtacatcactttataggttccaaaaaccaggaggtagtccaattacacgagtatgtcaggtgattgttgcctctttgcgcaagtggaatgtgcctgtcccagaggatagctctctcttgtatgagctacctaatggggtatcaacaattgaggggagtcggcaaatagagcacacagatgaactcagatgtttagataaggctgctacagttaccgaagttgatgtgaaaacggctgacttcaacaacccatggcggatatgcactgtcacccaggtggaagaactgaagatactagtaaggatgttccctgtctgggcaacaacaatagtgttttctgctgtatatgctcagatgtcaacaatgtttgtggaacaagggatggtgcttgacccatccttgggctctttcaagatccctccagcttcactatctactttcgacaccctaagtgtcatcatatgtgtcccgatgtatgattacatcgtggttccgatagccaggagattcactggcaacgagaggggctttacagagttgcagaggatgggtattggcctggtaatttccatcatggctatgtcagtcgccgcagtcctcgaaatcaagcggctagcagttgccagggaagcacacctggtggatcagaatgtcccggtcccactgagcatattctggcaaatccctcagtatttcctgattggtctagcggagattttcacattcattggggcgctcgagttcttctatgaccagtcaccagacgccatgaggagcctctgcagcgcgcttaatcttctcactactgcgtttgggaactatctcagcacgttcattttgacaatggttgcgtactttactacgaggggaggtaaccctgggtggattcctgacaacttgaacgaaggccatcttgattacttcttcttgctcatcgctggcatcagttttctgaacctgattgtttatgtcctctgtgctggcaaatacaagagcaagaaggcagcttgagttgtgaaggccaggggctggatggcgtgctgcgcgccatgttatggtggacacttcagttcaaaatctgtatatatgtttcccgcattaaccaccctagctgaagcaaccatctgcaattgttgcaaagtttatattcttcattgtgctggactaagttgattatacattcgtgcttctactttgtgtatgtatatatctgacctaaagttgctgaacatagacaatttcacttgcctctggtatccagggttttgattgttttttaacctagatatgtgaggtcacgtttta

SEQ ID NO: 10964 - DNA, 2447 bp, Zea Mays
caagaaccaaactaaacacatcgttgagatcgtctcctggagaggctgccacggcggtgcgagggctcctcttctccaacgctcaacaaccccgcaccccgactccaatcccggcaccaaccctagctcccgaagaggcagaacacaaaatcaacggaccaccggaacaggaagcaacagcagcggggcgccggtgccgtacccttcactcattccgcccctgaaagtgaaacgtacccagatctacaagctactccactcgacttccataaataccactcctgcgattccaccttgcagttggaccggccgttgttgctttgcttcttcgcaaaaaaaaaacaaaaaaacaaaataggcctgtcttgctccgatcaggcgtgttcttaggcttcgctgcccctaccgcgtcttcgccgggatcggtccatggccggcgccgagcgcgcggaggcggtcgcgctggaacaagggctcctcgatccggaggaatccaaccaagtagtatacactggagatggatcagtcgacttttctggaaatcctgttgtcaaggaaagaacgggtagatggaaggcatgtccattcatattaggtaatgaatgctgtgaacgactggcctactatggcatctccacaaaccttgttacttacttgacaaaaaaactgcatgctggcaatgcctctgctgctagcagtgtgactacatggtcgggaacttgctacctaactccacttattggagcaatcctggctgatgcatactgggggaggggatgacactgctgactctttcagcatcagttcctatgctcatgcctccatcttgtgaaggatccttttgcccagcagcaagcccttttcagtatactgtcttttttcttggtctttatctgattgccctgggtactggtggaattaagccgtgtgtctcatcctttggagcggatcaatttgatgatacagatccagctgagcgaatccagaagggctctttcttcaattggttttatttttcaataaacattggtgctctcatatcaagcagctttctggtttgggtgcaagacaatgtaggatggggactggggtttggcattccgactgtattcatggggctggcaatcataagcttcttctctggtacatcactttataggttccaaaaaccaggaggtagtccaattacacgagtatgtcaggtgattgttgcctctttgcgcaagtggaatgtgcctgtcccagaggatagctctctcttgtatgagctacctaatggggtatcaacaattgaggggagtcggcaaatagagcacacagatgaactcagatgtttagataaggctgctacagttaccgaagttgatgtgaaaacggctgacttcaacaacccatggcggatatgcactgtcacccaggtggaagaactgaagatactagtaaggatgttccctgtctgggcaacaacaatagtgttttctgctgtatatgctcagatgtcaacaatgtttgtggaacaagggatggtgcttgacccatccttgggctctttcaagatccctccagcttcactatctactttcgacaccctaagtgtcatcatatgtgtcccgatgtatgattacatcgtggttccgatagccaggagattcactggcaacgagaggggctttacagagttgcagaggatgggtattggcctggtaatttccatcatggctatgtcagtcgccgcagtcctcgaaatcaagcggctagcagttgccagggaagcacacctggtggatcagaatgtcccggtcccactgagcatattctggcaaatccctcagtatttcctgattggtctagcggagattttcacattcattggggcgctcgagttcttctatgaccagtcaccagacgccatgaggagcctctgcagcgcgcttaatcttctcactactgcgtttgggaactatctcagcacgttcattttgacaatggttgcgtactttactacgaggggaggtaaccctgggtggattcctgacaacttgaacgaaggccatcttgattacttcttcttgctcatcgctggcatcagttttctgaacctgattgtttatgtcctctgtgctggcaaatacaagagcaagaaggcagcttgagttgtgaaggccaggggctggatggcgtgctgcgcgccatgttatggtggacacttcagttcaaaatctgtatatatgtttcccgcattaaccaccctagctgaagcaaccatctgcaattgttgcaaagtttatattcttcattgtgctggactaagttgattatacattcgtgcttctactttgtgtatgtatatatctgacctaaagttgctgaacatagacaatttcacttgcctctggtatccagggttttgattgttttttaacctagatatgtgaggtcacgtttta

SEQ ID NO: 10965 - DNA, 1262 bp, Zea Mays
ctccttcgaatcttggttggaacaatcgcgtattacattgggtgaatcgtcctctcaaggtttttgtacacccaaaaaaaggccatacgtccctacaatgtgtgcgtcattcatacccatctgtgtggacagaaggaagcctgttattggaatgtcctttcattcttgtaatgacgcagaggagttctacaaatcatatgcacatgatggagggttttcagtgcgtgttggttctcaaaataaagctcttggtgaggttattaacaagagatatatgtgttcaagggctggttttaagaaggtgaaagaggtcgatgatccccctaaaaaccaaaagaaccacgcactaacaagatgtggttgtgatgcaaacatgtatgtcaagttgggcccggataagaagtaccatatcacttcaatggttgaggagcataatcatccactttgctcgcctaataagattccttttcttcgatcaaaccgtgttgtgagccaaagagctaagaatacattgtttacatgccacaaagcaagcataggtacctcacaggcattcagaatcctacaagttagtgatggtggatttgcacctctatatcagcttcaggacatttgcacctctatatcagcttcaggaacctgatagtcctcatcagttttggagtcaattgttcccatgtttttacatcagacatgttttcaatctgcataaggtgctgaacctgcgacacttaaggggacaaatcttgaatcctccacctgaaattttagaaatttcaggaaaaaattgaagttaacaatttcgttttccatagctaaaatttcagaaaaaaatgaacttaacaattcctctgcacatgggatcgagcgtgggcggcagaaacggacgacgcctgtgactgatgacgaccgcaccaactctcgctgtcgctggctcttcctgacgctagctgtgacgccggtgggcagtcccgcgtccgcctccgcctccgcgtggtcgtgggacctccgcctccgcccgtggtcgtggcgcctctggcggcctgggtggccatggcgagctcgaacagccacatggacagcgctggcaggggacttgagcacgcggcagacaggactggcggggaggacgacgatcgatttgggagcagagcgcagggtgcccggttcagtccggtccggtccacgggcaaaccagagactacaggacctacgtgggagggtgtatctgtaaaaatgtcgctggacgttggatgaggaag

SEQ ID NO: 10966 - DNA, 1258 bp, Zea Mays
atataattcactaacacctctgcatttttcataataaagagacaagaatatatcacaagagtctaaatatccgaatttagacccactaacactgactgaggcagtaactgaacaatcacagagtctttatatactagaaaattgcagaaaataagagaataaagtgataaaattcatatgtccgatcagtggaaatagcccacgctgccgatctaagacaagtcggcccatgaggcccatctagggaggccatattagcaggcagttagggtatgaaccctaacatctccttgcggcggcggcggcggctacctgcagcatgcgcagtgcaacggcggcgcaggctcggacaaccagtgggcgcgggcgcggttcggcgatgcgcagccccggccggtgggcgcgagcagccttggcgtggccggccccaaccacggcacggcggcccggccacggcggcttcccgtggagcggcggctatagccctggccctggcggctccggtcccggcgtgccttcccgtggcgcggctgcccacggtggcgcggcgcgcgggtgcacagctccgagagcgcgcgcgggcaggccccccgtccctggctcgccaacgggcggcccggccacggctcgacgccggtgcggcccggcggcgcgcagccccggccaagcaggcgacggcgaggcccctggggcgtggctccacgggcgcgtggccccggcgagggaatccctgcgcaggcgcgcggccccgcgaccggcagcagcgcggacttacggccacggcacgacgcgaaggtgcggcccaggcgatacgcgcgacctcccatcagtggtcggtccatcctaggcacggcggcccttgcgtggatctcggcgagcgcgcaacagccatggcgcaactcaagcgcatgttcgcgtggccccgaccagcccagtgtgggttcgtccctggcgggcgcacgacgctggcatggtctcctggcctctgctgaaaaactgcaagcgccacatggaattctcacggaggcaaccaggagatgccgaacagatcatcagggtacagttacagtacactccatgcataggagtgggtagatcaagtagaaagaccatcagattcaggcgagatcaactccttccagtggtgtcttgttttgtttgggatcgtgtcccgtgctcatggcgctcccgtgcacatgtgagcacttttaatctggatcatcccttcctcatccaacgtccagcagcaattttacat

SEQ ID NO: 10967 - DNA, 1627 bp, Zea Mays
atggcgagggaggcgagagggtttcaggcgggaaagttcgaggagttggaggcagaatggccctcggattgttcatctatttgcgcttctgccagtgcaagtggtgcacggttctgccgttccgcatcccgcccgcccaccgcgctcctttccatcgatggtgctccttccttcgacggcaaatctcatccggtcgcatcccgcccgcccgccgcacgccccagccggatcaatgttgtcttccccacgcgctgcgcccgcctgccatcgccagcgcgccccctcccgcgctccctccgcgcgaagacgaagggttgcgagaagacgaagggctgcgcgggggcggtctgcggtggggccagccactgcagcgcggaggcggcgggggaggttgagaaggtgagccggaaggaggcagtgtcgcggggcagggcgagggtcagcgccatgccgaggaccgggtcgggcgccgcggcgagggagaaggggatgggctccggcgggtctgcgtgggtggaggcggagtggacggcgagggcgcgggtgtcgagtaggaggtcaccggagtgcagcgtggagagggtgagcaccgcggaggtgtgtatggtggaggcggcgaagtcgagggcttcgcggaggcggtctgcggtctgcggcggggccagccactgcagcgcggaggcggcgggggaggttgagaaggtgagccggaaggaggcggtgtcgcggggcagggcgaggattagcgccgtgccgagaaccgggtcaggcgccacggcgagggagaaggggatgggctccggtgggttggcgtgggtggaggcggagtggacggcgagggcgcgggtgtcgaggaggaggtcgtcggagtgcggcgcggagagggtgagcaccgcggaggcgtgcgcgaggatgctgcagcattcgaacagcgccaacgagctgctcttgcgtcggaagctggaggagcagcagcaggctgccgaacttcagcacgccattgagctccagagccgccgcctcatgggtctccagctgctcgacctcaaggctcgcgcagctgcgacagcagcagcggcatcggcactgccaacaccagttgccaatgccttcgcgtccagccatcctttgagcaccatggcagtcgagtcgccactagagtccgctcaagctgagcagtgggtttgctctggaggggaagctcaacggtggcgacaaggaagaatctgcttgcgaggcgagccctgacgccgctgatagcgaccaaagtggagatcacaacttgccggatagcccatttgcgtcccctaccaagtctgccgcgctcgtgcacgacagtttcgccgccacggagcatgagaacaccgcgtcccttgttgggagcaagatcgacgtcggcagtaaccatctccgccccctgcgctggaaatcccttcgcccagctcctacttcttccccatgcgcaggtgcgttggaaaggcctctactctacttttccgtggcgccgattatgtccgtgaacattctgtcatccacgagtgaaatgattctctccgaatgcaatgagcaggctgtcctccgatcacggagccatggggatgtaaagttcagcattggaagcgagtga

SEQ ID NO: 10968 - DNA, 1754 bp, Zea Mays
ctcgaccacgtcaatggcgataccaagtggaggcgcctcgaagccgagaggccccgaccgagataggaagcaaaggcgttcgctcaagagaatggtctctttttcatggaaacttctgccaaaacagctaccaatgtgaacgacgtgttctatgagattgcgaagaaactgcttcaagggcagcaggttcagaacccacaaggcgggatggttctcaaccagagaccacctaagaggatgtcagttaaattgcagccggacttctgatagaatgaactgaaagacttctctaacaaaagtggagctgaggggagcaagagtgctaaaagtagtccaatgtttttagatgttctcgaatgttatctgaaatatgaggaggaatccaatgggaagcagtgcatatcgaccaagcgcggtggcacggaggacaacccgagaatggtggaaagaagcaggggaaggacaacgcaacgaagccccctagctgcccaaggactacatccatgtctgggcaaggcgtggcgagcaaggcatggcgaggcgatggactgtcacaacctcatggagagggtacatttccctaaggctctgttgcactattatttctttgcatcgtcatccttgctggctacagagattcgtgtgttaagtttttttccttgcttcttatgtataattcatgtgagacgggagaagatcagctagcagatgaagccgctacaggatctcgtgccgagttgcaacaaggaacagattgagatgcatcagattgaagagaagaagagttcattctagaatcatcaggttgactagcaggtttcagcagaagtgacaatccatccaaacttagaatttcttcacggagaaagggtcctgcttttagatcatctgcatttaacaacgaatctgcaggtccaaagcatttgatacaactcattgcaagaagtcaagaactcatgagtatctaaatgtctaacaaagtgacaaccatgatactcttgtatagtatcagactaacaggggcgaaataaataatttgccataggcaccaccagtgacaaattatttcatgtatttgcatgtatttctgcgtgtaggggtgaggagaaaagcatggcactggaattgacctctgttaaattacaccatatatttgaaacatacagctgagagggccatgcaagattactacaagatgtctatggcttgataatggaagattgttggacgcactctacaaagcagctcatgctgcattgtcaagctgtcctgtgaattgtccacttagtcacatggagaagatggtagctgaaatcttgaggaaaatggtacggaagtatagtgagaagaggcctgatgtcattgcggttgctatggagaacaccacagcaagtttctcagaacacctcgatgctaaatcatctggaaattttgaaccttcctcagctactagccatctgagcaggagtccagctataatatgtacgagattggttttctcggcttttgggtatgttcataaaatagccacctttgaaaagctacaggcattgatccagtacactgatgcggctactgcttcagctgctagagaatccttagatggaaggagcatcccaagtggaaatttgctcatgttacattcaaaacagagacctgtttatggaggttgggaacaacaccttggattggagcatacaaccactaccccaaaaaggtcctacttaggcaacaaccagatgaacaggatatga

SEQ ID NO: 10969 - DNA, 2268 bp, Zea Mays
catgcatcctttctcgcgaggcctcccttcgtgagcagtaggaggagcttgacgcccacgccctcgtgcaaaaactcgaccacgtcaatggcgataccaagtggaggcgcctcgaagccgagaggccccgaccgagatagtgcctggggctggatggaagagcacagagcgcactcgatccatggataagaaggggagtacggagggggctagacagtatccatcggtacaatcggcacccgcggataccgcttcaaccccgatgaggaccgaaccgtgggcctcctgccgccaggactttgggctttcagccaccgcatccttcgggcacccgtatcgcggcgctagaggcccccaatcaacatcacgaggtattccggggaatcagatctccgcctttggctgggagactaccggctagcatgtcaggcgagaggggtagattgtgatgacttcatagtctggattctcccttgtatctggtgaattcggtacgagcatggctcgaaaacctcagacccaggagcatccaggattgggctgaccttgaagaagtctttgttgggaatttccaaagcacgaagcaaaggcgttcgctcaagagaatggtctctttttcatggaaacttctgccaaaacagctaccaatgtgaacgacgtgttctatgagattgcgaagaaactgcttcaagggcagcaggttcagaacccacaaggcgggatggttctcaaccagagaccacctaagaggatgtcagttaaattgcagccggacttctgatagaatgaactgaaagacttctctaacaaaagtggagctgaggggagcaagagtgctaaaagtagtccaatgtttttagatgttctcgaatgttatctgaaatatgaggaggaatccaatgggaagcagtgcatatcgaccaagcgcggtggcacggaggacaacccgagaatggtggaaagaagcaggggaaggacaacgcaacgaagccccctagctgcccaaggactacatccatgtctgggcaaggcgtggcgagcaaggcatggcgaggcgatggactgtcacaacctcatggagagggtacatttccctaaggctctgttgcactattatttctttgcatcgtcatccttgctggctacagagattcgtgtgttaagtttttttccttgcttcttatgtataattcatgtgagacgggagaagatcagctagcagatgaagccgctacaggatctcgtgccgagttgcaacaaggaacagattgagatgcatcagattgaagagaagaagagttcattctagaatcatcaggttgactagcaggtttcagcagaagtgacaatccatccaaacttagaatttcttcacggagaaagggtcctgcttttagatcatctgcatttaacaacgaatctgcaggtccaaagcatttgatacaactcattgcaagaagtcaagaactcatgagtatctaaatgtctaacaaagtgacaaccatgatactcttgtatagtatcagactaacaggggcgaaataaataatttgccataggcaccaccagtgacaaattatttcatgtatttgcatgtatttctgcgtgtaggggtgaggagaaaagcatggcactggaattgacctctgttaaattacaccatatatttgaaacatacagctgagagggccatgcaagattactacaagatgtctatggcttgataatggaagattgttggacgcactctacaaagcagctcatgctgcattgtcaagctgtcctgtgaattgtccacttagtcacatggagaagatggtagctgaaatcttgaggaaaatggtacggaagtatagtgagaagaggcctgatgtcattgcggttgctatggagaacaccacagcaagtttctcagaacacctcgatgctaaatcatctggaaattttgaaccttcctcagctactagccatctgagcaggagtccagctataatatgtacgagattggttttctcggcttttgggtatgttcataaaatagccacctttgaaaagctacaggcattgatccagtacactgatgcggctactgcttcagctgctagagaatccttagatggaaggagcatcccaagtggaaatttgctcatgttacattcaaaacagagacctgtttatggaggttgggaacaacaccttggattggagcatacaaccactaccccaaaaaggtcctacttaggcaacaaccagatgaacaggatatga

SEQ ID NO: 10970 - DNA, 3319 bp, Zea Mays
cttccattcaaagccccgagaatttcaaaaaacactaacagcttccgcgatacaagcatcggcttcgtccctctgcggttctgcctcctccatttcgtctcctctcctctcctctcctccccactcctctctctctctttctctcttccccagctccggccgccccgtcgccgcagccgtcgcgtctgctgctagcgctgtgctctccggcgccaccgtggccgcgggcgagctcgagaggtgcggaatttgggtgctgctcgtgctggtttcgaaccggagcaggggggaagtggaggagtaataattgggaggcagttggaggagtgtaactttgggcattaatggcggggtggtgagagaccccccaagggaggaggcctctctggtggtggcgccctgtagtttacctgcgtagctcggcctctgcacccccgcctttattgcgtttaatttccctccgaattccagcgcttcggcctcctcgccaaccccatcgacacctgtaacgcggagtggacatgggccacggcggcggcggcggcggcggcaggaggaggcgctcgaggcgatgatgcgcgatcgagcgcgcgggctctgggcgctgctgctcgtcgccctggcggcggcgccctgggcggtgctggcgcaggggaacctgacgtcgcggtcggatctcgctgggctgtacgcgctgcggggctcgctcggcctgagggcgcgggactggccgcggcgtgcggacccgtgcacggcgtgggcgggcgtgggctgccgcgccggccgcgtcgtctcgctcaacctcgccgggctgcggcgcacgcggctgggccgcctgtccccgcgcttcgacgtcgacggcctgcgcaacctcacgcggctcgaggccttcaacgcctcggggttcgggctccccggctccatcccggcgtggctaggcgacgggctcgctcccactttccagtccctcgacatctccgcctgcgccgtctccggggagatcccggcctccgcgctcgtgggcctcggcaacctcaccaccctcaacttcgcaggcaaccaactgtccggtcaactccccggccaccgcgctctcgaggctaacgcggctcaggaccctcaacctctcgtccaatgcgttttcgggcgccctgcctgacgcggtctggtcgctcccggggctcagcgttctggacgtctctcgtaacaacctcaccggcgcattgcccacggcagggttcgcgctgccagccaatgcacaggtggtggatctgtcgtcgaacttgttctatagcggcgtgccagagacctttcgccggctgttcgcccagttgctgctggccaatatttctgggaactacttcgacggcaagctaggagtgtccgatggtggtggtgggcctggtggcaatgtttcgtttcaatcgaattgcttccttgacgttctgggacagcgtacccaggctgattgtcagcagttctatgccaagcgtggcttgccatatgatggtccagttatcccacccgcaccacagcctgcaccttcaccggcaaggaagaagaacaggaatctgaaatacatactgatcggggccattggtggaagcctcctgctgatagccggggttgcagccattgtgttctgctttgtgtgttctgtgagaacagggaggacggatggtcagagggaaagtggggcatcaccaagtgcaccagcaccatcggtagtgtcagctaccggcacagctgcagctactggtggcacacacccttctgcattgtccacaaacatggcgaaagtcggcgattcatttgcttacgaccaaattgccaatgccacatcgggatttggggaagagaggctcatcaagcatggtcactcaggtgatctataccatggtgtgctccaagacgggactgccgtggtggtgaagaggatcactttgcgcgtggctcggaaggatgcctatatggcagagttagatttgtttgctaaaggattgcatgaaaggctggttcctttcctgggtcactgccttgataaagaagaagaaaaggttcttgtgtataggtttgtccgaaatggtgacttgtcaagtgcactgcacaaaaagtcaagggaggaagatgaaggcttgcaatctttggactggataaagaggttgaagattgcaacgggagtagctgaggctctttgctatctgcatcatgagtgttctccaccgatggttcataggacagcagatcaaggttcttctggttccccatctgcaacttgcccatatgatgtctattgttttggaaaagttttactggagctggtgacagggagacttggaatcagtgcatcaaatgatgcttccacaagcgagtggcttgatgccaccctgcggtacgtcaacatttacgagaaggagcttatgagcaagatcattgatccaacgcttatcattgacgaggaccatctggaggaagtctgggcaatggcgattgttgccaagtcctgcttgaatcctcggtcctctaaacgcccgccaatgaagtacatcctaaaagcactagagaaccctttgaaggtggtgagagaagacaatggcaatggctcgggcaggttaagagcaacatcgtcacggggttcatggaacgctgcactctttgggagttggcggcatagctcgtctgatatagggccttctagggaggacaacattctgaagcgctcagagacaatcaaatcgtctggcgggagcaacggggaccattcatcctcccgcaggaggcaatccaaggagatcttccccgagccgtccggctctcgtgacaccgaggattaagcatgaaggagaatctttttacgaatcatttttcggtaaggcgggagtccttatgaaggagggctctgttagaagctccgcttgctgcttctatagaattctttcgtccaaaaaagtcacaatggcttcacaccagcacaccggcgccatggtaatcatttttgggttaagtagcaatggtggcatgtacgttggtgtaccaatggcatgcagttggcgccagtgtaaaaatcttcacagttggaagtctggtgtctcttctgtccattttctcgtttctgctcctctcggttaaagaaagaatggcgagctgattctttttcttctcccttctgtaattgattgtttcattgttcatcatagaggaaatgttctttttattcatgcttgccatattttttttcaagctttgcatttctttgttgttgtgcaagtttgatgttactgcgtgggtgtggatagcgccatccggccaaagcgttgag

SEQ ID NO: 10971 - DNA, 3461 bp, Zea Mays
cttccattcaaagccccgagaatttcaaaaaacactaacagcttccgcgatacaagcatcggcttcgtccctctgcggttctgcctcctccatttcgtctcctctcctctcctctcctccccactcctctctctctctttctctcttccccagctccggccgccccgtcgccgcagccgtcgcgtctgctgctagcgctgtgctctccggcgccaccgtggccgcgggcgagctcgagaggtgcggaatttgggtgctgctcgtgctggtttcgaaccggagcaggggggaagtggaggagtaataattgggaggcagttggaggagtgtaactttgggcattaatggcggggtggtgagagaccccccaagggaggaggcctctctggtggtggcgccctgtagtttacctgcgtagctcggcctctgcacccccgcctttattgcgtttaatttccctccgaattccagcgcttcggcctcctcgccaaccccatcgacacctgtaacgcggagtggacatgggccacggcggcggcggcggcggcggcaggaggaggcgctcgaggcgatgatgcgcgatcgagcgcgcgggctctgggcgctgctgctcgtcgccctggcggcggcgccctgggcggtgctggcgcaggggaacctgacgtcgcggtcggatctcgctgggctgtacgcgctgcggggctcgctcggcctgagggcgcgggactggccgcggcgtgcggacccgtgcacggcgtgggcgggcgtgggctgccgcgccggccgcgtcgtctcgctcaacctcgccgggctgcggcgcacgcggctgggccgcctgtccccgcgcttcgacgtcgacggcctgcgcaacctcacgcggctcgaggccttcaacgcctcggggttcgggctccccggctccatcccggcgtggctaggcgacgggctcgctcccactttccagtccctcgacatctccgcctgcgccgtctccggggagatcccggcctccgcgctcgtgggcctcggcaacctcaccaccctcaacttcgcaggcaaccaactgtccggtcaactccccggccaccgcgctctcgaggctaacgcggctcaggaccctcaacctctcgtccaatgcgttttcgggcgccctgcctgacgcggtctggtcgctcccggggctcagcgttctggacgtctctcgtaacaacctcaccggcgcattgcccacggcagggttcgcgctgccagccaatgcacaggtggtggatctgtcgtcgaacttgttctatagcggcgtgccagagacctttcgccggctgttcgcccagttgctgctggccaatatttctgggaactacttcgacggcaagctaggagtgtccgatggtggtggtgggcctggtggcaatgtttcgtttcaatcgaattgcttccttgacgttctgggacagcgtacccaggctgattgtcagcagttctatgccaagcgtggcttgccatatgatggtccagttatcccacccgcaccacagcctgcaccttcaccggcaaggaagaagaacaggaatctgaaatacatactgatcggggccattggtggaagcctcctgctgatagccggggttgcagccattgtgttctgctttgtgtgttctgtgagaacagggaggacggatggtcagagggaaagtggggcatcaccaagtgcaccagcaccatcggtagtgtcagctaccggcacagctgcagctactggtggcacacacccttctgcattgtccacaaacatggcgaaagtcggcgattcatttgcttacgaccaaattgccaatgccacatcgggatttggggaagagaggctcatcaagcatggtcactcaggtgatctataccatggtgtgctccaagacgggactgccgtggtggtgaagaggatcactttgcgcgtggctcggaaggatgcctatatggcagagttagatttgtttgctaaaggattgcatgaaaggctggttcctttcctgggtcactgccttgataaagaagaagaaaaggttcttgtgtataggtttgtccgaaatggtgacttgtcaagtgcactgcacaaaaagtcaagggaggaagatgaaggcttgcaatctttggactggataaagaggttgaagattgcaacgggagtagctgaggctctttgctatctgcatcatgagtgttctccaccgatggttcatagttttgtactatagggatgtgcaagccagcagcatccttcttgatgataaatttgatgtacgccttggtagcttgagcgaggtgtgtcctcaagagggggaaggtcaccaaaatgttatcacaaagctgttaagattttcttcgacagcagatcaaggttcttctggttccccatctgcaacttgcccatatgatgtctattgttttggaaaagttttactggagctggtgacagggagacttggaatcagtgcatcaaatgatgcttccacaagcgagtggcttgatgccaccctgcggtacgtcaacatttacgagaaggagcttatgagcaagatcattgatccaacgcttatcattgacgaggaccatctggaggaagtctgggcaatggcgattgttgccaagtcctgcttgaatcctcggtcctctaaacgcccgccaatgaagtacatcctaaaagcactagagaaccctttgaaggtggtgagagaagacaatggcaatggctcgggcaggttaagagcaacatcgtcacggggttcatggaacgctgcactctttgggagttggcggcatagctcgtctgatatagggccttctagggaggacaacattctgaagcgctcagagacaatcaaatcgtctggcgggagcaacggggaccattcatcctcccgcaggaggcaatccaaggagatcttccccgagccgtccggctctcgtgacaccgaggattaagcatgaaggagaatctttttacgaatcatttttcggtaaggcgggagtccttatgaaggagggctctgttagaagctccgcttgctgcttctatagaattctttcgtccaaaaaagtcacaatggcttcacaccagcacaccggcgccatggtaatcatttttgggttaagtagcaatggtggcatgtacgttggtgtaccaatggcatgcagttggcgccagtgtaaaaatcttcacagttggaagtctggtgtctcttctgtccattttctcgtttctgctcctctcggttaaagaaagaatggcgagctgattctttttcttctcccttctgtaattgattgtttcattgttcatcatagaggaaatgttctttttattcatgcttgccatattttttttcaagctttgcatttctttgttgttgtgcaagtttgatgttactgcgtgggtgtggatagcgccatccggccaaagcgttgag

SEQ ID NO: 10972 - DNA, 941 bp, Zea Mays
ccccgcccgacatctgtctctcctcgcaggcccgagacttccgccgatttggcctacctctcccagattgccggcgtcctcgcccccgcagacaactgcagcctccccctcttccgcccaagacttcaaccgatttgacctgcctcctcccggatagccagcgtcctcgccctagctgccgcctgctacgcgtgacgccctcatccatggcaccggaagaggctgatgtggatcgttgcggaggacaacacgaaggtcctggcttcgggctccactaactcactgaagagaccatcggcggcggcaacggtcaccatctccgagaaatctcgctgaaggcaacatcgacgacggttccgtgcagcgtcgccgcttgaagctcccacgggatctacagccaccatccaaggaggagaagccggtcccagcatcacccaaggtggtgaatgtcccctaccctggtcgtacttgtacccatacccggcgtggctgtccgactgctgctcccagtcccaccacagccacggtgggtgccagtgctgctccacggtaagataattcacgaagaataatgccagcgatctatctctgagaaagaagacaataatacacattccacgactgcaattttagctaaacaatgcagagcaattgaaggaaaaaagaatattaaggaagttgcctgaagttaaggtcaaattttcttttctcctctgtggacaccatcaaattgatttcttgttggttatattcttaacccgttggtgaatgaagatgttattttccttgttatctttaatttattcttcccagctactactatgacaatataatggtaattgtcaaatttaagtgttgaaattacactattttgtgtaccaccatattctaaaatatatatggtaccaccatctgctaaaatatatatggtaccatctttt

SEQ ID NO: 10973 - DNA, 1085 bp, Zea Mays
tacgtttccatttttcagcgatatatcctcggtgacaacagcaaaactggcgcctgcgcacccggtctcctcccacgggttggcacgcaccggacacgagctcaggctcccatttccaaaagcgtccccaagagtaatcaagacagcccactggtttcccccccaaaacctcggcacaccggtacaccacccaccgtaaccggtcgtcatccatccctcgttttggcaaccggatcaccttccaatccaacccgcgtctataaatttcctggcacacgcgagcccggaaccggcaattcgtttatagcgagcacaccagcgaaccagagattcatcagagtggcgatggccccgagcgcgtcgatgctgttcctgagctaccaccagctccacaggccgacggaggcgacactgcacgagcgcgacgccggcgaggagatcaagtcatcggcgccggccgacgctgataaggagctggaaagcaagttcgaggaggcgctgcgcctcagctgctggtcttcatgagcatccatccatcatggggaacggagagacgcgagcgtgccgctgaatcgaagcgacctctcctctaaacagccgtcctgtatatcttcctccgtgtatcaaaatccatccttttgctttagatttttgtacatttgtaatcgtcacatccgctcaaatatgttatatatattttagtttggagcataagtctgtacaggtgcacaaatgcacaaacgaaatactggtcatcaatctggtatccaacggttcatatacagtttgcaaaatagtcgtccagtactcataatagttcctaggactgggcgttcggttcttcggttcggttcctcgattctggtagaaattcggttcttcggttcggttcctcgattctggtagaaattcggttcttcaaaaactagaaccgaaatagtaagaaaaaaaactagaatcgactagttcggttctcggttcttcgattcggttctccggttttaaccgaactgtaacagccactctaaaattctaaataacgacaacttttatgagaaatttcaacatctcctcacaaacaacca

SEQ ID NO: 10974 - DNA, 1657 bp, Zea Mays
ccaggagcgcgggaagaacgctgcgatgccactagggaagaaatagaaggtggacatgctgcctgggctatctaaacttcctggctccaccactgattagaagtggccatcaattacagcgtatcaatggttggcagaggggagaagttgttggacatgacagaagacagaatcattttagatgaacctcgtgggaatggagacaaaggcacacattatctattattttgggggctgtttggagatcttaccctgtggagtcgtcaaaactatgtgcagagtaaacctgttgaaacaaaagaagtgaatgaacaagatagcagtagaggccatgcaacattatccaagaagagccagaatcctcagccagataattcattggtgaatcaagtggaagaagacgcctcagatgatgaaaatcacgaggattctagaaagggacgctctaaattggagcgatggacaagccacaaagagatagaatatagtaatatcgatgatgataatacagagacatttccgaccatcaaagctgatgttgaagccgatgaggtgggtaaatctgaagtttctgctgcagttggcaattcagacatcaatagcaatgttgatactgggcaaacatctgataagagtgaccgacatctagacacagttgagaggctcaagagacgaagtgagcgtttcaaacttcccatgcctggcgagaaggatacgcctcaaagcaaaaaggtggataccgaagtgcagcctccccaaaatgaatctactgctgctgatatggaagtgaagcctgagcggccagctcggaagcggagatggactgggagttagttgaactagcataacgtttccacttttcagcagatttcatggcagatgcttgcgctttgccacgtttttcctcgtacagttgaaagttgaattgatgtatggttttactgtctagcatacacatgtacctgtaaacttagtttttttttgtgtggctgggaactggatactgtactaaaaccccatccattttcccactatgattctggtgacctcaatgtggcacaggagccactgtactccgggtaagttccgaggctgttatgggaagcagtggcctcggagtttcccagttgaatatctgggttcggcatgaactacattttgatgaagctggagtgcccctgctgcaaggttcttttgtttgaagttctggtggcctgaagcaccgggtcttgtaacaatcttgtgttggtgggagatacttgcaagatgtgatggttgaatgtttggcacgtgatgatgatgctgttttaggaaccaccaataggtgatagaaaccaggggctagagatttcagaactgacataatcacaaatttgtatgcttaatactatgttagtcatgtacattctgataaacgtataaatgtcgtgcatgatctaccggagtaaggtgtctaagactagtgtgtagagctccacggtgcactttttgggtcgagcaatacatatatatgtacctgtagagagtgttaggtagaaataacatgattgtttgcttgttgtaggtttgcggtgtatgtaactggttcgtgtagaattttgctaaccatagagttttgaatggcattatctaaatttattgaaatttagcatttcag

SEQ ID NO: 10975 - DNA, 1539 bp, Zea Mays
atggagcacacaaagactggggcgatgtcccacactgttcctattccttgttcaggtcgaggaacactgtattgttcagcgttcctggcttctgaggggttagacccagtaggccagtaccgaaggttcccacggtcagggacgaccctgccgttggtggtcgcgatggtgcggatgacccgcaaggcatcgtcggggcgtcgccgcaagaggtaccacctcggtgacttggagccgaacggcaagacagcgaagtcgagcgaggggagcgaggttgaaacaaaagaagtgaatgaacaagatagcagtagaggccatgcaacattatccaagaagagccagaatcctcagccagataattcattggtgaatcaagtggaagaagacgcctcagatgatgaaaatcacgaggattctagaaagggacgctctaaattggagcgatggacaagccacaaagagatagaatatagtaatatcgatgatgataatacagagacatttccgaccatcaaagctgatgttgaagccgatgagttgagaggctcaagagacgaagtgagcgtttcaaacttcccatgcctggcgagaaggatacgcctcaaagcaaaaaggtggataccgaagtgcagcctccccaaaatgaatctactgctgctgatatggaagtgaagcctgagcggccagctcggaagcggagatggactgggagttagttgaactagcataacgtttccacttttcagcagatttcatggcagatgcttgcgctttgccacgtttttcctcgtacagttgaaagttgaattgatgtatggttttactgtctagcatacacatgtacctgtaaacttagtttttttttgtgtggctgggaactggatactgtactaaaaccccatccattttcccactatgattctggtgacctcaatgtggcacaggagccactgtactccgggtaagttccgaggctgttatgggaagcagtggcctcggagtttcccagttgaatatctgggttcggcatgaactacattttgatgaagctggagtgcccctgctgcaaggttcttttgtttgaagttctggtggcctgaagcaccgggtcttgtaacaatcttgtgttggtgggagatacttgcaagatgtgatggttgaatgtttggcacgtgatgatgatgctgttttaggaaccaccaataggtgatagaaaccaggggctagagatttcagaactgacataatcacaaatttgtatgcttaatactatgttagtcatgtacattctgataaacgtataaatgtcgtgcatgatctaccggagtaaggtgtctaagactagtgtgtagagctccacggtgcactttttgggtcgagcaatacatatatatgtacctgtagagagtgttaggtagaaataacatgattgtttgcttgttgtaggtttgcggtgtatgtaactggttcgtgtagaattttgctaaccatagagttttgaatggcattatctaaatttattgaaatttagcatttcag

SEQ ID NO: 10976 - DNA, 3056 bp, Zea Mays
agctccgtagcgcacactccacgactcggcctcctcttcctcgcactattccgccgccgccgccgccgcctacaatcctccacctccccgggtcccgccgccgcgccgcgatggaggaagacgacgagttcggcgacctctacaccgacatcctcatccccactcagccccccacatccacgtccgcgttatccaaccctgttccagtcgaaaccctaccccgtccgcctccaaccctaatcctagccctgtggcggcggcggcggcggcgggggtggaggaagacgacgactggatcctaggagggagcgaccccatacccggggtcgacccgaccggcgactgggccgacgaggacgacgacgaaggcgaccctgcgccgcccgtgaagctgcccgccgctgataatgatctcgatccgctcatggggggtggtgcggaggattccgggccagccatccctgggctctcgtcgtcggcggcagctggtgcggccgggagcgaccaatgggacagcgatagcgaggacgacatccagatcgtgctcaacgagacagatggacgccgggggctcggggatgatgaaggagacgacgaagacggtgaggacctcgtcatcgtcgccgacggaccacacatcaccgggatcgacgagcaggattggggagaggacccagtagcggcaggggcagaaggagagcgaaaggacggaggtgatcctggtaagacggccgcggcacctggtggaaggatcgggtacagtggcggcggccaagggttccatcaacagcaccattccatgttcaagtatgtacgccctggcgctcctgttgcttcagcaggtggggtacctggtggtcctggtcagttccgccctgctggaccttcaggccctttctctggtcgtggtagaggtgactggaggcctgctgctggtcgaggcatgaataaaagttttcattcaggttatggaaccgctccatggggtggttcagggcgcggttttggtggcggactagatttcacacttcctcctcacaaacttttttaactttggccttgatgaagagaagtggaaagatttttgcaagcagctggaccaacttcgactagaatccacaatgcaatctagaatacgggtgtatgaaagtggccgctcagaacaggattatgacccagatttgccaccagagctagctgctgtgactggtcatccagacatctctgctgacaatcgcaataaaatggataacggccatacagattttagtgcccaaggaagaggtccggcaaacgtgcggacaccagtgatgacagggagacctatacaagttgaaactaattacacagaccggtttccatctattgattcacgctcacatcgaatgcgtgaatcatattctgttattgagattgtgtgccagggccgtgattcaatggatgatgagacagtggaccaaactgaaaaagattctcaaagaggttataaaggagtccatgatgttgaggagggtaagccatatccaacagataagattaataattctggtcataactcaaatttggtgataaagacagaacataagagacagccacctgtttcacctgaatgtgatatgttatccacggatgtcaatgctccctcccctcccagctacaagacaagaggttctcctcgtgaagcaaggttgaaacaaaagaagtgaatgaacaagatagcagtagaggccatgcaacattatccaagaagagccagaatcctcagccagataattcattggtgaatcaagtggaagaagacgcctcagatgatgaaaatcacgaggattctagaaagggacgctctaaattggagcgatggacaagccacaaagagatagaatatagtaatatcgatgatgataatacagagacatttccgaccatcaaagctgatgttgaagccgatgaggtgggtaaatctgaagtttctgctgcagttggcaattcagacatcaatagcaatgttgatactgggcaaacatctgataagagtgaccgacatctagacacagttgagaggctcaagagacgaagtgagcgtttcaaacttcccatgcctggcgagaaggatacgcctcaaagcaaaaaggtggataccgaagtgcagcctccccaaaatgaatctactgctgctgatatggaagtgaagcctgagcggccagctcggaagcggagatggactgggagttagttgaactagcataacgtttccacttttcagcagatttcatggcagatgcttgcgctttgccacgtttttcctcgtacagttgaaagttgaattgatgtatggttttactgtctagcatacacatgtacctgtaaacttagtttttttttgtgtggctgggaactggatactgtactaaaaccccatccattttcccactatgattctggtgacctcaatgtggcacaggagccactgtactccgggtaagttccgaggctgttatgggaagcagtggcctcggagtttcccagttgaatatctgggttcggcatgaactacattttgatgaagctggagtgcccctgctgcaaggttcttttgtttgaagttctggtggcctgaagcaccgggtcttgtaacaatcttgtgttggtgggagatacttgcaagatgtgatggttgaatgtttggcacgtgatgatgatgctgttttaggaaccaccaataggtgatagaaaccaggggctagagatttcagaactgacataatcacaaatttgtatgcttaatactatgttagtcatgtacattctgataaacgtataaatgtcgtgcatgatctaccggagtaaggtgtctaagactagtgtgtagagctccacggtgcactttttgggtcgagcaatacatatatatgtacctgtagagagtgttaggtagaaataacatgattgtttgcttgttgtaggtttgcggtgtatgtaactggttcgtgtagaattttgctaaccatagagttttgaatggcattatctaaatttattgaaatttagcatttcag

SEQ ID NO: 10977 - DNA, 3131 bp, Zea Mays
cagctccgtagcgcacactccacgactcggcctcctcttcctcgcactattccgccgccgccgccgccgcctacaatcctccacctccccgggtcccgccgccgcgccgcgatggaggaagacgacgagttcggcgacctctacaccgacatcctcatccccactcagccccccacatccacgtccgcgttatccaaccctgttccagtcgaaaccctaccccgtccgcctccaaccctaatcctagccctgtggcggcggcggcggcggcgggggtggaggaagacgacgactggatcctaggagggagcgaccccatacccggggtcgacccgaccggcgactgggccgacgaggacgacgacgaaggcgaccctgcgccgcccgtgaagctgcccgccgctgataatgatctcgatccgctcatggggggtggtgcggaggattccgggccagccatccctgggctctcgtcgtcggcggcagctggtgcggccgggagcgaccaatgggacagcgatagcgaggacgacatccagatcgtgctcaacgagacagatggacgccgggggctcggggatgatgaaggagacgacgaagacggtgaggacctcgtcatcgtcgccgacggaccacacatcaccgggatcgacgagcaggattggggagaggacccagtagcggcaggggcagaaggagagcgaaaggacggaggtgatcctggtaagacggccgcggcacctggtggaaggatcgggtacagtggcggcggccaagggttccatcaacagcaccattccatgttcaagtatgtacgccctggcgctcctgttgcttcagcaggtggggtacctggtggtcctggtcagttccgccctgctggaccttcaggccctttctctggtcgtggtagaggtgactggaggcctgctgctggtcgaggcatgaataaaagttttcattcaggttatggaaccgctccatggggtggttcagggcgcggttttggtggcggactagatttcacacttcctcctcacaagacaatatttgatattgatgtggaaaccacatttgaggataaaccgtggaaataccctggtgctgatatttcagacttttttaactttggccttgatgaagagaagtggaaagatttttgcaagcagctggaccaacttcgactagaatccacaatgcaatctagaatacgggtgtatgaaagtggccgctcagaacaggattatgacccagatttgccaccagagctagctgctgtgactggtcatccagacatctctgctgacaatcgcaataaaatggataacggccatacagattttagtgcccaaggaagaggtccggcaaacgtgcggacaccagtgatgacagggagacctatacaagttgaaactaattacacagaccggtttccatctattgattcacgctcacatcgaatgcgtgaatcatattctgttattgagattgtgtgccagggccgtgattcaatggatgatgagacagtggaccaaactgaaaaagattctcaaagaggttataaaggagtccatgatgttgaggagggtaagccatatccaacagataagattaataattctggtcataactcaaatttggtgataaagacagaacataagagacagccacctgtttcacctgaatgtgatatgttatccacggatgtcaatgctccctcccctcccagctacaagacaagaggttctcctcgtgaagcaaggttgaaacaaaagaagtgaatgaacaagatagcagtagaggccatgcaacattatccaagaagagccagaatcctcagccagataattcattggtgaatcaagtggaagaagacgcctcagatgatgaaaatcacgaggattctagaaagggacgctctaaattggagcgatggacaagccacaaagagatagaatatagtaatatcgatgatgataatacagagacatttccgaccatcaaagctgatgttgaagccgatgaggtgggtaaatctgaagtttctgctgcagttggcaattcagacatcaatagcaatgttgatactgggcaaacatctgataagagtgaccgacatctagacacagttgagaggctcaagagacgaagtgagcgtttcaaacttcccatgcctggcgagaaggatacgcctcaaagcaaaaaggtggataccgaagtgcagcctccccaaaatgaatctactgctgctgatatggaagtgaagcctgagcggccagctcggaagcggagatggactgggagttagttgaactagcataacgtttccacttttcagcagatttcatggcagatgcttgcgctttgccacgtttttcctcgtacagttgaaagttgaattgatgtatggttttactgtctagcatacacatgtacctgtaaacttagtttttttttgtgtggctgggaactggatactgtactaaaaccccatccattttcccactatgattctggtgacctcaatgtggcacaggagccactgtactccgggtaagttccgaggctgttatgggaagcagtggcctcggagtttcccagttgaatatctgggttcggcatgaactacattttgatgaagctggagtgcccctgctgcaaggttcttttgtttgaagttctggtggcctgaagcaccgggtcttgtaacaatcttgtgttggtgggagatacttgcaagatgtgatggttgaatgtttggcacgtgatgatgatgctgttttaggaaccaccaataggtgatagaaaccaggggctagagatttcagaactgacataatcacaaatttgtatgcttaatactatgttagtcatgtacattctgataaacgtataaatgtcgtgcatgatctaccggagtaaggtgtctaagactagtgtgtagagctccacggtgcactttttgggtcgagcaatacatatatatgtacctgtagagagtgttaggtagaaataacatgattgtttgcttgttgtaggtttgcggtgtatgtaactggttcgtgtagaattttgctaaccatagagttttgaatggcattatctaaatttattgaaatttagcatttcag

SEQ ID NO: 10978 - DNA, 2789 bp, Zea Mays
agctccgtagcgcacactccacgactcggcctcctcttcctcgcactattccgccgccgccgccgccgcctacaatcctccacctccccgggtcccgccgccgcgccgcgatggaggaagacgacgagttcggcgacctctacaccgacatcctcatccccactcagccccccacatccacgtccgcgttatccaaccctgttccagtcgaaaccctaccccgtccgcctccaaccctaatcctagccctgtggcggcggcggcggcggcgggggtggaggaagacgacgactggatcctaggagggagcgaccccatacccggggtcgacccgaccggcgactgggccgacgaggacgacgacgaaggcgaccctgcgccgcccgtgaagctgcccgccgctgataatgatctcgatccgctcatggggggtggtgcggaggattccgggccagccatccctgggctctcgtcgtcggcggcagctggtgcggccgggagcgaccaatgggacagcgatagcgaggacgacatccagatcgtgctcaacgagacagatggacgccgggggctcggggatgatgaaggagacgacgaagacggtgaggacctcgtcatcgtcgccgacggaccacacatcaccgggatcgacgagcaggattggggagaggacccagtagcggcaggggcagaaggagagcgaaaggacggaggtgatcctggtaagacggccgcggcacctggtggaaggatcgggtacagtggcggcggccaagggttccatcaacagcaccattccatgttcaaggtatgtacgccctggcgctcctgttgcttcagcaggtggggtacctggtggtcctggtcagttccgccctgctggaccttcaggccctttctctggtcgtggtagaggtgactggaggcctgctgctggtcgaggcatgaataaaagttttcattcaggttatggaaccgctccatggggtggttcagggcgcggttttggtggcggactagatttcacacttcctcctcacaagacaatatttgatattgatgtggaaaccacatttgaggataaaccgtggaaataccctggtgctgatatttcagacttttttaactttggccttgatgaagagaagtggaaagatttttgcaagcagctggaccaacttcgactagaatccacaatgcaatctagaatacgggtgtatgaaagtggccgctcagaacaggattatgacccagatttgccaccagagctagctgctgtgactggtcatccagacatctctgctgacaatcgcaataaaatggataacggccatacagattttagtgcccaaggaagaggtccggcaaacgtgcggacaccagtgatgacagggagacctatacaagttgaaactaattacacagaccggtttccatctattgattcacgctcacatcgaatgcgtgaatcatattctgttattgagattgtgtgccagggccgtgattcaatggatgatgagacagtggaccaaactgaaaaagattctcaaagaggttataaaggagtccatgatgttgaggagggtaagccatatccaacagataagattaataattctggtcataactcaaatttggtgataaagacagaacataagagacagccacctgtttcacctgaatgtgatatgttatccacggatgtcaatgctccctcccctcccagctacaagacaagaggttctcctcgtgaagcaaggtcattgaaaggaagttcactgagtcagaattctattcgggaaattgaaagctctaacgacataatacctcatcaaatatcttcagagagacgccatgattcccggaatgagaaccttgttgagggcgattcagaaggatcacttgctgctaatgataacacgacagataaactgagtacagaagatcattttgatggtggtggtggtgatgatgatgatgccacattggttggtagtgttgaagtggatggtgatgatgctactttagaccccaacatgcctagtgatgcaaatgaggatgatgacctggttcactctgataaaaagcagaaacatatagctggggttgagcaacctactggacacaatggcagtgaacctgttgaattgagaactaatgaaaatagtaaagggatgtctggaagcagcaaagatcagcagaaacgccttgaattgggtgaagaggttcttcaagataggcaatcaaggagagtaaataatgcaagaaggcatcatgacgcagaagaacacaatcttcgccggaaagatgagtactcacgagatgtaaaatcagatttggaaagatcacatttaccctccagaggcagggaagatatccaccaatcttatgtaaacagagatcgtgttgacatgcggggtaggagttatgataaggtaagagagacagaaattttgccaaggagagatgatggtgttcacagccgacgagctaaagaagaagatttgaggctggagtacaatgttgaaggtggtgcaaggcatagaaataagatgaggcccattgataggaatgatagagatgaagatctttcacggaagcgtttggatgatggcgagtggaggggatctcggcaaagagagcgtggtgatgtggttttgaatcgccgtgaaagtttggacgattctcatatcaagagaaataaggacgatgagaacttgcggaggttgaagcctgaaaatgaagacatggtcatggcacatggtcatagagcaagagatataaaa

SEQ ID NO: 10979 - DNA, 2656 bp, Zea Mays
ctgactattagtaactcggaatagtacctaataagcagctccgtagcgcacactccacgactcggcctcctcttcctcgcactattccgccgccgccgccgccgcctacaatcctccacctccccgggtcccgccgccgcgccgcgatggaggaagacgacgagttcggcgacctctacaccgacatcctcatccccactcagccccccacatccacgtccgcgttatccaaccctgttccagtcgaaaccctaccccgtccgcctccaaccctaatcctagccctgtggcggcggcggcggcggcgggggtggaggaagacgacgactggatcctaggagggagcgaccccatacccggggtcgacccgaccggcgactgggccgacgaggacgacgacgaaggcgaccctgcgccgcccgtgaagctgcccgccgctgataatgatctcgatccgctcatggggggtggtgcggaggattccgggccagccatccctgggctctcgtcgtcggcggcagctggtgcggccgggagcgaccaatgggacagcgatagcgaggacgacatccagatcgtgctcaacgagacagatggacgccgggggctcggggatgatgaaggagacgacgaagacggtgaggacctcgtcatcgtcgccgacggaccacacatcaccgggatcgacgagcaggattggggagaggacccagtagcggcaggggcagaaggagagcgaaaggacggaggtgatcctggtaagacggccgcggcacctggtggaaggatcgggtacagtggcggcggccaagggttccatcaacagcaccattccatgttcaagtatgtacgccctggcgctcctgttgcttcagcaggtggggtacctggtggtcctggttatggaaccgctccatggggtggttcagggcgcggttttggtggcggactagatttcacacttcctcctcacaagacaatatttgatattgatgtggaaaccacatttgaggataaaccgtggaaataccctggtgctgatatttcagacttttttaactttggccttgatgaagagaagtggaaagatttttgcaagcagctggaccaacttcgactagaatccacaatgcaatctagaatacgggtgtatgaaagtggccgctcagaacaggattatgacccagatttgccaccagagctagctgctgtgactggtcatccagacatctctgctgacaatcgcaataaaatggataacggccatacagattttagtgcccaaggaagaggtccggcaaacgtgcggacaccagtgatgacagggagacctatacaagttgaaactaattacacagaccggtttccatctattgattcacgctcacatcgaatgcgtgaatcatattctgttattgagattgtgtgccagggccgtgattcaatggatgatgagacagtggaccaaactgaaaaagattctcaaagaggttataaaggagtccatgatgttgaggaggaacataagagacagccacctgtttcacctgaatgtgatatgttatccacggatgtcaatgctccctcccctcccagctacaagacaagaggttctcctcgtgaagcaaggtcattgaaaggaagttcactgagtcagaattctattcgggaaattgaaagctctaacgacataatacctcatcaaatatcttcagagagacgccatgattcccggaatgagaaccttgttgagggcgattcagaaggatcacttgctgctaatgataacacgacagataaactgagtacagaagatcattttgatggtggtggtggtgatgatgatgatgccacattggttggtagtgttgaagtggatggtgatgatgctactttagaccccaacatgcctagtgatgcaaatgaggatgatgacctggttcactctgataaaaagcagaaacatatagctggggttgagcaacctactggacacaatggcagtgaacctgttgaattgagaactaatgaaaatagtaaagggatgtctggaagcagcaaagatcagcagaaacgccttgaattgggtgaagaggttcttcaagataggcaatcaaggagagtaaataatgcaagaaggcatcatgacgcagaagaacacaatcttcgccggaaagatgagtactcacgagatgtaaaatcagatttggaaagatcacatttaccctccagaggcagggaagatatccaccaatcttatgtaaacagagatcgtgttgacatgcggggtaggagttatgataaggtaagagagacagaaattttgccaaggagagatgatggtgttcacagccgacgagctaaagaagaagatttgaggctggagtacaatgttgaaggtggtgcaaggcatagaaataagatgaggcccattgataggaatgatagagatgaagatctttcacggaagcgtttggatgatggcgagtggaggggatctcggcaaagagagcgtggtgatgtggttttgaatcgccgtgaaagtttggacgattctcatatcaagagaaataaggacgatgagaacttgcggaggttgaagcctgaaaatgaagacatggtcatggcacatggtcatagagcaagagatataaaa

SEQ ID NO: 10980 - DNA, 2896 bp, Zea Mays
cgacgatattatcgggttctcgatgagaagccgattttatggttgtttagtaggatttcacgataaatccgagctagagtcgtccaaatagccgtgcgaaaggggctgtgtaaacatctagctaactataacaattgatttattagctgactattagtaactcggaatagtacctaataagcagctccgtagcgcacactccacgactcggcctcctcttcctcgcactattccgccgccgccgccgccgcctacaatcctccacctccccgggtcccgccgccgcgccgcgatggaggaagacgacgagttcggcgacctctacaccgacatcctcatccccactcagccccccacatccacgtccgcgttatccaaccctgttccagtcgaaaccctaccccgtccgcctccaaccctaatcctagccctgtggcggcggcggcggcggcgggggtggaggaagacgacgactggatcctaggagggagcgaccccatacccggggtcgacccgaccggcgactgggccgacgaggacgacgacgaaggcgaccctgcgccgcccgtgaagctgcccgccgctgataatgatctcgatccgctcatggggggtggtgcggaggattccgggccagccatccctgggctctcgtcgtcggcggcagctggtgcggccgggagcgaccaatgggacagcgatagcgaggacgacatccagatcgtgctcaacgagacagatggacgccgggggctcggggatgatgaaggagacgacgaagacggtgaggacctcgtcatcgtcgccgacggaccacacatcaccgggatcgacgagcaggattggggagaggacccagtagcggcaggggcagaaggagagcgaaaggacggaggtgatcctggtaagacggccgcggcacctggtggaaggatcgggtacagtggcggcggccaagggttccatcaacagcaccattccatgttcaagtatgtacgccctggcgctcctgttgcttcagcaggtggggtacctggtggtcctggtcagttccgccctgctggaccttcaggccctttctctggtcgtggtagaggtgactggaggcctgctgctggtcgaggcatgaataaaagttttcattcaggttatggaaccgctccatggggtggttcagggcgcggttttggtggcggactagatttcacacttcctcctcacaaacttttttaactttggccttgatgaagagaagtggaaagatttttgcaagcagctggaccaacttcgactagaatccacaatgcaatctagaatacgggtgtatgaaagtggccgctcagaacaggattatgacccagatttgccaccagagctagctgctgtgactggtcatccagacatctctgctgacaatcgcaataaaatggataacggccatacagattttagtgcccaaggaagaggtccggcaaacgtgcggacaccagtgatgacagggagacctatacaagttgaaactaattacacagaccggtttccatctattgattcacgctcacatcgaatgcgtgaatcatattctgttattgagattgtgtgccagggccgtgattcaatggatgatgagacagtggaccaaactgaaaaagattctcaaagaggttataaaggagtccatgatgttgaggagggtaagccatatccaacagataagattaataattctggtcataactcaaatttggtgataaagacagaacataagagacagccacctgtttcacctgaatgtgatatgttatccacggatgtcaatgctccctcccctcccagctacaagacaagaggttctcctcgtgaagcaaggtcattgaaaggaagttcactgagtcagaattctattcgggaaattgaaagctctaacgacataatacctcatcaaatatcttcagagagacgccatgattcccggaatgagaaccttgttgagggcgattcagaaggatcacttgctgctaatgataacacgacagataaactgagtacagaagatcattttgatggtggtggtggtgatgatgatgatgccacattggttggtagtgttgaagtggatggtgatgatgctactttagaccccaacatgcctagtgatgcaaatgaggatgatgacctggttcactctgataaaaagcagaaacatatagctggggttgagcaacctactggacacaatggcagtgaacctgttgaattgagaactaatgaaaatagtaaagggatgtctggaagcagcaaagatcagcagaaacgccttgaattgggtgaagaggttcttcaagataggcaatcaaggagagtaaataatgcaagaaggcatcatgacgcagaagaacacaatcttcgccggaaagatgagtactcacgagatgtaaaatcagatttggaaagatcacatttaccctccagaggcagggaagatatccaccaatcttatgtaaacagagatcgtgttgacatgcggggtaggagttatgataaggtaagagagacagaaattttgccaaggagagatgatggtgttcacagccgacgagctaaagaagaagatttgaggctggagtacaatgttgaaggtggtgcaaggcatagaaataagatgaggcccattgataggaatgatagagatgaagatctttcacggaagcgtttggatgatggcgagtggaggggatctcggcaaagagagcgtggtgatgtggttttgaatcgccgtgaaagtttggacgattctcatatcaagagaaataaggacgatgagaacttgcggaggttgaagcctgaaaatgaagacatggtcatggcacatggtcatagagcaagagatataaaa

SEQ ID NO: 10981 - DNA, 2015 bp, Zea Mays
atcagatgcgcgctcttccttgcatctcgtgccactccagctaatttatgacctgtgctgagctttggagcagctagtaattaagcctagagcgctagcagtccttttggatttcggttcggaagcaaggcgtgccggactcccaaatcccaatcccaagcaagcagtgtgcagatggcaacgcagtggttctccaacatggtgatggacgagccgagctttttccaccagtggcagtccgacacgctgctggagcagtacacggagcagcagatcgcggtggcgttcggccagggggagccggtggaccacgccgtggcggcggccctggcgacggcgatgcccatgcagctgcagcagcccgcggcggccgagcagccgcaccaccgcccgcgcaaggcggccaaggtcaacaccagctgggactcgtgcatcacggagcagggctcccccgccgcggactcctcctcgccgaccatcctctccttcggcggccacaccgcgttcgccaaggcggagccgacgacgcaccagccgcccagctgcgccgggtactacggcgccgccgccgccgccgcgaaggcgccgaagcaggagatgatggacgccgccgcgatgccgccgttccagcaggcgcgcccggccaagcgttcctacgacgacatggccgcggtggccgaggccgccaacgcgccgtccgccaacacgcgcccggcctcccagaaccaggaccacatcttggccgagcggaagcgccgcgagaagctcagccagcgcttcatcgccctctccaagatcgtccctggcctcaagaagatggacaaggcatcggtgctcggcgacgcgatcaagtacgtgaagcagctgcaggaccaggtgaaggggctggaggacgacgcccggcggcgcccggtcgaggcggcggtgctggtcaagaagtcccagctgtcggccgacgacgacgagggctcctcctgcgacgagaacttcgttgccaccgaggcttccggcactctgccggagatcgaggcccgggtgtcggaccgcacagtgctggtcaggatccactgcgagaaccgcaagggggtgctcatcgccgccctctctgaggtcgagcgccttggcctctccatcatgaacaccaatgtgctccccttcacagcctcctccctcgacatcaccatcatggccatggctggtgacgacttctgctggtctgtcaaggatattgtcaagaagctaaatcaagcgttcaaatcatccttctgatgggtttagcttctgaccaaacttaatctaggccaacctttttttccattagccttaaggatttgaggctaatggtaatgttttcaggttcttccttgccttgcttccgaagagagttgcttgctgtcccccaacagtgcccccccaaagatagccatttccactgttttttgctgcatgggtgcagaggtttattacctagttacccaacatcctattttctctccctccagttttttacatggtttgatcctgtcactccatgtttttgggagggagcagattgtaaaaaaaaacaaaaaaagtgaccagcctttttctagggctttgctatataggccggggagctcctaattttcctctctcccctttgccagtatgtttgccctttcaccttgtttttccatgagaggattgtgtttgtcaaacacacaaaaaaaaccctacctttgccgtcctctcaatcttgatcacactgctcccaggaaagcttcaattgtggagaaaatggcgccatctttttttcagctctgagggggactttgcaagccttgatttggaagtactgtaggggtgccacttccttttttttttgagggtcctacaggttggccaccacttgatggaccctttgcttatagttccacatgtgagctttgttgtcacaggatcaatgtgtagttgttgctgtttactctcacacaagcataaaaataaataaatgtgctagtttgttacctttcatg

SEQ ID NO: 10982 - DNA, 2029 bp, Zea Mays
ctgccattgtgaacgaaagggaccaggctatacgccccctctcctccaatccaatctccacaggacctgtgctgagctttggagcagctagtaattaagcctagagcgctagcagtccttttggatttcggttcggaagcaaggcgtgccggactcccaaatcccaatcccaagcaagcagtgtgcagatggcaacgcagtggttctccaacatggtgatggacgagccgagctttttccaccagtggcagtccgacacgctgctggagcagtacacggagcagcagatcgcggtggcgttcggccagggggagccggtggaccacgccgtggcggcggccctggcgacggcgatgcccatgcagctgcagcagcccgcggcggccgagcagccgcaccaccgcccgcgcaaggcggccaaggtcaacaccagctgggactcgtgcatcacggagcagggctcccccgccgcggactcctcctcgccgaccatcctctccttcggcggccacaccgcgttcgccaaggcggagccgacgacgcaccagccgcccagctgcgccgggtactacggcgccgccgccgccgccgcgaaggcgccgaagcaggagatgatggacgccgccgcgatgccgccgttccagcaggcgcgcccggccaagcgttcctacgacgacatggccgcggtggccgaggccgccaacgcgccgtccgccaacacgcgcccggcctcccagaaccaggaccacatcttggccgagcggaagcgccgcgagaagctcagccagcgcttcatcgccctctccaagatcgtccctggcctcaagaagatggacaaggcatcggtgctcggcgacgcgatcaagtacgtgaagcagctgcaggaccaggtgaaggggctggaggacgacgcccggcggcgcccggtcgaggcggcggtgctggtcaagaagtcccagctgtcggccgacgacgacgagggctcctcctgcgacgagaacttcgttgccaccgaggcttccggcactctgccggagatcgaggcccgggtgtcggaccgcacagtgctggtcaggatccactgcgagaaccgcaagggggtgctcatcgccgccctctctgaggtcgagcgccttggcctctccatcatgaacaccaatgtgctccccttcacagcctcctccctcgacatcaccatcatggccatggctggtgacgacttctgctggtctgtcaaggatattgtcaagaagctaaatcaagcgttcaaatcatccttctgatgggtttagcttctgaccaaacttaatctaggccaacctttttttccattagccttaaggatttgaggctaatggtaatgttttcaggttcttccttgccttgcttccgaagagagttgcttgctgtcccccaacagtgcccccccaaagatagccatttccactgttttttgctgcatgggtgcagaggtttattacctagttacccaacatcctattttctctccctccagttttttacatggtttgatcctgtcactccatgtttttgggagggagcagattgtaaaaaaaaacaaaaaaagtgaccagcctttttctagggctttgctatataggccggggagctcctaattttcctctctcccctttgccagtatgtttgccctttcaccttgtttttccatgagaggattgtgtttgtcaaacacacaaaaaaaaccctacctttgccgtcctctcaatcttgatcacactgctcccaggaaagcttcaattgtggagaaaatggcgccatctttttttcagctctgagggggactttgcaagccttgatttggaagtactgtaggggtgccacttccttttttttttgagggtcctacaggttggccaccacttgatggaccctttgcttatagttccacatgtgagctttgttgtcacaggatcaatgtgtagttgttgctgtttactctcacacaagcataaaaataaataaatgtgctagtttgttacctttcatg

SEQ ID NO: 10983 - DNA, 703 bp, Zea Mays
cacgctgctgaatcaaagtctttgcgcttttggcttttgtgataatattgtttgttctattccatcgcatcgcgaaaatcttgtacgcatctgacaattcgcaagagaattcctccgtctccgcctcgcggagggaaagggcgactcgccgactccgagcacccagcaggagggaaagggcgtttcctctccggctctccatcccggtcacccgtcgcaccaccctcctcgtcgctgcttcatcgcgtcccccgtcgtctggtggtgtgcaatctcgggctgctgaatctatcggagacttgggtcgctcctcaggtgggtctgagtacccgtcggcagacagggagaacaaaaaagatgttggaggcaggaagcaagcgaatcagagagacggtaagagaggtgtttaatcgcgcgcatgggtgggctccggtgacaagaagtatcacatggtgaattggcagctgagagtggtcgactgtagacaattaagtaagtgtttggtaagacttagttgatctaaataaggttgtaagtctggattcctgtgtccctgatcacttttttggtgttgctctattgggatgtagccatgtgccatccttgttgaatgcgcgggcttcgtgtcctgtgttggttgtaaaaactctatcgttctatttcttaatgaaatagggggcactgcccttttggtcaaaaaaaa

SEQ ID NO: 10984 - DNA, 694 bp, Zea Mays
ctccttttgcgtgttcacgctgctgaatcaaagtctttgcgcttttggcttttgtgataatattgtttgttctattccatcgcatcgcgaaaatcttgtacgcatctgacaattcgcaagagaattcctccgtctccgcctcgcggagggaaagggcgactcgccgactccgagcacccagcaggagggaaagggcgtttcctctccggctctccatcccggtcacccgtcgcaccaccctcctcgtcgctgcttcatcgcgtcccccgtcgtctggtggtgtgcaatctcgggctgctgaatctatcggagacttgggtcgctcctcagacagggagaacaaaaaagatgttggaggcaggaagcaagcgaatcagagagacggtaagagaggtgtttaatcgcgcgcatgggtgggctccggtgacaagaagtatcacatggtgaattggcagctgagagtggtcgactgtagacaattaagtaagtgtttggtaagacttagttgatctaaataaggttgtaagtctggattcctgtgtccctgatcacttttttggtgttgctctattgggatgtagccatgtgccatccttgttgaatgcgcgggcttcgtgtcctgtgttggttgtaaaaactctatcgttctatttcttaatgaaatagggggcactgcccttttggtcaaaaaaaa

SEQ ID NO: 10985 - DNA, 1645 bp, Zea Mays
aaagcagaaatcattcacgcatcggtccaccgagccacaccacaccaccgtctcgcggagaaactcctccaaaacccccaaaccctttcaatcggcggcaatggcggcgccggtggccgacgatgcctcggcatccccaggctacgtcctccgctccacacttgaggggcaccgccgcgccgtatcaacagttaagttctccccggatggccgccttctcgcctccgcctccgccgacaagcttcttcgcgtgtggtcttcctccgatctcacccccgttgcggagctcgagggccatggagagggtgtctcagacctctctttctcccccgacggccgcctccttgcctccgcctccgatgatcgcaccgtccgcatctgggacctcgccgtcggcggaggggcccgcctcgtcaagacgctcacgggccacaccaactacgccttctgcgtctccttcagcccccatggcaacgtcctcgcctccgggtcctttgacgagacggtgcgcgtgtgggaggtcaggtccggtaagtgcctccgcgtgctgccggcccattctgaacccgtcaccgccgtggacttcgatcgcgagggcgacatgattgtgtcagggagctacgacgggctctgccgcgtctgggactcggccaccggtcactgcgtcaaaaccctcatcgacgacgagagcccaccagtgtcctttgccaagttctcccccaatggcaagtttatcctcgcggcaacgcttgacagcaccttgaggctttggaatttctcagctggaaagtttctgaagacatataccggacatgttaacacaaagtactgcatcccagcggcgttttctatcacgaatagcaagtatattgtcagtggctccgaggacaaatgtgtctacctatgggacctccagtcaagaagaatagtgcagaaactggaaggccatactgatactgtcattgcggtctcatgtcatcccaaggaaaacatgatcgcatccggggcgcttgacaatgacaagaccgtgaaagtttgggtccaaaaggaagaagattgatgagcggcctggttacgctcttatctacattggctgtcatgtggactgactaatgcagctcggcgatgatattagtgaactcaagtgttctgtagagctattcctgggaggctgggatcatttgtgcatcgcgttggattgtcccacataaaccctgcctaacctgcgcagcccggcccggccaagattaggcagcagattgggtcgccccgatctggccgcttgggagtcactagaatgaactgcatcggccatgcaagcaacaagctagagtcatcaaagccaaatattggtcacagtctaaacgctttcgttgcatccagtcaatggcctaactatgctgccgcgggtccggatggagtaaacggtatacccgggattatggcttatggatctacttgtgaaagaaaatgagaaatatctttgcatgttgagtaggctgtgttgggcttatctgcttacagatgaatgggctacttttctttcttttaattgtatggtaacggcccattttcttgtaacacttgacgtcttgacatatataaactgcaacgcgtgagtccgggtaatctgactacccgtttt

SEQ ID NO: 10986 - DNA, 998 bp, Zea Mays
ctcgtcaccctcgtcgccatcctcgccctcatcgaactcagcaccgacctcctcgtagtccttctcgagcgccgccaggtcctcacgggcctcagagaactcaccctcatcaaactcagcaccaacctcctcgtagtccttctcgagcgctgccagatcctcacgggcctcagagaactcgccctcctccataccctcaccgacataccagtgcacgaaggcacgcttggcgtacatgaggtcgaacttgtggtcgatgcgggagaacacctccacaacactggtggagttggagatcatgcacacagcgcgctgcaccttggccaggtcaccaccaggcaccacacttggaggctggtagttaatgccgcacttaaagccagttgggcaccagtccacaaactggatggtgcgcttggtcttgatggtggccacagcagcattcacatccttggggaccacatcaccacggtacatgaggcagcaggccatgtacttaccatggcggggatcgcacttggccatcatggaggatggctcgaaggcgctgttggtgatctcggccacagacagctgctcgtggtaggccttctcagcagagatgactggagcataggaggaaagcatgaagtggatcctcgggtagggcaccaagttggtctggaactcattcacatccacgttaagagcaccatcgaacctcagggaggcagtcagggatgagatgacctgggacacaagcctgttgaggttggtggacaggacactgttgtatggctcaaccactgaggtcgaaacttggggggatgggtacacagtgaaaccaagcttagacttcttgccgtagtcaacagacagacgctccaggaggagggaaccaaggccagagcctgttcctccgccaacagcgttgaagacgaggaagccctggagaccagtgcagttgtcggcaagcttcctgatgcgatcaaggcacaggtcaacaatctccttgccaa

SEQ ID NO: 10987 - DNA, 1049 bp, Zea Mays
ctactattcacactatatggccaaatagtattttatttttcattgggcaatcctagattttggaatgaataccttgcactgtgtaacttgagctaccgtgcatttaccatgtgagagagtttggtcaatctgataaagccctgttgattcatcagtggtggcaagtgcaacagcaacattcgtgatgatgttctcctcctccctctctgtggtggagttttacttcctgcacagattccccctgccttttgctggctacctcatcttcatttccatattggctggattctggggccagtgtttggttaggaagatcgtgcatgtgctcaagagagcatcgcttattgtcttcatcctctcctctgttatcttcgtcagtgctcttacgatgggtgtcgttggaacccagaagagcatttcgatgatcaacaatcacgaatatatggggttcctcaacttctgcgagtaactcaaacaccatcagactgtcgatccgtccgggagaatccaggccaatgcctaattgacctcatctccctcaaaatctagaagaataaagtcgccgagtatgtgcacaagttagctcctcgccaacatgtgcgcatttagaccgacagagtcgctgtagtgaattcagctcgtgttagctcctggctaacgagctgaccatacggctttagttttgtgaagtgggcgcgatttcgtcatgtcatgcatgtgttagctcctggctaacctgcaaatgcgtgtgttggtgcaggtttttgtcacgtctgcgtcagctcctggctgaccagcagttgtttgtcgttcattctctgcgtcagctcctggctgaccagcagttatttgttgttcattcttgcgctagcaccaggctaggctgcaaaactgcaaatatttgttgcatggaacattgtaaatatcagtcaattcccattctgtttgtgcaagccgagtgcgtttcaagccgtatttccgtgaaaatcagaacatgttcgctgcggcttccaccgacttctgttttttctacagtatttttattatag

SEQ ID NO: 10988 - DNA, 938 bp, Zea Mays
cattgggcagcccaagattttgtaatggatacctttcttgcattgtgtggcaagtgcaacagcaacattcgtgatgatgttctcctcctccctctctgtggtggagttttacttcctgcacagattccccctgccttttgctggctacctcatcttcatttccatattggctggattctggggccagtgtttggttaggaagatcgtgcatgtgctcaagagagcatcgcttattgtcttcatcctctcctctgttatcttcgtcagtgctcttacgatgggtgtcgttggaacccagaagagcatttcgatgatcaacaatcacgaatatatggggttcctcaacttctgcgagtaactcaaacaccatcagactgtcgatccgtccgggagaatccaggccaatgcctaattgacctcatctccctcaaaatctagaagaataaagtcgccgagtatgtgcacaagttagctcctcgccaacatgtgcgcatttagaccgacagagtcgctgtagtgaattcagctcgtgttagctcctggctaacgagctgaccatacggctttagttttgtgaagtgggcgcgatttcgtcatgtcatgcatgtgttagctcctggctaacctgcaaatgcgtgtgttggtgcaggtttttgtcacgtctgcgtcagctcctggctgaccagcagttgtttgtcgttcattctctgcgtcagctcctggctgaccagcagttatttgttgttcattcttgcgctagcaccaggctaggctgcaaaactgcaaatatttgttgcatggaacattgtaaatatcagtcaattcccattctgtttgtgcaagccgagtgcgtttcaagccgtatttccgtgaaaatcagaacatgttcgctgcggcttccaccgacttctgttttttctacagtatttttattatag

SEQ ID NO: 10989 - DNA, 908 bp, Zea Mays
cgcggacaaagtgcaggtggcaagtgcaacagcaacattcgtgatgatgttctcctcctccctctctgtggtggagttttacttcctgcacagattccccctgccttttgctggctacctcatcttcatttccatattggctggattctggggccagtgtttggttaggaagatcgtgcatgtgctcaagagagcatcgcttattgtcttcatcctctcctctgttatcttcgtcagtgctcttacgatgggtgtcgttggaacccagaagagcatttcgatgatcaacaatcacgaatatatggggttcctcaacttctgcgagtaactcaaacaccatcagactgtcgatccgtccgggagaatccaggccaatgcctaattgacctcatctccctcaaaatctagaagaataaagtcgccgagtatgtgcacaagttagctcctcgccaacatgtgcgcatttagaccgacagagtcgctgtagtgaattcagctcgtgttagctcctggctaacgagctgaccatacggctttagttttgtgaagtgggcgcgatttcgtcatgtcatgcatgtgttagctcctggctaacctgcaaatgcgtgtgttggtgcaggtttttgtcacgtctgcgtcagctcctggctgaccagcagttgtttgtcgttcattctctgcgtcagctcctggctgaccagcagttatttgttgttcattcttgcgctagcaccaggctaggctgcaaaactgcaaatatttgttgcatggaacattgtaaatatcagtcaattcccattctgtttgtgcaagccgagtgcgtttcaagccgtatttccgtgaaaatcagaacatgttcgctgcggcttccaccgacttctgttttttctacagtatttttattatag

SEQ ID NO: 10990 - DNA, 2201 bp, Zea Mays
gtctggctccccgtgaccgatctcgtaatctcatccgcacccgcctggccgccttgcctagccttgcctgctctcctcatgccctggccgccgcctataaaagagcgaggcggaggggcaggcgccggccgttcttctctctccttcttcctcggtcctctcctctccgcatttcgggcggccacttgtggcggcgtagctagcgtactacagctccctgcatggtgatggaggggcgcacgggctcactctacggccgcctcaacaagagcagcacgcgggggttcctcgcctacaccgccgccggggctgcctgcgcggctgtcctcgcctgcttcgtgctctccgccgcggactcgccggcatctgcggcgcgcaacgatggcgagcgcctccgcctgtcctcgcgctcaccgcgcgtctggcccgacctcgcgttcaactggcgggtggtggtcgccaccgtcgtcgggttcctcggttccgcgtttggcaccgtcggcggcgtcggcggaggcgggatcttcgtgcccatgctcaacctcgtcgtcggcttcgacaccaaatccgccgccgcgctctccaaatgcatgatcatgggggcctcggcgtcatcagtttggtacaacctccaggtgtcgcacccgaccaaggaggcgcccgtcatcgactacaagctcgcgttgctcttccagcccatgcttatgctcggcataaccatcggcgtagagctcagcgtcatcttcccatactggctaatcactgtcctcattataatcctcttcgtaggcacctcgtcgagatccttctacaagggcattctgatgtggagggaggagtccaggattctgatggagacacgcgggcgagaagagcaatccaagtctacctgcgctgcaagtgatgtggtcattgatcccagttatggggagcccctcctgactcaacctcagcccaagaagtctgcatgggagactttcatgttcaatctgaggtggaagaatatccttgtgttaatgtctgtctggtcattgttcttggtgctgcaagttctcaagaataattcaaaatcatgcagctctttctactgggtgataaacgttctacaggttccagttgcggtaagtgtgttcttgtgggaggccatgcagttatgtagggagagtcatgcacgacgtatgaatgggaacctggaatgtgtgtgtgaggcctctattgagtggtcaccagcacaactgatcttttgtgccttttgtggccttctcggtgggactgttggtggccttcttggatctggtggtgggttcatccttggcccacttcttcttgagcttgggtgcataccgcaggtggcaagtgcaacagcaacattcgtgatgatgttctcctcctccctctctgtgctggctacctcatcttcatttccatattggctggattctggggccagtgtttggttaggaagatcgtgcatgtgctcaagagagcatcgcttattgtcttcatcctctcctctgttatcttcgtcagtgctcttacgatgggtgtcgttggaacccagaagagcatttcgatgatcaacaatcacgaatatatggggttcctcaacttctgcgagtaactcaaacaccatcagactgtcgatccgtccgggagaatccaggccaatgcctaattgacctcatctccctcaaaatctagaagaataaagtcgccgagtatgtgcacaagttagctcctcgccaacatgtgcgcatttagaccgacagagtcgctgtagtgaattcagctcgtgttagctcctggctaacgagctgaccatacggctttagttttgtgaagtgggcgcgatttcgtcatgtcatgcatgtgttagctcctggctaacctgcaaatgcgtgtgttggtgcaggtttttgtcacgtctgcgtcagctcctggctgaccagcagttgtttgtcgttcattctctgcgtcagctcctggctgaccagcagttatttgttgttcattcttgcgctagcaccaggctaggctgcaaaactgcaaatatttgttgcatggaacattgtaaatatcagtcaattcccattctgtttgtgcaagccgagtgcgtttcaagccgtatttccgtgaaaatcagaacatgttcgctgcggcttccaccgacttctgttttttctacagtatttttattatag

SEQ ID NO: 10991 - DNA, 2279 bp, Zea Mays
caaaatcgaaacacgcctccccctcctcgtctggctccccgtgaccgatctcgtaatctcatccgcacccgcctggccgccttgcctagccttgcctgctctcctcatgccctggccgccgcctataaaagagcgaggcggaggggcaggcgccggccgttcttctctctccttcttcctcggtcctctcctctccgcatttcgggcggccacttgtggcggcgtagctagcgtactacagctccctgcatggtgatggaggggcgcacgggctcactctacggccgcctcaacaagagcagcacgcgggggttcctcgcctacaccgccgccggggctgcctgcgcggctgtcctcgcctgcttcgtgctctccgccgcggactcgccggcatctgcggcgcgcaacgatggcgagcgcctccgcctgtcctcgcgctcaccgcgcgtctggcccgacctcgcgttcaactggcgggtggtggtcgccaccgtcgtcgggttcctcggttccgcgtttggcaccgtcggcggcgtcggcggaggcgggatcttcgtgcccatgctcaacctcgtcgtcggcttcgacaccaaatccgccgccgcgctctccaaatgcatgatcatgggggcctcggcgtcatcagtttggtacaacctccaggtgtcgcacccgaccaaggaggcgcccgtcatcgactacaagctcgcgttgctcttccagcccatgcttatgctcggcataaccatcggcgtagagctcagcgtcatcttcccatactggctaatcactgtcctcattataatcctcttcgtaggcacctcgtcgagatccttctacaagggcattctgatgtggagggaggagtccaggattctgatggagacacgcgggcgagaagagcaatccaagtctacctgcgctgcaagtgatgtggtcattgatcccagttatggggagcccctcctgactcaacctcagcccaagaagtctgcatgggagactttcatgttcaatctgaggtggaagaatatccttgtgttaatgtctgtctggtcattgttcttggtgctgcaagttctcaagaataattcaaaatcatgcagctctttctactgggtgataaacgttctacaggttccagttgcggtaagtgtgttcttgtgggaggccatgcagttatgtagggagagtcatgcacgacgtatgaatgggaacctggaatgtgtgtgtgaggcctctattgagtggtcaccagcacaactgatcttttgtgccttttgtggccttctcggtgggactgttggtggccttcttggatctggtggtgggttcatccttggcccacttcttcttgagcttgggtgcataccgcaggtggcaagtgcaacagcaacattcgtgatgatgttctcctcctccctctctgtggtggagttttacttcctgcacagattccccctgccttttggtaaatccatctggctacctcatcttcatttccatattggctggattctggggccagtgtttggttaggaagatcgtgcatgtgctcaagagagcatcgcttattgtcttcatcctctcctctgttatcttcgtcagtgctcttacgatgggtgtcgttggaacccagaagagcatttcgatgatcaacaatcacgaatatatggggttcctcaacttctgcgagtaactcaaacaccatcagactgtcgatccgtccgggagaatccaggccaatgcctaattgacctcatctccctcaaaatctagaagaataaagtcgccgagtatgtgcacaagttagctcctcgccaacatgtgcgcatttagaccgacagagtcgctgtagtgaattcagctcgtgttagctcctggctaacgagctgaccatacggctttagttttgtgaagtgggcgcgatttcgtcatgtcatgcatgtgttagctcctggctaacctgcaaatgcgtgtgttggtgcaggtttttgtcacgtctgcgtcagctcctggctgaccagcagttgtttgtcgttcattctctgcgtcagctcctggctgaccagcagttatttgttgttcattcttgcgctagcaccaggctaggctgcaaaactgcaaatatttgttgcatggaacattgtaaatatcagtcaattcccattctgtttgtgcaagccgagtgcgtttcaagccgtatttccgtgaaaatcagaacatgttcgctgcggcttccaccgacttctgttttttctacagtatttttattatag

SEQ ID NO: 10992 - DNA, 2266 bp, Zea Mays
ccaaaatcgaaacacgcctccccctcctcgtctggctccccgtgaccgatctcgtaatctcatccgcacccgcctggccgccttgcctagccttgcctgctctcctcatgccctggccgccgcctataaaagagcgaggcggaggggcaggcgccggccgttcttctctctccttcttcctcggtcctctcctctccgcatttcgggcggccacttgtggcggcgtagctagcgtactacagctccctgcatggtgatggaggggcgcacgggctcactctacggccgcctcaacaagagcagcacgcgggggttcctcgcctacaccgccgccggggctgcctgcgcggctgtcctcgcctgcttcgtgctctccgccgcggactcgccggcatctgcggcgcgcaacgatggcgagcgcctccgcctgtcctcgcgctcaccgcgcgtctggcccgacctcgcgttcaactggcgggtggtggtcgccaccgtcgtcgggttcctcggttccgcgtttggcaccgtcggcggcgtcggcggaggcgggatcttcgtgcccatgctcaacctcgtcgtcggcttcgacaccaaatccgccgccgcgctctccaaatgcatgatcatgggggcctcggcgtcatcagtttggtacaacctccaggtgtcgcacccgaccaaggaggcgcccgtcatcgactacaagctcgcgttgctcttccagcccatgcttatgctcggcataaccatcggcgtagagctcagcgtcatcttcccatactggctaatcactgtcctcattataatcctcttcgcacctcgtcgagatccttctacaagggcattctgatgtggagggaggagtccaggattctgatggagacacgcgggcgagaagagcaatccaagtctacctgcgctgcaagtgatgtggtcattgatcccagttatggggagcccctcctgactcaacctcagcccaagaagtctgcatgggagactttcatgttcaatctgaggtggaagaatatccttgtgttaatgtctgtctggtcattgttcttggtgctgcaagttctcaagaataattcaaaatcatgcagctctttctactgggtgataaacgttctacaggttccagttgcggtaagtgtgttcttgtgggaggccatgcagttatgtagggagagtcatgcacgacgtatgaatgggaacctggaatgtgtgtgtgaggcctctattgagtggtcaccagcacaactgatcttttgtgccttttgtggccttctcggtgggactgttggtggccttcttggatctggtggtgggttcatccttggcccacttcttcttgagcttgggtgcataccgcaggtggcaagtgcaacagcaacattcgtgatgatgttctcctcctccctctctgtggtggagttttacttcctgcacagattccccctgccttttgctggctacctcatcttcatttccatattggctggattctggggccagtgtttggttaggaagatcgtgcatgtgctcaagagagcatcgcttattgtcttcatcctctcctctgttatcttcgtcagtgctcttacgatgggtgtcgttggaacccagaagagcatttcgatgatcaacaatcacgaatatatggggttcctcaacttctgcgagtaactcaaacaccatcagactgtcgatccgtccgggagaatccaggccaatgcctaattgacctcatctccctcaaaatctagaagaataaagtcgccgagtatgtgcacaagttagctcctcgccaacatgtgcgcatttagaccgacagagtcgctgtagtgaattcagctcgtgttagctcctggctaacgagctgaccatacggctttagttttgtgaagtgggcgcgatttcgtcatgtcatgcatgtgttagctcctggctaacctgcaaatgcgtgtgttggtgcaggtttttgtcacgtctgcgtcagctcctggctgaccagcagttgtttgtcgttcattctctgcgtcagctcctggctgaccagcagttatttgttgttcattcttgcgctagcaccaggctaggctgcaaaactgcaaatatttgttgcatggaacattgtaaatatcagtcaattcccattctgtttgtgcaagccgagtgcgtttcaagccgtatttccgtgaaaatcagaacatgttcgctgcggcttccaccgacttctgttttttctacagtatttttattatag

SEQ ID NO: 10993 - DNA, 1871 bp, Zea Mays
cagtgagcatggtgcgtgtcccgcgggcgacgagcttcaactctacggcggtagggaaggcactcccctcgtcatagacaagggcacactatttagcgccaccacattcggctaccggccgccacgagggcgcctccgtgcagaaaattggcgttttgcggcaaagcacttcatcaagaaacaccctgaagacgtggttgttcactgcagtgggtgcaactcagcagctcgaacctttgatggagttgatgtgatggggagaagattggcagacgaggtggcttctattgttgacagtagaccggagctttgcaagatttcctttgttgcgcattcattgggtggactaattgcaagatatgctattgcattattatatgagagcgagacacaaaaagattctcatgaaaagtttgagaaccatgctgttgactattctagtaaccagcacagcaaagggaaaattgttggtttggagcctattaacttcatcacttttgcaacaccacacctcggtacaatatcacacaaacaggattttgtatagtattgttgatcatatttatacaggggagtgggtactaattataaactgagttctataaagaaggtaatcagttagatgcttcattttcctcaataaatttgttcctattggtgctacaacataaggtgtccttgttttcttttatttgactcacatgacatgattgttctggtgtactaaatgcatgtacttgtttcctcatatcaatactagtaccccgtgttacttcttcataaatgtcacgtatttacaatcccaaatgctatagttcaaccatggccttttatatcactgagctagtaaagataatggcgtttattctctgtgacttcagaaaaaaatctaagataacccgtatggtaacggatcaaagagtataagtttataatgctacaggtctcatggctgcatagccatgaagaatccacatatttgactgattcggtttctgttatgcactggcagataccacttcttcgtggttccaacaaattagaaaagatggcgtatcgtttgtcttggattgctgggagaagtggaaaacatctcttcctgaaagatatggaagatgagaaaccaccacttcttctacagatggttactgattatggtggtctccatttcatgtcagctctccgctctttcaagcggcgtgttgcttactccaatgtttgtaatgactttatcgttggctggaggacatcatcaattcgtcgtcaacacgagcttcctgagccccgaagttttataaacaacaatagatatccacacattgtatatgtggaagggccaaaagttgaggatgttgattttttggatgcgatgatttacgaggcaaaaacgactagtgaaatggaagaggtgatgctcaaaggtctgaatagagtttcatgggaaagggtagatgttagcttcaaaaaaagtagacaaaggattttcgctcatagcactattcaggtcaagacctatttcttgaactccgatggagctgacgtgatcaaccacatgatcgaccattttgtttattaagatgggtgtactaagttggtaccaagttctctttgtcgatcgattctcggccaaagaggaacatgtgggaaatgttcttgttttgaagacaggattagagttatactgaaggagtagaacccactgtaaagtgtaaaggggtatcttatctctacccttcttgataattttgggccgtttaggttcttttcttcccttttcagaattcagaatctcagttgttttgtacccatatactggaccagaatttgttctccaaatacaaagatatttgctgcgtatttgcttctccgaa

SEQ ID NO: 10994 - DNA, 1270 bp, Zea Mays
cagtgagcatggtgcgtgtcccgcgggcgacgagcttcaactctacggcggtagggaaggcactcccctcgtcatagacaagggcacactatttagcgccaccacattcggctaccggccgccacgagggcgcctccgtgcagaaaattggcgttttgcggcaaagcacttcatcaagaaacaccctgaagacgtggttgttcactgcagtgggtgcaactcagcagctcgaacctttgatggagttgatgtgatggggagaagattggcagacgaggtggcttctattgttgacagtagaccggagctttgcaagatttcctttgttgcgcattcattgggtggactaattgcaagatatgctattgcattattatatgagagcgagacacaaaaagattctcatgaaaagtttgagaaccatgctgttgactattctagtaaccagcacagcaaagggaaaattgttggtttggagcctattaacttcatcacttttgcaacaccacacctcggtacaatatcacacaaacagataccacttcttcgtggttccaacaaattagaaaagatggcgtatcgtttgtcttggattgctgggagaagtggaaaacatctcttcctgaaagatatggaagatgagaaaccaccacttcttctacagatggttactgattatggtggtctccatttcatgtcagctctccgctctttcaagcggcgtgttgcttactccaatgtttgtaatgactttatcgttggctggaggacatcatcaattcgtcgtcaacacgagcttcctgagaggtgatgctcaaaggtctgaatagagtttcatgggaaagggtagatgttagcttcaaaaaaagtagacaaaggattttcgctcatagcactattcaggtcaagacctatttcttgaactccgatggagctgacgtgatcaaccacatgatcgaccattttgtttattaagatgggtgtactaagttggtaccaagttctctttgtcgatcgattctcggccaaagaggaacatgtgggaaatgttcttgttttgaagacaggattagagttatactgaaggagtagaacccactgtaaagtgtaaaggggtatcttatctctacccttcttgataattttgggccgtttaggttcttttcttcccttttcagaattcagaatctcagttgttttgtacccatatactggaccagaatttgttctccaaatacaaagatatttgctgcgtatttgcttctccgaa

SEQ ID NO: 10995 - DNA, 1266 bp, Zea Mays
cagtgagcatggtgcgtgtcccgcgggcgacgagcttcaactctacggcggtagggaaggcactcccctcgtcatagacaagggcacactatttagcgccaccacattcggctaccggccgccacgagggcgcctccgtgcagaaaattggcgttttgcggcaaagcacttcatcaagaaacaccctgaagacgtggttgttcacttgggtgcaactcagcagctcgaacctttgatggagttgatgtgatggggagaagattggcagacgaggtggcttctattgttgacagtagaccggagctttgcaagatttcctttgttgcgcattcattgggtggactaattgcaagatatgctattgcattattatatgagagcgagacacaaaaagattctcatgaaaagtttgagaaccatgctgttgactattctagtaaccagcacagcaaagggaaaattgttggtttggagcctattaacttcatcacttttgcaacaccacacctcggtacaatatcacacaaacagataccacttcttcgtggttccaacaaattagaaaagatggcgtatcgtttgtcttggattgctgggagaagtggaaaacatctcttcctgaaagatatggaagatgagaaaccaccacttcttctacagatggttactgattatggtggtctccatttcatgtcagctctccgctctttcaagcggcgtgttgcttactccaatgtttgtaatgactttatcgttggctggaggacatcatcaattcgtcgtcaacacgagcttcctgagaggtgatgctcaaaggtctgaatagagtttcatgggaaagggtagatgttagcttcaaaaaaagtagacaaaggattttcgctcatagcactattcaggtcaagacctatttcttgaactccgatggagctgacgtgatcaaccacatgatcgaccattttgtttattaagatgggtgtactaagttggtaccaagttctctttgtcgatcgattctcggccaaagaggaacatgtgggaaatgttcttgttttgaagacaggattagagttatactgaaggagtagaacccactgtaaagtgtaaaggggtatcttatctctacccttcttgataattttgggccgtttaggttcttttcttcccttttcagaattcagaatctcagttgttttgtacccatatactggaccagaatttgttctccaaatacaaagatatttgctgcgtatttgcttctccgaa

SEQ ID NO: 10996 - DNA, 1747 bp, Zea Mays
cagtgagcatggtgcgtgtcccgcgggcgacgagcttcaactctacggcggtagggaaggcactcccctcgtcatagacaagggcacactatttagcgccaccacattcggctaccggccgccacgagggcgcctccgtgcagaaaattggcgttttgcggcaaagcacttcatcaagaaacaccctgaagacgtggttgttcactgcagtgggtgcaactcagcagctcgaacctttgatggagttgatgtgatggggagaagattggcagacgaggtggcttctattgttgacagtagaccggagctttgcaagatttcctttgttgcgcattcattgggtggactaattgcaagatatgctattgcattattatatgagagcgagacacaaaaagattctcatgaaaagtttgagaaccatgctgttgactattctagtaaccagcacagcaaagggaaaattgttggtttggagcctattaacttcatcacttttgcaacaccacacctcggtacaatatcacacaaacaggattttgtatagtattgttgatcatatttatacaggggagtgggtactaattataaactgagttctataaagaaggtaatcagttagatgcttcattttcctcaataaatttgttcctattggtgctacaacataaggtgtccttgttttcttttatttgactcacatgacatgattgttctggtgtactaaatgcatgtacttgtttcctcatatcaatactagtaccccgtgttacttcttcataaatgtcacgtatttacaatcccaaatgctatagttcaaccatggccttttatatcactgagctagtaaagataatggcgtttattctctgtgacttcagaaaaaaatctaagataacccgtatggtaacggatcaaagagtataagtttataatgctacaggtctcatggctgcatagccatgaagaatccacatatttgactgattcggtttctgttatgcactggcagataccacttcttcgtggttccaacaaattagaaaagatggcgtatcgtttgtcttggattgctgggagaagtggaaaacatctcttcctgaaagatatggaagatgagaaaccaccacttcttctacagatggttactgattatggtggtctccatttcatgtcagctctccgctctttcaagcggcgtgttgcttactccaatgtttgtaatgactttatcgttggctggaggacatcatcaattcgtcgtcaacacgagcttcctgagaggtgatgctcaaaggtctgaatagagtttcatgggaaagggtagatgttagcttcaaaaaaagtagacaaaggattttcgctcatagcactattcaggtcaagacctatttcttgaactccgatggagctgacgtgatcaaccacatgatcgaccattttgtttattaagatgggtgtactaagttggtaccaagttctctttgtcgatcgattctcggccaaagaggaacatgtgggaaatgttcttgttttgaagacaggattagagttatactgaaggagtagaacccactgtaaagtgtaaaggggtatcttatctctacccttcttgataattttgggccgtttaggttcttttcttcccttttcagaattcagaatctcagttgttttgtacccatatactggaccagaatttgttctccaaatacaaagatatttgctgcgtatttgcttctccgaa

SEQ ID NO: 10997 - DNA, 1409 bp, Zea Mays
caagggcacatttccctttcagtgagcatggtgcgtgtcccgcgggcgacgagcttcaactctacggcggtagggaaggcactcccctcgtcatagacaagggcacactatttagcgccaccacattcggctaccggccgccacgagggcgcctccgtgcagaaaattggcgttttgcggcaaagcacttcatcaagaaacaccctgaagacgtggttgttcacttgggtgcaactcagcagctcgaacctttgatggagttgatgtgatggggagaagattggcagacgaggtggcttctattgttgacagtagaccggagctttgcaagatttcctttgttgcgcattcattgggtggactaattgcaagatatgctattgcattattatatgagagcgagacacaaaaagattctcatgaaaagtttgagaaccatgctgttgactattctagtaaccagcacagcaaagggaaaattgttggtttggagcctattaacttcatcacttttgcaacaccacacctcggtacaatatcacacaaacagataccacttcttcgtggttccaacaaattagaaaagatggcgtatcgtttgtcttggattgctgggagaagtggaaaacatctcttcctgaaagatatggaagatgagaaaccaccacttcttctacagatggttactgattatggtggtctccatttcatgtcagctctccgctctttcaagcggcgtgttgcttactccaatgtttgtaatgactttatcgttggctggaggacatcatcaattcgtcgtcaacacgagcttcctgagccccgaagttttataaacaacaatagatatccacacattgtatatgtggaagggccaaaagttgaggatgttgattttttggatgcgatgatttacgaggcaaaaacgactagtgaaatggaagaggtgatgctcaaaggtctgaatagagtttcatgggaaagggtagatgttagcttcaaaaaaagtagacaaaggattttcgctcatagcactattcaggtcaagacctatttcttgaactccgatggagctgacgtgatcaaccacatgatcgaccattttgtttattaagatgggtgtactaagttggtaccaagttctctttgtcgatcgattctcggccaaagaggaacatgtgggaaatgttcttgttttgaagacaggattagagttatactgaaggagtagaacccactgtaaagtgtaaaggggtatcttatctctacccttcttgataattttgggccgtttaggttcttttcttcccttttcagaattcagaatctcagttgttttgtacccatatactggaccagaatttgttctccaaatacaaagatatttgctgcgtatttgcttctccgaa

SEQ ID NO: 10998 - DNA, 3079 bp, Zea Mays
atggtgctgccggcattgcccaacgcccatacagtcctcctcctcttcgcctccatggcgtggtcccaggaggaggcgtctagccgcatagccgagccccacgcatcctcgtacatgacggctcgaacgagtgtggatcgaagagaccgggtgggagcagagcagctggtgagagccacaggagatgatggagcgttctgtgtcaccttctgcatcgtggatgaactaggaatccagggtggattcatttactggagatcacactgccccaagggctatcctgaaagtgctccttcaatctctgcggacataccatatctcccaaaaatacagtggtcaaaaagctcaagatcaaaacatgttctttggcgactccaagcggtgacggttgctgcatcctgttgcatattgacgcatgccagcccgactccttaccagagtgcgagaacaccccagctgcagcggagccttccattccgtgtgcctcagagactggctgcgcttcgtcaccacgaccaggcagtacggccgttcgatgcccctgttcgggaactctgccccttaccgcagcgttcccgtggccgtcaagatcaccggccactaacaccaaacttccaagttttggtcggcgtttacaaggtcaggcaggcgatcgtaaccacccattttaaggtcaccttcgattttgttccatgtcacagagaagggaaaaagaaagaggagactagcagccagctaggatgtgccgtgcccgtgcgtgaaaatgcagcaggcatggaaagccagcaggcggatgactctgactcacatggatctagggcgcctagcatacatactttactgcaggaccgcagagcgctgaatagaagcacctgctgcgcaagcgcaagtccaaaagactcccttgcaagtcttggtctggaccgtggacggcttccagaatccagactccctgcacggcgtgcacgcgcctacataagaaaaaagatccgtggccccagcacccgcggccgagtcagagccccagtcccagagggagggggaaatggcgagcggggacgggaagaagcagagcagacggcagcggcggcggcggcagctgtgggcggcgtgcctcccgcggccggggtgcttcacggtgtccgccgccgacgagggcccgtcggctcacggtgccggcgagggggagagcaagcccaagcccacgcatctggtcgtcacggtcaatgggatcgtcggaagtgcagaaaattggcgttttgcggcaaagcacttcatcaagaaacaccctgaagacgtggttgttcacttgggtgcaactcagcagctcgaacctttgatggagttgatgtgatggggagaagattggcagacgaggtggcttctattgttgacagtagaccggagctttgcaagatttcctttgttgcgcattcattgggtggactaattgcaagatatgctattgcattattatatgagagcgagacacaaaaagattctcatgaaaagtttgagaaccatgctgttgactattctagtaaccagcacagcaaagggaaaattgttggtttggagcctattaacttcatcacttttgcaacaccacacctcggtacaatatcacacaaacaggttaggttaaaaaatttcaagcacttataatttggaagttggtgttgaattattttcttttgtaacctgcgtattgtggtatagttgtgatataatccatgttgaatttgtaggattttgtatagtattgttgatcatatttatacaggggagtgggtactaattataaactgagttctataaagaaggtaatcagttagatgcttcattttcctcaataaatttgttcctattggtgctacaacataaggtgtccttgttttcttttatttgactcacatgacatgattgttctggtgtactaaatgcatgtacttgtttcctcatatcaatactagtaccccgtgttacttcttcataaatgtcacgtatttacaatcccaaatgctatagttcaaccatggccttttatatcactgagctagtaaagataatggcgtttattctctgtgacttcagaaaaaaatctaagataacccgtatggtaacggatcaaagagtataagtttataatgctacaggtctcatggctgcatagccatgaagaatccacatatttgactgattcggtttctgttatgcactggcagataccacttcttcgtggttccaacaaattagaaaagatggcgtatcgtttgtcttggattgctgggagaagtggaaaacatctcttcctgaaagatatggaagatgagaaaccaccacttcttctacagatggttactgattatggtggtctccatttcatctctccgctctttcaagcggcgtgttgcttactccaatgtttgtaatgactttatcgttggctggaggacatcatcaattcgtcgtcaacacgagcttcctgagccccgaagttttataaacaacaatagatatccacacattgtatatgtggaagggccaaaagttgaggatgttgattttttggatgcgatgatttacgaggcaaaaacgactagtgaaatggaagaggtgatgctcaaaggtctgaatagagtttcatgggaaagggtagatgttagcttcaaaaaaagtagacaaaggattttcgctcatagcactattcaggtcaagacctatttcttgaactccgatggagctgacgtgatcaaccacatgatcgaccattttgtttattaagatgggtgtactaagttggtaccaagttctctttgtcgatcgattctcggccaaagaggaacatgtgggaaatgttcttgttttgaagacaggattagagttatactgaaggagtagaacccactgtaaagtgtaaaggggtatcttatctctacccttcttgataattttgggccgtttaggttcttttcttcccttttcagaattcagaatctcagttgttttgtacccatatactggaccagaatttgttctccaaatacaaagatatttgctgcgtatttgcttctccgaa

SEQ ID NO: 10999 - DNA, 2494 bp, Zea Mays
atggtgctgccggcattgcccaacgcccatacagtcctcctcctcttcgcctccatggcgtggtcccaggaggaggcgtctagccgcatagccgagccccacgcatcctcgtacatgacggctcgaacgagtgtggatcgaagagaccgggtgggagcagagcagctggtgagagccacaggagatgatggagcgttctgtgtcaccttctgcatcgtggatgaactaggaatccagggtggattcatttactggagatcacactgccccaagggctatcctgaaagtgctccttcaatctctgcggacataccatatctcccaaaaatacagtggtcaaaaagctcaagatcaaaacatgttctttggcgactccaagcggtgacggttgctgcatcctgttgcatattgacgcatgccagcccgactccttaccagagtgcgagaacaccccagctgcagcggagccttccattccgtgtgcctcagagactggctgcgcttcgtcaccacgaccaggcagtacggccgttcgatgcccctgttcgggaactctgccccttaccgcagcgttcccgtggccgtcaagatcaccggccactaacaccaaacttccaagttttggtcggcgtttacaaggtcaggcaggcgatcgtaaccacccattttaaggtcaccttcgattttgttccatgtcacagagaagggaaaaagaaagaggagactagcagccagctaggatgtgccgtgcccgtgcgtgaaaatgcagcaggcatggaaagccagcaggcggatgactctgactcacatggatctagggcgcctagcatacatactttactgcaggaccgcagagcgctgaatagaagcacctgctgcgcaagcgcaagtccaaaagactcccttgcaagtcttggtctggaccgtggacggcttccagaatccagactccctgcacggcgtgcacgcgcctacataagaaaaaagatccgtggccccagcacccgcggccgagtcagagccccagtcccagagggagggggaaatggcgagcggggacgggaagaagcagagcagacggcagcggcggcggcggcagctgtgggcggcgtgcctcccgcggccggggtgcttcacggtgtccgccgccgacgagggcccgtcggctcacggtgccggcgagggggagagcaagcccaagcccacgcatctggtcgtcacggtcaatgggatcgtcggaagtgcagaaaattggcgttttgcggcaaagcacttcatcaagaaacaccctgaagacgtggttgttcacttgggtgcaactcagcagctcgaacctttgatggagttgatgtgatggggagaagattggcagacgaggtggcttctattgttgacagtagaccggagctttgcaagatttcctttgttgcgcattcattgggtggactaattgcaagatatgctattgcattattatatgagagcgagacacaaaaagattctcatgaaaagtttgagaaccatgctgttgactattctagtaaccagcacagcaaagggaaaattgttggtttggagcctattaacttcatcacttttgcaacaccacacctcggtacaatatcacacaaacagataccacttcttcgtggttccaacaaattagaaaagatggcgtatcgtttgtcttggattgctgggagaagtggaaaacatctcttcctgaaagatatggaagatgagaaaccaccacttcttctacagatggttactgattatggtggtctccatttcatgtcagctctccgctctttcaagcggcgtgttgcttactccaatgtttgtaatgactttatcgttggctggaggacatcatcaattcgtcgtcaacacgagcttcctgagccccgaagttttataaacaacaatagatatccacacattgtatatgtggaagggccaaaagttgaggatgttgattttttggatgcgatgatttacgaggcaaaaacgactagtgaaatggaagaggtgatgctcaaaggtctgaatagagtttcatgggaaagggtagatgttagcttcaaaaaaagtagacaaaggattttcgctcatagcactattcaggtcaagacctatttcttgaactccgatggagctgacgtgatcaaccacatgatcgaccattttgtttattaagatgggtgtactaagttggtaccaagttctctttgtcgatcgattctcggccaaagaggaacatgtgggaaatgttcttgttttgaagacaggattagagttatactgaaggagtagaacccactgtaaagtgtaaaggggtatcttatctctacccttcttgataattttgggccgtttaggttcttttcttcccttttcagaattcagaatctcagttgttttgtacccatatactggaccagaatttgttctccaaatacaaagatatttgctgcgtatttgcttctccgaa

SEQ ID NO: 11000 - DNA, 2654 bp, Zea Mays
gaaagaaacaggatctgcccatacgcacaccagccttgccgagatctgtctgcccgcttgctgcctacttctcatccatgcatggtgctgccggcattgcccaacgcccatacagtcctcctcctcttcgcctccatggcgtggtcccaggaggaggcgtctagccgcatagccgagccccacgcatcctcgtacatgacggctcgaacgagtgtggatcgaagagaccgggtgggagcagagcagctggtgagagccacaggagatgatggagcgttctgtgtcaccttctgcatcgtggatgaactaggaatccagggtggattcatttactggagatcacactgccccaagggctatcctgaaagtgctccttcaatctctgcggacataccatatctcccaaaaatacagtggtcaaaaagctcaagatcaaaacatgttctttggcgactccaagcggtgacggttgctgcatcctgttgcatattgacgcatgccagcccgactccttaccagagtgcgagaacaccccagctgcagcggagccttccattccgtgtgcctcagagactggctgcgcttcgtcaccacgaccaggcagtacggccgttcgatgcccctgttcgggaactctgccccttaccgcagcgttcccgtggccgtcaagatcaccggccactaacaccaaacttccaagttttggtcggcgtttacaaggtcaggcaggcgatcgtaaccacccattttaaggtcaccttcgattttgttccatgtcacagagaagggaaaaagaaagaggagactagcagccagctaggatgtgccgtgcccgtgcgtgaaaatgcagcaggcatggaaagccagcaggcggatgactctgactcacatggatctagggcgcctagcatacatactttactgcaggaccgcagagcgctgaatagaagcacctgctgcgcaagcgcaagtccaaaagactcccttgcaagtcttggtctggaccgtggacggcttccagaatccagactccctgcacggcgtgcacgcgcctacataagaaaaaagatccgtggccccagcacccgcggccgagtcagagccccagtcccagagggagggggaaatggcgagcggggacgggaagaagcagagcagacggcagcggcggcggcggcagctgtgggcggcgtgcctcccgcggccggggtgcttcacggtgtccgccgccgacgagggcccgtcggctcacggtgccggcgagggggagagcaagcccaagcccacgcatctggtcgtcacggtcaatgggatcgtcggaagtgcagaaaattggcgttttgcggcaaagcacttcatcaagaaacaccctgaagacgtggttgttcactgcagtgggtgcaactcagcagctcgaacctttgatggagttgatgtgatggggagaagattggcagacgaggtggcttctattgttgacagtagaccggagctttgcaagatttcctttgttgcgcattcattgggtggactaattgcaagatatgctattgcattattatatgagagcgagacacaaaaagattctcatgaaaagtttgagaaccatgctgttgactattctagtaaccagcacagcaaagggaaaattgttggtttggagcctattaacttcatcacttttgcaacaccacacctcggtacaatatcacacaaacaggattttgtatagtattgttgatcatatttatacaggggagtgggtactaattataaactgagttctataaagaagataccacttcttcgtggttccaacaaattagaaaagatggcgtatcgtttgtcttggattgctgggagaagtggaaaacatctcttcctgaaagatatggaagatgagaaaccaccacttcttctacagatggttactgattatggtggtctccatttcatgtcagctctccgctctttcaagcggcgtgttgcttactccaatgtttgtaatgactttatcgttggctggaggacatcatcaattcgtcgtcaacacgagcttcctgagccccgaagttttataaacaacaatagatatccacacattgtatatgtggaagggccaaaagttgaggatgttgattttttggatgcgatgatttacgaggcaaaaacgactagtgaaatggaagaggtgatgctcaaaggtctgaatagagtttcatgggaaagggtagatgttagcttcaaaaaaagtagacaaaggattttcgctcatagcactattcaggtcaagacctatttcttgaactccgatggagctgacgtgatcaaccacatgatcgaccattttgtttattaagatgggtgtactaagttggtaccaagttctctttgtcgatcgattctcggccaaagaggaacatgtgggaaatgttcttgttttgaagacaggattagagttatactgaaggagtagaacccactgtaaagtgtaaaggggtatcttatctctacccttcttgataattttgggccgtttaggttcttttcttcccttttcagaattcagaatctcagttgttttgtacccatatactggaccagaatttgttctccaaatacaaagatatttgctgcgtatttgcttctccgaa

SEQ ID NO: 11001 - DNA, 2679 bp, Zea Mays
ctcactttgaatttttctactagtcttggataaacatcagaaagccaatttaacagaaacataggaaccaaattaggctaactgaggaaaggggacaagagaaagaaacaggatctgcccatacgcacaccagccttgccgagatctgtctgcccgcttgctgcctacttctcatccatgcatggtgctgccggcattgcccaacgcccatacagtcctcctcctcttcgcctccatggcgtggtcccaggaggaggcgtctagccgcatagccgagccccacgcatcctcgtacatgacggctcgaacgagtgtggatcgaagagaccgggtgggagcagagcagctggtgagagccacaggagatgatggagcgttctgtgtcaccttctgcatcgtggatgaactaggaatccagggtggattcatttactggagatcacactgccccaagggctatcctgaaagtgctccttcaatctctgcggacataccatatctcccaaaaatacagtggtcaaaaagctcaagatcaaaacatgttctttggcgactccaagcggtgacggttgctgcatcctgttgcatattgacgcatgccagcccgactccttaccagagtgcgagaacaccccagctgcagcggagccttccattccgtgtgcctcagagactggctgcgcttcgtcaccacgaccaggcagtacggccgttcgatgcccctgttcgggaactctgccccttaccgcagcgttcccgtggccgtcaagatcaccggccactaacaccaaacttccaagttttggtcggcgtttacaaggtcaggcaggcgatcgtaaccacccattttaaggtcaccttcgattttgttccatgtcacagagaagggaaaaagaaagaggagactagcagccagctaggatgtgccgtgcccgtgcgtgaaaatgcagcaggcatggaaagccagcaggcggatgactctgactcacatggatctagggcgcctagcatacatactttactgcaggaccgcagagcgctgaatagaagcacctgctgcgcaagcgcaagtccaaaagactcccttgcaagtcttggtctggaccgtggacggcttccagaatccagactccctgcacggcgtgcacgcgcctacataagaaaaaagatccgtggccccagcacccgcggccgagtcagagccccagtcccagagggagggggaaatggcgagcggggacgggaagaagcagagcagacggcagcggcggcggcggcagctgtgggcggcgtgcctcccgcggccggggtgcttcacggtgtccgccgccgacgagggcccgtcggctcacggtgccggcgagggggagagcaagcccaagcccacgcatctggtcgtcacggtcaatgggatcgtcggaagtgcagaaaattggcgttttgcggcaaagcacttcatcaagaaacaccctgaagacgtggttgttcactgcagtgggtgcaactcagcagctcgaacctttgatggagttgatgtgatggggagaagattggcagacgaggtggcttctattgttgacagtagaccggagctttgcaagatttcctttgttgcgcattcattgggtggactaattgcaagatatgctattgcattattatatgagagcgagacacaaaaagattctcatgaaaagtttgagaaccatgctgttgactattctagtaaccagcacagcaaagggaaaattgttggtttggagcctattaacttcatcacttttgcaacaccacacctcggtacaatatcacacaaacagataccacttcttcgtggttccaacaaattagaaaagatggcgtatcgtttgtcttggattgctgggagaagtggaaaacatctcttcctgaaagatatggaagatgagaaaccaccacttcttctacagatggttactgattatggtggtctccatttcatgtcagctctccgctctttcaagcggcgtgttgcttactccaatgtttgtaatgactttatcgttggctggaggacatcatcaattcgtcgtcaacacgagcttcctgagccccgaagttttataaacaacaatagatatccacacattgtatatgtggaagggccaaaagttgaggatgttgattttttggatgcgatgatttacgaggcaaaaacgactagtgaaatggaagaggtgatgctcaaaggtctgaatagagtttcatgggaaagggtagatgttagcttcaaaaaaagtagacaaaggattttcgctcatagcactattcaggtcaagacctatttcttgaactccgatggagctgacgtgatcaaccacatgatcgaccattttgtttattaagatgggtgtactaagttggtaccaagttctctttgtcgatcgattctcggccaaagaggaacatgtgggaaatgttcttgttttgaagacaggattagagttatactgaaggagtagaacccactgtaaagtgtaaaggggtatcttatctctacccttcttgataattttgggccgtttaggttcttttcttcccttttcagaattcagaatctcagttgttttgtacccatatactggaccagaatttgttctccaaatacaaagatatttgctgcgtatttgcttctccgaa

SEQ ID NO: 11002 - DNA, 892 bp, Zea Mays
ccgggtgtcacgagtttccgtttgtctcgaggctcttctgaggaggatcaagaaggtagcggaggagagaccgagctccctgaagttgatgcacatggtgtggaccaagagctgaagcaccatctcctgaagaaatacagtggctatctaagctcgctcaagcaagaactgtcaaagaagaagaagaaagggaagctccccaaggaggctcgccagcagctccttagctggtgggatcagcactacaaatggccttacccctcagagactcagaaggtggcactggctgagtctaccgggcttgacctgaagcagatcaacaactggttcatcaaccagcggaagcggcactggaagccatccgaggagatgcaccacctgatgatggacgggtaccacaccaccaatgccttctacatggacggccacttcatcaacgacggcgggctgtaccggctcggctagccaccggtatctcgcttccatttcacaccccacggcctagctataaagactaatggttccaggtgtctgaagtactgaagacaggggggctagctatctaatgtttgtgccgcacgcatgagctgtaaggaggccatgcttaattattctgttgccgttgctactctatctatatgcgcctatgcctccgtgcatgaactatgctttaggtggttgctgctccacactgtggtggtgtgcttttgcttttgtgtggtcgtattgtatgcgtaacctgacagatggatccctgattgctacatgtttgaataatttgcatgatctagctagtttctgcctaatctaatggtacggctcatgtcttgtcaggtggatttgttatgtgttttttttttcaaattgaggcttgtttgttttgctctcaatc

SEQ ID NO: 11003 - DNA, 2103 bp, Zea Mays
agtctggaccgagaccccggatcgccacgctccttacgccgccgccgttgcccacgagccgggatgctccgcggcgccatctcccgcctcggtgctcgcctccgcctccacgccgacccctctccggcctctcctcgcctccgcgtcctctccacccgccgcggtaaacgctcctcccccaccctgtcgcccgcggactgcgatgacgagggacccctgcgcggcctcttcgtgctatcccgcgaccccgagtgcccaccgcggctgctggtggtgcagccgcgcctccgccccggaagcctcctcgagtccaagctcgccgaggcactcaacctcgccaactccctcgaggagcgccgcgacggcttctaccacagcgagttcggcgccaagggcgcgccgccgcacctcgtcgtccagaaccccgcctcccgcggtcgctcacacgctgatacatattttgggcctggaactgtggataatgtcaagtgctacctgagtgcaacggaatcagaggaagatgtggatgcagtttttgtcaatgcgattctctctggaatccaacagagaaacttggaggttgcctggggaaagtcggttttggatcgtgttgggcttataattgaaatattcaatgctcatgctgaaacaaaagaagcgaagttacagtcagagttggcagctctcatgtacatgaagactaggcttgtccgtgtacgtggcccaggtggacgactaacttttggtccaagtggggaggctgaggttgtcagtgcaagagggagaggtagtggggggaggggattcatgagtggtgctggtgaaacagagcttcaactacaacggaggagaatccaagaacgccgtgtgagcttgttagctcaaattgaagatgtacgccgcactagagcgatacaacgttcaagtcggaaaagacatggtggctcgtttggtcaagagcttgtaactgttgcagtcgtcggatatacaaatgctgggaaatctacgcttgtgagtgcactttctgaagctgatttatacagtgatgacaggctgtttgcaacagtagatccccggttacgaagtgtgattcttccatcagggagaaaagcacttcttagtgataccgttggcttcatctcagatttaccagtacagcttgtggaagcatttcatgcgaccctagaagaagttgttgaagcagacatgttagtgcatgtgttggattcaagtgcatctaatcttgaagagcatcgatctactgtattgcaagtactgcagcagataggggtttctcaggagaagatcaacaatatgattgaagtttggaacaagattgatcttgtggacgagaatgttaaatctgatgggattgacgatgaagtcttcctgaccgaaggtgaacaggaggatgacatattctctgaagatgatgctccatcagaacaaacatcttttgattctgtagatgtagatgacggagcagattcagaatatttatcagaagaaaattctgaagatagcaatgaactgccatctaaaaagtcatttgctgagccaactgagatgggagcaatgaaagagttgtcatcaaaagaatgttttggagaacttcgtgtcctagatacaaatggacacactttcccacaaccagcttccacttgtcatgtaaaaacttctgctgtgacggggacaggattgcaagagttgttagcattgatagagaggaaactgactgaacaacaaactgtcgtgcaaagaagctatggacctttcgacagaaaatggagacctacctctatggattgtgaaaaggctgcagagccgtaggtatgggattcctccttcccctcttctatatgggattcatccttcccctcttctatatgctgctgagatcagtagcagtaaccagtttctgagtttgcatccctagagatggaaaccacacaatgtgtttgaatatgcgcttgtgcatgatgtatgatgtatcattcaaagagtatcttgatattctttctgcagaacatgaagaaactgtaggaagggaccgtatgagttttgatcaatgtcagtcactttaacagacattttgtaaataaa

SEQ ID NO: 11004 - DNA, 2096 bp, Zea Mays
agtctggaccgagaccccggatcgccacgctccttacgccgccgccgttgcccacgagccgggatgctccgcggcgccatctcccgcctcggtgctcgcctccgcctccacgccgacccctctccggcctctcctcgcctccgcgtcctctccacccgccgcggtaaacgctcctcccccaccctgtcgcccgcggactgcgatgacgagggacccctgcgcggcctcttcgtgctatcccgcgaccccgagtgcccaccgcggctgctggtggtgcagccgcgcctccgccccggaagcctcctcgagtccaagctcgccgaggcactcaacctcgccaactccctcgaggagcgccgcgacggcttctaccacagcgagttcggcgccaagggcgcgccgccgcacctcgtcgtccagaaccccgcctcccgcggtcgctcacacgctgatacatattttgggcctggaactgtggataatgtcaagtgctacctgagtgcaacggaatcagaggaagatgtggatgcagtttttgtcaatgcgattctctctggaatccaacagagaaacttggaggttgcctggggaaagtcggttttggatcgtgttgggcttataattgaaatattcaatgctcatgctgaaacaaaagaagcgaagttacagagttggcagctctcatgtacatgaagactaggcttgtccgtgtacgtggcccaggtggacgactaacttttggtccaagtggggaggctgaggttgtcagtgcaagagggagaggtagtggggggaggggattcatgagtggtgctggtgaaacagagcttcaactacaacggaggagaatccaagaacgccgtgtgagcttgttagctcaaattgaagatgtacgccgcactagagcgatacaacgttcaagtcggaaaagacatggtggctcgtttggtcaagagcttgtaactgttgcagtcgtcggatatacaaatgctgggaaatctacgcttgtgagtgcactttctgaagctgatttatacagtgatgacaggctgtttgcaacagtagatccccggttacgaagtgtgattcttccatcagggagaaaagcacttcttagtgataccgttggcttcatctcagatttaccagtacagcttgtggaagcatttcatgcgaccctagaagaagttgttgaagcagacatgttagtgcatgtgttggattcaagtgcatctaatcttgaagagcatcgatctactgtattgcaagtactgcagcagataggggtttctcaggagaagatcaacaatatgattgaagtttggaacaagattgatcttgtggacgagaatgttaaatctgatgggattgacgatgaagtcttcctgaccgaaggtgaacaggaggatgacatattctctgaagatgatgctccatcagaacaaacatcttttgattctgtagatgtagatgacggagcagattcagaatatttatcagaagaaaattctgaagatagcaatgaactgccatctaaaaagtcatttgctgagccaactgagatgggagcaatgaaagagttgtcatcaaaagaatgttttggagaacttcgtgtcctagatacaaatggacacactttcccacaaccagcttccacttgtcatgtaaaaacttctgctgtgacggggacaggattgcaagagttgttagcattgatagagaggaaactgactgaacaacaaactgtcgtgcaaagaagctatggacctttcgacagaaaatggagacctacctctatggattgtgaaaaggctgcagagccgtagaacatgaagaaactgtaggaagggaccgtatgagttttgatcaatgtcagtcactttaacagacattttgtactcatgcttcatgttgctagatagcatcttatctttatcttatattctgatgagtatgttggttgctgtagatgtatttatgttgctccttttgtatggccttattttgttcattccctctaatcgattttctgtacctttattttggtcgcatggtggggctaatgatgtctccaacaagaaccagtaaagggtctc

SEQ ID NO: 11005 - DNA, 1902 bp, Zea Mays
agtctggaccgagaccccggatcgccacgctccttacgccgccgccgttgcccacgagccgggatgctccgcggcgccatctcccgcctcggtgctcgcctccgcctccacgccgacccctctccggcctctcctcgcctccgcgtcctctccacccgccgcggtaaacgctcctcccccaccctgtcgcccgcggactgcgatgacgagggacccctgcgcggcctcttcgtgctatcccgcgaccccgagtgcccaccgcggctgctggtggtgcagccgcgcctccgccccggaagcctcctcgagtccaagctcgccgaggcactcaacctcgccaactccctcgaggagcgccgcgacggcttctaccacagcgagttcggcgccaagggcgcgccgccgcacctcgtcgtccagaaccccgcctcccgcggtcgctcacacgctgatacatattttgggcctggaactgtggataatgtcaagtgctacctgagtgcaacggaatcagaggaagatgtggatgcagtttttgtcaatgcgattctctctggaatccaacagagaaacttggaggagaggtagtggggggaggggattcatgagtggtgctggtgaaacagagcttcaactacaacggaggagaatccaagaacgccgtgtgagcttgttagctcaaattgaagatgtacgccgcactagagcgatacaacgttcaagtcggaaaagacatggtggctcgtttggtcaagagcttgtaactgttgcagtcgtcggatatacaaatgctgggaaatctacgcttgtgagtgcactttctgaagctgatttatacagtgatgacaggctgtttgcaacagtagatccccggttacgaagtgtgattcttccatcagggagaaaagcacttcttagtgataccgttggcttcatctcagatttaccagtacagcttgtggaagcatttcatgcgaccctagaagaagttgttgaagcagacatgttagtgtgcagcatgtgttggattcaagtgcatctaatcttgaagagcatcgatctactgtattgcaagtactgcagcagataggggtttctcaggagaagatcaacaatatgattgaagtttggaacaagattgatcttgtggacgagaatgttaaatctgatgggattgacgatgaagtcttcctgaccgaaggtgaacaggaggatgacatattctctgaagatgatgctccatcagaacaaacatcttttgattctgtagatgtagatgacggagcagattcagaatatttatcagaagaaaattctgaagatagcaatgaactgccatctaaaaagtcatttgctgagccaactgagatgggagcaatgaaagagttgtcatcaaaagaatgttttggagaacttcgtgtcctagatacaaatggacacactttcccacaaccagcttccacttgtcatgtaaaaacttctgctgtgacggggacaggattgcaagagttgttagcattgatagagaggaaactgactgaacaacaaactgtcgtgcaaagaagctatggacctttcgacagaaaatggagacctacctctatggattgtgaaaaggctgcagagccgtagaacatgaagaaactgtaggaagggaccgtatgagttttgatcaatgtcagtcactttaacagacattttgtactcatgcttcatgttgctagatagcatcttatctttatcttatattctgatgagtatgttggttgctgtagatgtatttatgttgctccttttgtatggccttattttgttcattccctctaatcgattttctgtacctttattttggtcgcatggtggggctaatgatgtctccaacaagaaccagtaaagggtctc

SEQ ID NO: 11006 - DNA, 2010 bp, Zea Mays
agtctggaccgagaccccggatcgccacgctccttacgccgccgccgttgcccacgagccgggatgctccgcggcgccatctcccgcctcggtgctcgcctccgcctccacgccgacccctctccggcctctcctcgcctccgcgtcctctccacccgccgcggtaaacgctcctcccccaccctgtcgcccgcggactgcgatgacgagggacccctgcgcggcctcttcgtgctatcccgcgaccccgagtgcccaccgcggctgctggtggtgcagccgcgcctccgccccggaagcctcctcgagtccaagctcgccgaggcactcaacctcgccaactccctcgaggagcgccgcgacggcttctaccacagcgagttcggcgccaagggcgcgccgccgcacctcgtcgtccagaaccccgcctcccgcggtcgctcacacgctgatacatattttgggcctggaactgtggataatgtcaagtgctacctgagtgcaacggaatcagaggaagatgtggatgcagtttttgtcaatgcgattctctctggaatccaacagagaaacttggagtcagagttggcagctctcatgtacatgaagactaggcttgtccgtgtacgtggcccaggtggacgactaacttttggtccaagtggggaggctgaggttgtcagtgcaagagggagaggtagtggggggaggggattcatgagtggtgctggtgaaacagagcttcaactacaacggaggagaatccaagaacgccgtgtgagcttgttagctcaaattgaagatgtacgccgcactagagcgatacaacgttcaagtcggaaaagacatggtggctcgtttggtcaagagcttgtaactgttgcagtcgtcggatatacaaatgctgggaaatctacgcttgtgagtgcactttctgaagctgatttatacagtgatgacaggctgtttgcaacagtagatccccggttacgaagtgtgattcttccatcagggagaaaagcacttcttagtgataccgttggcttcatctcagatttaccagtacagcttgtggaagcatttcatgcgaccctagaagaagttgttgaagcagacatgttagtgcatgtgttggattcaagtgcatctaatcttgaagagcatcgatctactgtattgcaagtactgcagcagataggggtttctcaggagaagatcaacaatatgattgaagtttggaacaagattgatcttgtggacgagaatgttaaatctgatgggattgacgatgaagtcttcctgaccgaaggtgaacaggaggatgacatattctctgaagatgatgctccatcagaacaaacatcttttgattctgtagatgtagatgacggagcagattcagaatatttatcagaagaaaattctgaagatagcaatgaactgccatctaaaaagtcatttgctgagccaactgagatgggagcaatgaaagagttgtcatcaaaagaatgttttggagaacttcgtgtcctagatacaaatggacacactttcccacaaccagcttccacttgtcatgtaaaaacttctgctgtgacggggacaggattgcaagagttgttagcattgatagagaggaaactgactgaacaacaaactgtcgtgcaaagaagctatggacctttcgacagaaaatggagacctacctctatggattgtgaaaaggctgcagagccgtagaacatgaagaaactgtaggaagggaccgtatgagttttgatcaatgtcagtcactttaacagacattttgtactcatgcttcatgttgctagatagcatcttatctttatcttatattctgatgagtatgttggttgctgtagatgtatttatgttgctccttttgtatggccttattttgttcattccctctaatcgattttctgtacctttattttggtcgcatggtggggctaatgatgtctccaacaagaaccagtaaagggtctc

SEQ ID NO: 11007 - DNA, 222 bp, Zea Mays
tactgacggaaatgagaatagtatccatcgtatgacccagctacaaacactaattactaaaattactacacacgacacttcagcacagcttgcttcatatgccacagcttgcttcatatgcaggcctagaaacacttaaatacgttcattctatcctcatgatgatcaagcatgatatacaactcaacaaattgagattcactcaccttagcactgaatgtt

SEQ ID NO: 11008 - DNA, 1807 bp, Zea Mays
gtgcgttcctggagatgctagtcctgtgattttactcatccaagtagggcccgttagtttaaattcccaataacattactaggagctcttttagcttcttaaggagcagctgcctagccatatcctaaaggagaccgcacttcttggtgattgaggaacgttggtgtttctggataattggagatgtactcaggccagcaatctgatcaaggtcctagtgcaaatagtggcagagaattctccgaggcaaattggaattcttacacaatgcatcaaaagatagcttatagtggacaacatgggtttggaccttacggcatgggcttagaagataggctggggttgtatcaatcttcatctggtacattaagtcatgacatccaaatgagtgatgagcatagcggaggtgtgaagaagaggaaaggagtggaggactgtgtcacattgttgcctaatgcaggtgatcaacaaacagaaggttcatctcagccagaaaggaattcaatggaggaggggaacagaaagatttcgcccaaaatacaaagcaaggaagattcttctgatggtgatggtactaaagaggactatgttcatatccgggcaaagcgaggtcaagccactaacagccacagcctcgcagaaagactgaggagaaaaaagataagtgagagaatgaagcttcttcaagatcttgttcctggatgcagtaagatcactggcaaggcagtcatgctcgatgagattatcaactatgtacagtcattgcaacgacaagtggagttcttgtcaatgaaactttcaactgttaaccctgaacttggctttgacattgagcagatcatatccaaacaaatgatgctttcacaagacagacatcttgctttctatggagtcgatccaggatcaagcagccttactgctccattcaaccaaggaatcgtgcagccagcaatgatgtgcaacatttctaatcctgccgatgttttgcacggaactattcatgacgtgtcaacaatgaaccagataccttccatgtgggaaggacttcagagcatgcctcagatgaacttcaaccctggtgtggcagctgatagcggcaccaacaactctggctccatgaagatcgaacagtgagctgctgtatagtagcttcgaaattgttgtgtgaatcactgaatcatcgtaaagcgctctcgagatgaagctttttttgtatagctggaggcctgaccatttatgctggattcctgcggttgctcccatactgtgcggcacattgtttatggtatggcatatggatcgtgtacagctggagctgaagaactgattccactgtaaatttctgttgtgctttggcctgcgaaaattgggatggaaacctagtagcatccatgaaattcaaggacagaagcttgttgggattgggacttgggaccacgtgctgaatactgatgggcctaaacgtactagacgagtactaatagaatcgtagttgtaggtaaaaaaatgcagagtttgaaaccagtggttttgtcagaaattccatggagtttgctatatttatttatgatatcaaaacagaaactgaatggccgctggcactgggctgcaagtctccaacctggttctttccttttcctttgttttttttctaaagatttatctgcaaacttcactgcaccggtgttatctttttttttctaattagagtttcgaggttgataaaatgggcagaattctattcagaaaagaagggattatgggatatttgaacgtactaaagctaataattatgtgctaagattag

SEQ ID NO: 11009 - DNA, 1682 bp, Zea Mays
gtgagctttggtgatgcgaaagtgattgaggaacgttggtgtttctggataattggagatgtactcaggccagcaatctgatcaaggtcctagtgcaaatagtggcagagaattctccgaggcaaattggaattcttacacaatgcatcaaaagatagcttatagtggacaacatgggtttggaccttacggcatgggcttagaagataggctggggttgtatcaatcttcatctggtacattaagtcatgacatccaaatgagtgatgagcatagcggaggtgtgaagaagaggaaaggagtggaggactgtgtcacattgttgcctaatgcaggtgatcaacaaacagaaggttcatctcagccagaaaggaattcaatggaggaggggaacagaaagatttcgcccaaaatacaaagcaaggaagattcttctgatggtgatggtactaaagaggactatgttcatatccgggcaaagcgaggtcaagccactaacagccacagcctcgcagaaagactgaggagaaaaaagataagtgagagaatgaagcttcttcaagatcttgttcctggatgcagtaagatcactggcaaggcagtcatgctcgatgagattatcaactatgtacagtcattgcaacgacaagtggagttcttgtcaatgaaactttcaactgttaaccctgaacttggctttgacattgagcagatcatatccaaacaaatgatgctttcacaagacagacatcttgctttctatggagtcgatccaggatcaagcagccttactgctccattcaaccaaggaatcgtgcagccagcaatgatgtgcaacatttctaatcctgccgatgttttgcacggaactattcatgacgtgtcaacaatgaaccagataccttccatgtgggaaggacttcagagcatgcctcagatgaacttcaaccctggtgtggcagctgatagcggcaccaacaactctggctccatgaagatcgaacagtgagctgctgtatagtagcttcgaaattgttgtgtgaatcactgaatcatcgtaaagcgctctcgagatgaagctttttttgtatagctggaggcctgaccatttatgctggattcctgcggttgctcccatactgtgcggcacattgtttatggtatggcatatggatcgtgtacagctggagctgaagaactgattccactgtaaatttctgttgtgctttggcctgcgaaaattgggatggaaacctagtagcatccatgaaattcaaggacagaagcttgttgggattgggacttgggaccacgtgctgaatactgatgggcctaaacgtactagacgagtactaatagaatcgtagttgtaggtaaaaaaatgcagagtttgaaaccagtggttttgtcagaaattccatggagtttgctatatttatttatgatatcaaaacagaaactgaatggccgctggcactgggctgcaagtctccaacctggttctttccttttcctttgttttttttctaaagatttatctgcaaacttcactgcaccggtgttatctttttttttctaattagagtttcgaggttgataaaatgggcagaattctattcagaaaagaagggattatgggatatttgaacgtactaaagctaataattatgtgctaagattag

SEQ ID NO: 11010 - DNA, 1685 bp, Zea Mays
cctcattacgcggtgtagtcaaaggtgattgaggaacgttggtgtttctggataattggagatgtactcaggccagcaatctgatcaaggtcctagtgcaaatagtggcagagaattctccgaggcaaattggaattcttacacaatgcatcaaaagatagcttatagtggacaacatgggtttggaccttacggcatgggcttagaagataggctggggttgtatcaatcttcatctggtacattaagtcatgacatccaaatgagtgatgagcatagcggaggtgtgaagaagaggaaaggagtggaggactgtgtcacattgttgcctaatgcaggtgatcaacaaacagaaggttcatctcagccagaaaggaattcaatggaggaggggaacagaaagatttcgcccaaaatacaaagcaaggaagattcttctgatggtgatggtactaaagaggactatgttcatatccgggcaaagcgaggtcaagccactaacagccacagcctcgcagaaagactgaggagaaaaaagataagtgagagaatgaagcttcttcaagatcttgttcctggatgcagtaagatcactggcaaggcagtcatgctcgatgagattatcaactatgtacagtcattgcaacgacaagtggagttcttgtcaatgaaactttcaactgttaaccctgaacttggctttgacattgagcagatcatatccaaacaaatgatgctttcacaagacagacatcttgctttctatggagtcgatccaggatcaagcagccttactgctccattcaaccaaggaatcgtgcagccagcaatgatgtgcaacatttctaatcctgccgatgttttgcacggaactattcatgacgtgtcaacaatgaaccagataccttccatgtgggaaggacttcagagcatgcctcagatgaacttcaaccctggtgtggcagctgatagcggcaccaacaactctggctccatgaagatcgaacagtgagctgctgtatagtagcttcgaaattgttgtgtgaatcactgaatcatcgtaaagcgctctcgagatgaagctttttttgtatagctggaggcctgaccatttatgctggattcctgcggttgctcccatactgtgcggcacattgtttatggtatggcatatggatcgtgtacagctggagctgaagaactgattccactgtaaatttctgttgtgctttggcctgcgaaaattgggatggaaacctagtagcatccatgaaattcaaggacagaagcttgttgggattgggacttgggaccacgtgctgaatactgatgggcctaaacgtactagacgagtactaatagaatcgtagttgtaggtaaaaaaatgcagagtttgaaaccagtggttttgtcagaaattccatggagtttgctatatttatttatgatatcaaaacagaaactgaatggccgctggcactgggctgcaagtctccaacctggttctttccttttcctttgttttttttctaaagatttatctgcaaacttcactgcaccggtgttatctttttttttctaattagagtttcgaggttgataaaatgggcagaattctattcagaaaagaagggattatgggatatttgaacgtactaaagctaataattatgtgctaagattag

SEQ ID NO: 11011 - DNA, 1715 bp, Zea Mays
gtaacaaacaccacttagcagcaggctcttgcgtccgtcttgcccttttgcttccgcctcctgcccttaaaatctttcaccaccccctcccgtcgcggtcaaattggcgatcctcgtttggggagggccaagaaaccagagctctctctccgatgcccaccaacgtcaggtgattgaggaacgttggtgtttctggataattggagatgtactcaggccagcaatctgatcaaggtcctagtgcaaatagtggcagagaattctccgaggtacattaagtcatgacatccaaatgagtgatgagcatagcggaggtgtgaagaagaggaaaggagtggaggactgtgtcacattgttgcctaatgcaggtgatcaacaaacagaaggttcatctcagccagaaaggaattcaatggaggaggggaacagaaagatttcgcccaaaatacaaagcaaggaagattcttctgatggtgatggtactaaagaggactatgttcatatccgggcaaagcgaggtcaagccactaacagccacagcctcgcagaaagactgaggagaaaaaagataagtgagagaatgaagcttcttcaagatcttgttcctggatgcagtaagatcactggcaaggcagtcatgctcgatgagattatcaactatgtacagtcattgcaacgacaagtggagttcttgtcaatgaaactttcaactgttaaccctgaacttggctttgacattgagcagatcatatccaaacaaatgatgctttcacaagacagacatcttgctttctatggagtcgatccaggatcaagcagccttactgctccattcaaccaaggaatcgtgcagccagcaatgatgtgcaacatttctaatcctgccgatgttttgcacggaactattcatgacgtgtcaacaatgaaccagataccttccatgtgggaaggacttcagagcatgcctcagatgaacttcaaccctggtgtggcagctgatagcggcaccaacaactctggctccatgaagatcgaacagtgagctgctgtatagtagcttcgaaattgttgtgtgaatcactgaatcatcgtaaagcgctctcgagatgaagctttttttgtatagctggaggcctgaccatttatgctggattcctgcggttgctcccatactgtgcggcacattgtttatggtatggcatatggatcgtgtacagctggagctgaagaactgattccactgtaaatttctgttgtgctttggcctgcgaaaattgggatggaaacctagtagcatccatgaaattcaaggacagaagcttgttgggattgggacttgggaccacgtgctgaatactgatgggcctaaacgtactagacgagtactaatagaatcgtagttgtaggtaaaaaaatgcagagtttgaaaccagtggttttgtcagaaattccatggagtttgctatatttatttatgatatcaaaacagaaactgaatggccgctggcactgggctgcaagtctccaacctggttctttccttttcctttgttttttttctaaagatttatctgcaaacttcactgcaccggtgttatctttttttttctaattagagtttcgaggttgataaaatgggcagaattctattcagaaaagaagggattatgggatatttgaacgtactaaagctaataattatgtgctaagattag

SEQ ID NO: 11012 - DNA, 1808 bp, Zea Mays
cttacgctaaggttttggaaatattagagaggagagaagagagagaagggaaggaatagagaagagagagagagagaaaggggcagttgcagtggttaacaaccctctgccagagcgcaagaaggaatcatttcacctcagtggcaggtgattgaggaacgttggtgtttctggataattggagatgtactcaggccagcaatctgatcaaggtcctagtgcaaatagtggcagagaattctccgaggcaaattggaattcttacacaatgcatcaaaagatagcttatagtggacaacatgggtttggaccttacggcatgggcttagaagataggctggggttgtatcaatcttcatctggtacattaagtcatgacatccaaatgagtgatgagcatagcggaggtgtgaagaagaggaaaggagtggaggactgtgtcacattgttgcctaatgcaggtgatcaacaaacagaaggttcatctcagccagaaaggaattcaatggaggaggggaacagaaagatttcgcccaaaatacaaagcaaggaagattcttctgatggtgatggtactaaagaggactatgttcatatccgggcaaagcgaggtcaagccactaacagccacagcctcgcagaaagactgaggagaaaaaagataagtgagagaatgaagcttcttcaagatcttgttcctggatgcagtaagatcactggcaaggcagtcatgctcgatgagattatcaactatgtacagtcattgcaacgacaagtggagttcttgtcaatgaaactttcaactgttaaccctgaacttggctttgacattgagcagatcatatccaaacaaatgatgctttcacaagacagacatcttgctttctatggagtcgatccaggatcaagcagccttactgctccattcaaccaaggaatcgtgcagccagcaatgatgtgcaacatttctaatcctgccgatgttttgcacggaactattcatgacgtgtcaacaatgaaccagataccttccatgtgggaaggacttcagagcatgcctcagatgaacttcaaccctggtgtggcagctgatagcggcaccaacaactctggctccatgaagatcgaacagtgagctgctgtatagtagcttcgaaattgttgtgtgaatcactgaatcatcgtaaagcgctctcgagatgaagctttttttgtatagctggaggcctgaccatttatgctggattcctgcggttgctcccatactgtgcggcacattgtttatggtatggcatatggatcgtgtacagctggagctgaagaactgattccactgtaaatttctgttgtgctttggcctgcgaaaattgggatggaaacctagtagcatccatgaaattcaaggacagaagcttgttgggattgggacttgggaccacgtgctgaatactgatgggcctaaacgtactagacgagtactaatagaatcgtagttgtaggtaaaaaaatgcagagtttgaaaccagtggttttgtcagaaattccatggagtttgctatatttatttatgatatcaaaacagaaactgaatggccgctggcactgggctgcaagtctccaacctggttctttccttttcctttgttttttttctaaagatttatctgcaaacttcactgcaccggtgttatctttttttttctaattagagtttcgaggttgataaaatgggcagaattctattcagaaaagaagggattatgggatatttgaacgtactaaagctaataattatgtgctaagattag

SEQ ID NO: 11013 - DNA, 2319 bp, Zea Mays
cacgagtcctccggcccagcgcgcgccttctcaaaccttctagaacgcccaccttccttctttcgtccactcctccaccgctccattccgaacctttttaagctctcccatggagtctgacctcatagcttatatagcaaaacaatagaagtagaacaagcacagaactgttaagctccgcaggctgcagctcgtccccaatgtcgtctgcttctcttgcatcttctctcttgtgcagcagcagtgcttctactagtagaagcgcaaccgtgccaagagtaaccaggacccctcttttttccaagaaccagtacaaaccgcctcttcggcctcttaggagtagttcagtagtaaggcgatcgttgcagcaggagcaagaggagagggtgggcccggcgtcctctgtctctgtggcctccggcgagcgacaggaggaggcgacggcgtcgcatcatgttggaggggtggatgaggccaaggcgtcgggccatgttggagaggcagataaaggaggccaaggagaaggcgacggcgaggagaagaggagcacagacgagcagcaggaggtggactggaagtcagacgaggagttcaagaagttcatgggcaatccctccatcgaggccgccatcaagttggagaagaagcgcgccgacaggaagctccgcgagctggaccgcgagcccgacgccaaccccgtcgccggcctgttccggggcttggtgaaggaccagctggcccgcgagaagcagaggctggagctggcggagcagaccttcaaggcactcgacctcaacaagctgaagagctgtttcgggtacgacacgttcttcgccgtggacgtccggaggttcggcgacggcgggatcttcatcgggaacctgcgtaagcccatcgaggaggtgcggcctaagctggagaagaagatctccgaggcggctggaacagaggtcaccctctggttcatggaggagaagaacgacgacatcacaaagcaggtctgcatggttcagcccaaggcagagatcgacgtccagctcgagatcaccaagctgagcacgccgtggggctacctcagcgccgtggcgttggcggtcacgaccttcgggacgatcgcgctcatgagcggattcttcctcaagcccggcgccacgttcgacgactacgtctctgacgtgcttcctctgttcggcggcttcctcacgatactcggcgtctctgagattgcgactaggctgacggcggcgaagtacggtgtgaagctgagcccgtcattcctcgtgccgtccaactggacggggtgcctcggcgtgataaacaactacgagtcgttgctgcccaacaagaaggccctgttcgacataccagtcgcgcgcacggccagcgcgtacgtcacgtcggtggtgcttgccgtctcggcgttcatcgtcgacggcagcttcaacggcggcgagaacgccctgttcgtgcggccggagttcttctacaacaacccgctgctgtcgttcgtgcagctggtgatcgggccctacgcagacgagctcgggaacgtgctcccgaacgcggtggagggcgtgggcgtgcccgtggacccgctggcgttcgcggggctgctgggcatcgtggtgacgtcgctgaacctgctcccgatcgggcggctggagggcgggcgcatcgcgcaggcgctgttcgggcgcggcacggcggcgctgctgtcgttcggcacgtccgtcctgctgggcgcgggcgccatcagcggcagcgtgctgtgcctggcgtggggcctcttcgccaccttcatccgcggcggggaggagatcccggcgcaggacgagatcacgccgctcggcaacgagcgcctcgcgtgggggttcgtgctcgccttggtctgcctcctcacgctcttccccaacggcggcgggacctactctgcctccttcctcggcgacccgttctttagaggcggcatctagacggaatcatctccttccgtgcagtgtgcgtgtgtttataaagtttttagtaggctaataaccacactactaaccacttgagacgccacggcactcgacctgcagtccgccgatcccgaaacagatcgttgatgtcgccagaactgcatatcgatcgccctctgcagggcctacacccactgtacaatcggacaacaataggtcgacgatcctcgccgcaccgcctgtccaggaattgaacctgaaccgaagatgggtcgacgttctaggaggccaatcctaactacgcaggcctcaagtgggtcgtgtaaatcatggacttgtaatcgtatatgggggagacaag

SEQ ID NO: 11014 - DNA, 2728 bp, Zea Mays
ccccgtcgcctgcccgttcccccgtttctaattttatgaccgtcgaaaaccaaaatttagataggccacccaaatccaggtgcaaatcccaacctccctccctcccaggccccctccccacctccacctccaggcaccactggtcccacctcctcacctgcgaggatgctgctcgtgagtcaggcagcgaacggctccctctccgcgcggcggctgccgtcgaagccgccggggccgtccaccaccaacccctacccgctcttcgccaaccctcgcctcctgcgccgccgcctggcgctctccggcgctggcgccgaccaagccccgcgccgcgccgcgccgaccccagccgccgcgggcgagggcccctccgcctcctccaccgaggacccggtccttgtccgcgtcgccgacgacggcgtgccgctcgagggcgtcatccagattgagaagcccggggatgcggccgccgagtccaagctcgtctcctacgcgaagctgggtcttctggccggcggggacgtgttctgccttctgctgttctctgcgattggaaggttcagccatggcctgcccgtcctcgacgccgagacgttcaagacggccgaccccttcattgctgggtggctgctgagcgcctaccttcttggcggatttggcgatgatgccaaagggcgcaatggcgtcggaagcgcggttatcaccgcagctaaatcatgggctgttgggataccggtaactttcaattctttaattctactgtttcaagcatgagccaggatgaaatgttatcttggttcttgttgttttttacccaaggtcaataacgtttttgtaagctgaggccttctgatttttgacccatctaacaccatcttctgttttttttgccaaccgtgcttgcacacaacaccatcttctattgttcattattgctgtctgttgcttgcatgagtgcatctgcctttcacttgtacattatataactttttttaatcaaatacatcacaaactacatttatttctgtgtctcatctattcatgcaattatttgttctatgtatttggctattttgttctcttgtctgtttccattacatatgaatctcttgggtgatagtcaactaaattccgacatgcttgaatgctttattaataagaaacctacttctttttataaggtttagtaggcattactaaggagccgtttggtacatctctagctttgagatcgatgttgattctgcagtttgtagactaaactaaaatagtttgaataattatgggcctgtttgtttcagcctttttgcagcttctggccgccataagctgatgcggactgtcaaacaccttgtttttcagaccgtttttgtgagaatcgctttattgaaaaccgtccaaaatcaatgtgaacacaaattcggtcgagtcgtcgcgatagtaggaatccgtcactttcaagatcctaaactctatggacccatttatcttcctccacacgtaatctccacaatactcagattctccccacagctagattctcacaaaagctcgtaaaaaagctgaaacaaacaagccctatatctagtccaaactatacaaaaggagtcatcagtaatgtaattgcaaccagcacacctcctgctccagatccaaggttgtccgaagctacagatacctagctctacgaaacatgtgaatttcttaaacaaatcttgctaaacaaatctagatgtttttaattagttgaacaagtgatccaaacagattattgcttgtgtctcctagctatactattgggtgatttactctagtatttggagcaaattattttttctattataagatgatccattactcaaggtctaaccattggttgtttcatttgtgtagtgccagtcatacaatattgttaaatcgcaactaacatgcttcagcccttcaacatagtgatttgagtagcaagagaaactatgcttttctagtagatcttgcataaaagttaaattgatgaactgtcccaggttttttattaaaagcaggcaccactgtttttcccatgtggtcttgtacattcataaatgacaactgcatttacttatgatctgatctttacaacattttcatgtctcattaactagagtcggtgtgttttctgatggataatgcttgacgtttatgatgattctctttctcgtgttagttgggacttgctatccgagcagtgacgtctggtcatcttccaccaactccttttatcttggtaaccatgggaagtacaggggtcttgttaactgcatggcgtgctttggtatcacaactgttttccaaccagcaaaagcagcaggatgatgtctaccggcgtggaagtccttttgagctttttgagctactcacatcgctggtgcggaggtggtgacatctgaaggctgaagcctatagaaggtaagaagggcattgttccgctctggtatccgcaatcatcaggttcagccatctgtgtctattgtgtaagtacaattttgaaggtgaagaagagcaggctaaaacctagtttggagcatttgccgaacccaaaaaaaatgtttggcaataacacgcccgcgatgttggtttagtatattatattatattcataagatgtactcatattcctgatcttccacttgtaaaattgtatccagcttaacaaatcctaatcgataagaccgttgcctcttgttcaaca

SEQ ID NO: 11015 - DNA, 2852 bp, Zea Mays
cgaaaaactacgcgcccaagcagcgccacgcggcctccccgccgcgcaccacgagccactcgctcgctcccccgtcctagtagtggctagtgcgcgcgcaacacacacggacgcgcgcgctccgtactcgggagtcgggcctcgactcggcacgcgtccgcggctccgcgcccaggccagggtgtgttgtgtcttccagtctccacgctcctgagaccacatctctctctccatggcgacggccatctcgttcccgcgcgcgccgctggtcactccccgcgcgtgcaccccccgccggcttgtccacgtgtcggcggcgcgcgcctctcccccgcgcggaggagggcgcgtcggtcgccgctccccgacggtccccgctgtagcgggagcctcctcctcctcctccggcttggctccggacacaagcgtgccggcgtgggacgctctcggcggcgtctccgtcctcgccgcgggaacaggcaacgctgtggcgctgacggacctgtgggactccgccgagggggtggccgtggttgcgctgctgaggcatttcgggtgcttctgctgctgggagctggcctctgttctcaaggacgccatggcggagttcgactcggcgggggctaagctgatcgccatcggcgtcggaaccccggagaaggctcgcatcctcgccgaccggctgccgtttcctatggactccttgtacgcggaccccgagcgtaaggcttacagcgtgcttggactgtaccatggtctgggccggacgctcttcagtccagctagtatatattcgaggctcgactacatcaagaaggcgacggagaactacacgctggaaggcacgcccgccgacctcaccggcgtcctgcagcagggtggaatgttcgtgttcagagggaaggagttgctgtactcgtggagagaccaaggcacgggtgaccatgctcctctggacgacgtgcacagcgcctgccgcaaaattcccagtcgcttgacctgatggaacggattccggcagcacatgaacccgtcccagcattcaggcgctgctatctaggaaatgccatatcggatagagagaccaaaactgctatacatctgcttccaaattggttcgtcctgaacgtgtaaaatccacacatgacatatgtacacaagatgctttttttcccacagaaaactaagaacagtgtatcccgtcgcgatccagtcctccccttgcacgcgtacctctccacgagccaccaaagcaaactggcaaaaactctagagttcctctccttccaaatggtgcaagagatgagatgcttacgggacaggagccaccagtccagtagcgatgtcgtgttggtcagtagcagatgctgcataccatcgatcctgagcgcgtatgtatatgttccatattctgcagcctagctttaaatctttcaacccacggacgcactgagtctaacatatgacatcatgtatgtcacaagtctgtagcctagctttaaatctttcaacccacggatgcactgatccaggctgacctatttatgaaccagttggatgttgccataaagtttaaaccataccctgtgtataaaactcggtatgatttgtctgttgaatatactggtttcttttgtactatgcgtttatgacacctatatatagatgtcgcctcatcatttatttacatgagtttgcttgctactttgttgtccgagactccagattccgctggcagattccgaaaggtggatggctgaatggaatttttttcttcagtatagtaaatggagaaagtaatgttgacactttgttgataaattgaatggcttgtatatagtcccacagcattacaaatttccctgtcgacagtttgttgacaaactggctgagttgtatagctacacaacattatttctgtttttctaattgttatacacgtgcttataaatttctctgatggcagtttgttgacaaattgactgacttgtatagctgcacaacatttttttctaattgttatatccgttcttataaatttctctgttgacagtttgttgacaaaaagctatgattctgcttaataggtgtgcatgaatgatgcgtcccttggtctacatttactgcttgtctcatatgtgttttagggttggattttttgtgttcaaaagcaaaggactgttgaatgcaaggaaagacgagggcgcacaggcgaccgtgcccctttggacgatgtgctcaatatttgctgcgaagttcctgcagcctaacctgatggctcggtcttaagctatctccaacaacttattcattcttatacgtatattcaaactttaatctatgaacagtgcaatatataatgtaaaaaaatgcaaaacagtgttattgtataaaatttggtgcactgcagacggtcttaggtcggattccttcccatcgttacgcatatggtcttcatccattcttttttttttgcagccttgttaaaaaagggaagttggaatatacttgtagcatgcatatcgtcttcatccattatctttttttttttggcatcaacagatccctttctttgttcacaagctggacatgggtctatatattctaccggtttcctggacgccaattgtcggtgtccttgattcccaaacttacaagattgtccgctgcaagtgtcttctccaccaatatgcacatgtcaatgagagttttatactcattaaatgcggtgacacatcatcacatctggtgatatggcaatgcaactaagaggagaaaagagatatcaagagagttttatgaaagatggtagagttttatggcacgaaactctgcatacacgactatctagt

SEQ ID NO: 11016 - DNA, 2858 bp, Zea Mays
cgaaaaactacgcgcccaagcagcgccacgcggcctccccgccgcgcaccacgagccactcgctcgctcccccgtcctagtagtggctagtgcgcgcgcaacacacacggacgcgcgcgctccgtactcgggagtcgggcctcgactcggcacgcgtccgcggctccgcgcccaggccagggtgtgttgtgtcttccagtctccacgctcctgagaccacatctctctctccatggcgacggccatctcgttcccgcgcgcgccgctggtcactccccgcgcgtgcaccccccgccggcttgtccacgtgtcggcggcgcgcgcctctcccccgcgcggaggagggcgcgtcggtcgccgctccccgacggtccccgctgtagcgggagcctcctcctcctcctccggcttggctccggacacaagcgtgccggcgtgggacgctctcggcggcgtctccgtcctcgccgcgggaacaggcaacgctgtggcgctgacggacctgtgggactccgccgagggggtggccgtggttgcgctgctgaggcatttcgggtgcttctgctgctgggagctggcctctgttctcaaggacgccatggcggagttcgactcggcgggggctaagctgatcgccatcggcgtcggaaccccggagaaggctcgcatcctcgccgaccggctgccgtttcctatggactccttgtacgcggaccccgagcgtaaggcttacagcgtgcttggactgtaccatggtctgggccggacgctcttcagtccagctagtgcaaagatatattcgaggctcgactacatcaagaaggcgacggagaactacacgctggaaggcacgcccgccgacctcaccggcgtcctgcagcagggtggaatgttcgtgttcagagggaaggagttgctgtactcgtggagagaccaaggcacgggtgaccatgctcctctggacgacgtgcacagcgcctgccgcaaaattcccagtcgcttgacctgatggaacggattccggcagcacatgaacccgtcccagcattcaggcgctgctatctaggaaatgccatatcggatagagagaccaaaactgctatacatctgcttccaaattggttcgtcctgaacgtgtaaaatccacacatgacatatgtacacaagatgctttttttcccacagaaaactaagaacagtgtatcccgtcgcgatccagtcctccccttgcacgcgtacctctccacgagccaccaaagcaaactggcaaaaactctagagttcctctccttccaaatggtgcaagagatgagatgcttacgggacaggagccaccagtccagtagcgatgtcgtgttggtcagtagcagatgctgcataccatcgatcctgagcgcgtatgtatatgttccatattctgcagcctagctttaaatctttcaacccacggacgcactgagtctaacatatgacatcatgtatgtcacaagtctgtagcctagctttaaatctttcaacccacggatgcactgatccaggctgacctatttatgaaccagttggatgttgccataaagtttaaaccataccctgtgtataaaactcggtatgatttgtctgttgaatatactggtttcttttgtactatgcgtttatgacacctatatatagatgtcgcctcatcatttatttacatgagtttgcttgctactttgttgtccgagactccagattccgctggcagattccgaaaggtggatggctgaatggaatttttttcttcagtatagtaaatggagaaagtaatgttgacactttgttgataaattgaatggcttgtatatagtcccacagcattacaaatttccctgtcgacagtttgttgacaaactggctgagttgtatagctacacaacattatttctgtttttctaattgttatacacgtgcttataaatttctctgatggcagtttgttgacaaattgactgacttgtatagctgcacaacatttttttctaattgttatatccgttcttataaatttctctgttgacagtttgttgacaaaaagctatgattctgcttaataggtgtgcatgaatgatgcgtcccttggtctacatttactgcttgtctcatatgtgttttagggttggattttttgtgttcaaaagcaaaggactgttgaatgcaaggaaagacgagggcgcacaggcgaccgtgcccctttggacgatgtgctcaatatttgctgcgaagttcctgcagcctaacctgatggctcggtcttaagctatctccaacaacttattcattcttatacgtatattcaaactttaatctatgaacagtgcaatatataatgtaaaaaaatgcaaaacagtgttattgtataaaatttggtgcactgcagacggtcttaggtcggattccttcccatcgttacgcatatggtcttcatccattcttttttttttgcagccttgttaaaaaagggaagttggaatatacttgtagcatgcatatcgtcttcatccattatctttttttttttggcatcaacagatccctttctttgttcacaagctggacatgggtctatatattctaccggtttcctggacgccaattgtcggtgtccttgattcccaaacttacaagattgtccgctgcaagtgtcttctccaccaatatgcacatgtcaatgagagttttatactcattaaatgcggtgacacatcatcacatctggtgatatggcaatgcaactaagaggagaaaagagatatcaagagagttttatgaaagatggtagagttttatggcacgaaactctgcatacacgactatctagt

SEQ ID NO: 11017 - DNA, 2871 bp, Zea Mays
cgaaaaactacgcgcccaagcagcgccacgcggcctccccgccgcgcaccacgagccactcgctcgctcccccgtcctagtagtggctagtgcgcgcgcaacacacacggacgcgcgcgctccgtactcgggagtcgggcctcgactcggcacgcgtccgcggctccgcgcccaggccagggtgtgttgtgtcttccagtctccacgctcctgagaccacatctctctctccatggcgacggccatctcgttcccgcgcgcgccgctggtcactccccgcgcgtgcaccccccgccggcttgtccacgtgtcggcggcgcgcgcctctcccccgcgcggaggagggcgcgtcggtcgccgctccccgacggtccccgctgtagcgggagcctcctcctcctcctccggcttggctccggacacaagcgtgccggcgtgggacgctctcggcggcgtctccgtcctcgccgcgggaacaggcaacgctgtggcgctgacggacctgtgggactccgccgagggggtggccgtggttgcgctgctgaggcatttcgggtgcttctgctgctgggagctggcctctgttctcaaggacgccatggcggagttcgactcggcgggggctaagctgatcgccatcggcgtcggaaccccggagaaggctcgcatcctcgccgaccggctgccgtttcctatggactccttgtacgcggaccccgagcgtaaggtgacagactacggcttacagcgtgcttggactgtaccatggtctgggccggacgctcttcagtccagctagtgcaaagatatattcgaggctcgactacatcaagaaggcgacggagaactacacgctggaaggcacgcccgccgacctcaccggcgtcctgcagcagggtggaatgttcgtgttcagagggaaggagttgctgtactcgtggagagaccaaggcacgggtgaccatgctcctctggacgacgtgcacagcgcctgccgcaaaattcccagtcgcttgacctgatggaacggattccggcagcacatgaacccgtcccagcattcaggcgctgctatctaggaaatgccatatcggatagagagaccaaaactgctatacatctgcttccaaattggttcgtcctgaacgtgtaaaatccacacatgacatatgtacacaagatgctttttttcccacagaaaactaagaacagtgtatcccgtcgcgatccagtcctccccttgcacgcgtacctctccacgagccaccaaagcaaactggcaaaaactctagagttcctctccttccaaatggtgcaagagatgagatgcttacgggacaggagccaccagtccagtagcgatgtcgtgttggtcagtagcagatgctgcataccatcgatcctgagcgcgtatgtatatgttccatattctgcagcctagctttaaatctttcaacccacggacgcactgagtctaacatatgacatcatgtatgtcacaagtctgtagcctagctttaaatctttcaacccacggatgcactgatccaggctgacctatttatgaaccagttggatgttgccataaagtttaaaccataccctgtgtataaaactcggtatgatttgtctgttgaatatactggtttcttttgtactatgcgtttatgacacctatatatagatgtcgcctcatcatttatttacatgagtttgcttgctactttgttgtccgagactccagattccgctggcagattccgaaaggtggatggctgaatggaatttttttcttcagtatagtaaatggagaaagtaatgttgacactttgttgataaattgaatggcttgtatatagtcccacagcattacaaatttccctgtcgacagtttgttgacaaactggctgagttgtatagctacacaacattatttctgtttttctaattgttatacacgtgcttataaatttctctgatggcagtttgttgacaaattgactgacttgtatagctgcacaacatttttttctaattgttatatccgttcttataaatttctctgttgacagtttgttgacaaaaagctatgattctgcttaataggtgtgcatgaatgatgcgtcccttggtctacatttactgcttgtctcatatgtgttttagggttggattttttgtgttcaaaagcaaaggactgttgaatgcaaggaaagacgagggcgcacaggcgaccgtgcccctttggacgatgtgctcaatatttgctgcgaagttcctgcagcctaacctgatggctcggtcttaagctatctccaacaacttattcattcttatacgtatattcaaactttaatctatgaacagtgcaatatataatgtaaaaaaatgcaaaacagtgttattgtataaaatttggtgcactgcagacggtcttaggtcggattccttcccatcgttacgcatatggtcttcatccattcttttttttttgcagccttgttaaaaaagggaagttggaatatacttgtagcatgcatatcgtcttcatccattatctttttttttttggcatcaacagatccctttctttgttcacaagctggacatgggtctatatattctaccggtttcctggacgccaattgtcggtgtccttgattcccaaacttacaagattgtccgctgcaagtgtcttctccaccaatatgcacatgtcaatgagagttttatactcattaaatgcggtgacacatcatcacatctggtgatatggcaatgcaactaagaggagaaaagagatatcaagagagttttatgaaagatggtagagttttatggcacgaaactctgcatacacgactatctagt

SEQ ID NO: 11018 - DNA, 784 bp, Zea Mays
ctacatcctagactgaacaaacatgatgctgagcttctatctaccccacagatcgtggaagctagagcaatgcttatgcaacgtttgcaataccagtccaaacttgaaactgagcatctaggtcatcataaggatgaccttggagttcaattacgaggagacaccttgaaagatgctacagaagcattcccattcacgcgatgggaagcagcttctgttatgcccataacagaaattgagattgagaagcatcctatccaagtaactgaagttgcagttgtggacaaatcggtcatcgaagaggagctgcccaagggtcatgctgagacctcaaatgttttgcaagaggcctttgatgatgacatagacgattggttcgaggaggctgatcttgctggccacccaactatccacataggtgacgaggaagacgtgtcttttagtgacttggaagaggatgacgtgaaatgatttatagttgcaattgcaatttgcaaagggagaaatcgacctgtgtattggaaactggacacctctgctgtaaaagaaaatggaggtgaaagttgttcgtagacacctctgctgtgcaagaaaatggagaggtgaaagtttttcgtgaatgggattgggtgtacattgaaaactgagcggtgttgttcgcgaaaagggtgtacattgaaaactgagcggctttgttttgcactcaagctgctagggtgaacgcaatgtgatccactcaagatatgatggggtccaggaagttattggaaccgacgcaccaatg

SEQ ID NO: 11019 - DNA, 1797 bp, Zea Mays
tccaagtagcattatcgccaatcagtaagtaggctccaagagcaccgtccgtcaccacacaacaaagttagcaagtagcagtgaccacctgatccaaaagcaacaagtaggatcatggacgtggggaggcgcctttcgctggcccgcgtgccagcagtggccgcgctgatggttatgctgtcgctgagttcgtccttctgcgtgtcgtcgtcggcggcgagggcggtcgccaggcctggcgccgcggagcagctgcagcggcaccccgtggtgctgatcccgggagcgggcggcaaccagctggaggcgcggctgacggagggctacgagccgtccagcctggtgtgccgggtgtggccactcgtgcgcggccgcggtggctggttccgcctctggttcgacccctccgtgcttgtcgcgccgctcaccaggtgcttcgccgagcggatgacgctctcctatgacgccgacgccgacgactaccgcaacgcgcccggcgtcgagaccagggtctccgacttcggctccacctccaccctccgcggaggacctcgaccccaatctcaagtacccaaagcaaccatttccattcgctcagcttattatatatgctacggtgagttccaagtgctcctcacggggtacatgaacactctggcgagcacgctggaggaggccggctacgaggaaggccgcgacctgttcggcgcgccgtacgacttccggtacgggctggccgggccggggcacccgtcgcaggtgggcagcgcgtacctgcagcgcctcaggctgctggtggagtcggcgtgcgcggccagcggcgggaggcccgcgatcctggtggcgcacagcctgggcggcctcttcgcgctgcagctgctggcgcgcagcccgccgcagtggcgcgcggcgcacgtgcggcgcctcgtcacgctctccacgccgtggggcggctccgtgcaggagatgctcaccttcgcctccggcaacacgctcggggtgcccttcgtcgacccgtccctcatccgcgacgagcagcggaccgccgagagcaacctctggctgctgccgacgcccagcgtgttcggcaacaccacgctggtgctgtcgcgggcccacaaccgctcctactccgccaagaacatgacgcagttcctccgggacatcggcttcgaggaaggcgtggagccgtaccgcgcgcggatacggccgctcgtcgaggccctgccggagcccggcgtgcccctgacgtgcctcgtgggcaccggcgtcgacacggtggagagcctcgtgtacggcgaccgcggcttcgacgaggcccccgagaaggtggtctatggcgacggcgacgggacggtgaacctggccagcctcataggcccgatcaaggcgtggtcggactcgccggcgcaggtcgtcgaggtggtggagctgcccaaggtgtcgcattccggcatgctcagcgacaagagcgcgctggagcagatcataaggatcatcgattctatcaacctgaacgccacgagctatcatcattcctcttagaatgttttgctttagtagacaactaacgatgatttcttttcacttaaatcggcgacagcagctagttttttttatttggaaaaaagtttattgttttttctgtaaggattatcgggatttgctttagctggtgcctattagagttctctatgtatttcttaatcgttatgaataaatttttttgggaaaaagtacatttaaccagggttttaaagtagttatccaaatatactattctagatttctcgctaa

SEQ ID NO: 11020 - DNA, 1505 bp, Zea Mays
tccaagtagcattatcgccaatcagtaagtaggctccaagagcaccgtccgtcaccacacaacaaagttagcaagtagcagtgaccacctgatccaaaagcaacaagtaggatcatggacgtggggaggcgcctttcgctggcccgcgtgccagcagtggccgcgctgatggttatgctgtcgctgagttcgtccttctgcgtgtcgtcgtcggcggcgagggcggtcgccaggcctggcgccgcggagcagctgcagcggcaccccgtggtgctgatcccgggagcgggcggcaaccagctggaggcgcggctgacggagggctacgagccgtccagcctggtgtgccgggtgtggccactcgtgcgcggccgcggtggctggttccgcctctggttcgacccctccgtgcttgtcgcgccgctcaccaggtgcttcgccgagcggatgacgctctcctatgacgccgacgccgacgactaccgcaacgcgcccggcgtcgagaccagggtctccgacttcggctccacctccaccctccgcggaggacctcgaccccaatctcaagtacccaaagcaaccatttccattcgctcagcttattatatatgctacggctcctcacggggtacatgaacactctggcgagcacgctggaggaggccggctacgaggaaggccgcgacctgttcggcgcgccgtacgacttccggtacgggctggccgggccggggcacccgtcgcagcggaccgccgagagcaacctctggctgctgccgacgcccagcgtgttcggcaacaccacgctggtgctgtcgcgggcccacaaccgctcctactccgccaagaacatgacgcagttcctccgggacatcggcttcgaggaaggcgtggagccgtaccgcgcgcggatacggccgctcgtcgaggccctgccggagcccggcgtgcccctgacgtgcctcgtgggcaccggcgtcgacacggtggagagcctcgtgtacggcgaccgcggcttcgacgaggcccccgagaaggtggtctatggcgacggcgacgggacggtgaacctggccagcctcataggcccgatcaaggcgtggtcggactcgccggcgcaggtcgtcgaggtggtggagctgcccaaggtgtcgcattccggcatgctcagcgacaagagcgcgctggagcagatcataaggatcatcgattctatcaacctgaacgccacgagctatcatcattcctcttagaatgttttgctttagtagacaactaacgatgatttcttttcacttaaatcggcgacagcagctagttttttttatttggaaaaaagtttattgttttttctgtaaggattatcgggatttgctttagctggtgcctattagagttctctatgtatttcttaatcgttatgaataaatttttttgggaaaaagtacatttaaccagggttttaaagtagttatccaaatatactattctagatttctcgctaa

SEQ ID NO: 11021 - DNA, 1520 bp, Zea Mays
ctgcaaagcaaggacgacgtaaccactaccgttaccgcgggccttcttgagcggctccaagggatccaagtagcattatcgccaatcagtaagtaggctccaagagcaccgtccgtcaccacacaacaaagttagcaagtagcagtgaccacctgatccaaaagcaacaagtaggatcatggacgtggggaggcgcctttcgctggcccgcgtgccagcagtggccgcgctgatggttatgctgtcgctgagttcgtccttctgcgtgtcgtcgtcggcggcgagggcggtcgccaggcctggcgccgcggagcagctgcagcggcaccccgtggtgctgatcccgggagcgggcggcaaccagctggaggcgcggctgacggagggctacgagccgtccagcctggtgtgccgggtgtggccactcgtgcgcggccgcggtggctggttccgcctctggttcgacccctccgtgcttgtcgcgccgctcaccaggtgcttcgccgagcggatgacgctctcctatgacgccgacgccgacgactaccgcaacgcgcccggcgtcgagaccagggtctccgacttcggctccacctccaccctccgcggaggacctcgaccccaatctcaagctcctcacggggtacatgaacactctggcgagcacgctggaggaggccggctacgaggaaggccgcgacctgttcggcgcgccgtacgacttccggtacgggctggccgggccggggcacccgtcgcagcggaccgccgagagcaacctctggctgctgccgacgcccagcgtgttcggcaacaccacgctggtgctgtcgcgggcccacaaccgctcctactccgccaagaacatgacgcagttcctccgggacatcggcttcgaggaaggcgtggagccgtaccgcgcgcggatacggccgctcgtcgaggccctgccggagcccggcgtgcccctgacgtgcctcgtgggcaccggcgtcgacacggtggagagcctcgtgtacggcgaccgcggcttcgacgaggcccccgagaaggtggtctatggcgacggcgacgggacggtgaacctggccagcctcataggcccgatcaaggcgtggtcggactcgccggcgcaggtcgtcgaggtggtggagctgcccaaggtgtcgcattccggcatgctcagcgacaagagcgcgctggagcagatcataaggatcatcgattctatcaacctgaacgccacgagctatcatcattcctcttagaatgttttgctttagtagacaactaacgatgatttcttttcacttaaatcggcgacagcagctagttttttttatttggaaaaaagtttattgttttttctgtaaggattatcgggatttgctttagctggtgcctattagagttctctatgtatttcttaatcgttatgaataaatttttttgggaaaaagtacatttaaccagggttttaaagtagttatccaaatatactattctagatttctcgctaa

SEQ ID NO: 11022 - DNA, 1823 bp, Zea Mays
cgcttgccttgcctctacccactgctgcaaagcaaggacgacgtaaccactaccgttaccgcgggccttcttgagcggctccaagggatccaagtagcattatcgccaatcagtaagtaggctccaagagcaccgtccgtcaccacacaacaaagttagcaagtagcagtgaccacctgatccaaaagcaacaagtaggatcatggacgtggggaggcgcctttcgctggcccgcgtgccagcagtggccgcgctgatggttatgctgtcgctgagttcgtccttctgcgtgtcgtcgtcggcggcgagggcggtcgccaggcctggcgccgcggagcagctgcagcggcaccccgtggtgctgatcccgggagcgggcggcaaccagctggaggcgcggctgacggagggctacgagccgtccagcctggtgtgccgggtgtggccactcgtgcgcggccgcggtggctggttccgcctctggttcgacccctccgtgcttgtcgcgccgctcaccaggtgcttcgccgagcggatgacgctctcctatgacgccgacgccgacgactaccgcaacgcgcccggcgtcgagaccagggtctccgacttcggctccacctccaccctccgcggaggacctcgaccccaatctcaagctcctcacggggtacatgaacactctggcgagcacgctggaggaggccggctacgaggaaggccgcgacctgttcggcgcgccgtacgacttccggtacgggctggccgggccggggcacccgtcgcaggtgggcagcgcgtacctgcagcgcctcaggctgctggtggagtcggcgtgcgcggccagcggcgggaggcccgcgatcctggtggcgcacagcctgggcggcctcttcgcgctgcagctgctggcgcgcagcccgccgcagtggcgcgcggcgcacgtgcggcgcctcgtcacgctctccacgccgtggggcggctccgtgcaggagatgctcaccttcgcctccggcaacacgctcggggtgcccttcgtcgacccgtccctcatccgcgacgagcagcggaccgccgagagcaacctctggctgctgccgacgcccagcgtgttcggcaacaccacgctggtgctgtcgcgggcccacaaccgctcctactccgccaagaacatgacgcagttcctccgggacatcggcttcgaggaaggcgtggagccgtaccgcgcgcggatacggccgctcgtcgaggccctgccggagcccggcgtgcccctgacgtgcctcgtgggcaccggcgtcgacacggtggagagcctcgtgtacggcgaccgcggcttcgacgaggcccccgagaaggtggtctatggcgacggcgacgggacggtgaacctggccagcctcataggcccgatcaaggcgtggtcggactcgccggcgcaggtcgtcgaggtggtggagctgcccaaggtgtcgcattccggcatgctcagcgacaagagcgcgctggagcagatcataaggatcatcgattctatcaacctgaacgccacgagctatcatcattcctcttagaatgttttgctttagtagacaactaacgatgatttcttttcacttaaatcggcgacagcagctagttttttttatttggaaaaaagtttattgttttttctgtaaggattatcgggatttgctttagctggtgcctattagagttctctatgtatttcttaatcgttatgaataaatttttttgggaaaaagtacatttaaccagggttttaaagtagttatccaaatatactattctagatttctcgctaa

SEQ ID NO: 11023 - DNA, 1993 bp, Zea Mays
cggttttttgtaaaccgtgctccacactccatagcagcggccagtacttttccccaactctgcccagaaatttgaaatccttttcgcttccctcttcacagacctccgacccctgagccccccctcgatggcggatccgccgcctgtgcttactctcctggtgaagaagggcccctgcaaggggaataccctgcagcgctgcgccggcaccgaggcgctccgtgtcggccgcgttgccaagggcaacgacctctccgtgggcgacgcgggcgcgtcgcagaggcatctctccgtcgagttcctcccgccgcctgcggcccggtggaccgtcaccgatctaggctcctcgaacggcaccctcctcaacgctacgcctctcgtggccactatccccgctccgctatccgacggggatctcatcaagatcggggagacaaccgtgctcgccgtctccatatcgaccgatgcaggcccgggaccgggccccgtcgcgacaaggcgttccaggcgaaacgcagcggcggcggcggatgaacagggcccggctgttcctcgcagggctggacggaggaaggctggtgcgacggaagcccccgaagctgggaatgaagtggaggaggaagctgcattgccgactcgccgaggcgggcggaggaagaccgttgagcccgctagggtagagacggaagcggaagatgaagaggaggaagcggcaataccgcgccgtggcaggtcgaggaaggctgcagccacggtcgtccttcctccacagccgcaaaatacgaggtcaacgagagctgctgcaaggaaaggtgacgtattggggtgcgaaaacgatgaggggaaagtgatgaggaccggaaggggacgaggacgggttacaaggtcaagtgcaaggaatgatacaggtgttactcaggaggaagaggagggtgaggtggctgtggccagagatcgggaagggacagctgccgggggcaaggatgaggtggtgccggcggctgggagagttcaagcaaagaggagcagaggaggcagaggccgaggaagggctacgacggcaagtacaaggaaggctgaggatgcggttgctgagaacgatgaaaatgagcaagaggaaagggatatggctgatggcagagaacgaggggggagtccattgagggtgttggccgtgaatgatggttctgaagtggataaggtggcaactgaggacaagttggatggaacttcaaaggcatccatggaagatgagaagatggaggatttgacattgacagagagggcaataaaggggagtgccaatgttaagcatgctcctgctgacaatggtggtgtggaagaagaggaggtgaagaatttgagcaagggagaggaaactgaagtatatcaggaattgagggaaaaggtttcaccagggtcaaagcctgatggtgttggagaagtggaaaagaatgaaaagagggaagctgttggtgccagtggagagagaggccatgttggggtcggggagcccaaaggaagacacagattggagaatatgacactgggggagtggtttgttcagatcgagaaataccttctagcaaagaatgaagaagctgctgaaaaggcgatagctgaagtgcaagagaaacatcggtggttttgtgaacatgttaaaaccctcaagctcaaaaagagtcttgctccttgagattccatgggtgatctggaaatattttggacggactaatgttggatgatttgatgacaccatcatatatcgcaatgaagacagtaatggtgaagcgtcgcaaactgtaggtttgtggtgcagccatcattagcagggtggtagttatttattccgcacttagtagtttgctactattcatgagttggttgtcccttagtttaagtgattcagattcagaggagtgaaccaggggcggatacaagctccgcaccatttggtccgtggtctggagcataattcatgtgtctatagtac

SEQ ID NO: 11024 - DNA, 823 bp, Zea Mays
gatgctttgggcactgagagcttccagaatgccactatggcaattaatttatgtggtgttatatttaaaccagtaaggagtgtcattcatccatggagtaacctgtggcttgttgggtctattattctgaccatgcttcttcatgtagcagtcctgtacattgaaccactatcagcccttttctctgtctctccattgtcgtgggttgagtggaaaattgttctttatctatccttccctgtaattttgattgatgaggttttgaaattcttctcaaggagaagcccacgaggtcgaagattccctttaaggttgtggagacgtgagatacttccaaaagagtcgagagacaattgattttaggcttcagcatatcagatgcatacaatgcaaagcgaaaagcttgtcttctgttagtattgagcctaattttggcaaatgttcatggatgaagatgacattgtacaaatctttatgtggctgatatctagggccgagcatcttcgagaatagagttcgcgactacacaattcattggggggggggggggggggggttctcagaatgctagttttgctcagaaaacatagagaagcttcgaaagccttctcactagttatagacggtgctacacttgtatcagaatgtcagatgcttacaaaaggatgagttcatgcaacacccctttctcccaaccaatgaaatcactgtacgcatcaggttctgtcaaattttcagggtgacagacgccgttctggtatttctgccattttatacatcgcaaaagttttgcaccttgatattgttggaaacaatggcatgt

SEQ ID NO: 11025 - DNA, 2718 bp, Zea Mays
gatcatggtcctttcaacaagttgtgatagcaggaatctgcatacttgtttgggttgtaaatatcggacatttccgagatccttctcatggtggctttgttaggggtgccatccactattttaaggtggctgttgctcttgccgttgcggctattccagaaggtctcccagctgtggtaacaacgtgcttagctcttggtaccaagagaatggctcgcttgaacgccattgtcaggtcacttccctctgtcgagacattaggatgcacaacagtcatttgcagtgacaaaactggtacccttacaacaaacatgatgtctgtgtcaaaggtgtgtgttgtgcggtctgtgcaccagagaccaatgactgatgagtactccattagtgggacaacatttgctcctgatggttttatttatgatgctgatgggttgcagttagagtttccccctcaatcaccatgtctcctccatcttgctatgtgttcagctctttgcaacgagtccactctacaatacaatcctgataaaaaatcttatgaaaaaattggagagtccactgaagttgctctgcgtgtgctggtggagaaggttggtcttcctggttttgactcaatgccttcatccctcaacatgctaactaagcacgagcgtgcatcatactgcaaccattattgggaaaaccagtttagaaagatatctgttttagagttctcccgagaccgcaaaatgatgagtgtcctctgcagtagaaaacaccaagaaattatgttttcaaaaggtgcccctgaaagtataatggccagatgcacacatatattgtgcaatgacgatggttcttcagtaccattgactatggacattcgtaacgagttggaagctagatttcaaagttttgcagggaaagacacgctaaggtgcttagcattagcattaaaacggatgccagctggtcaacaaagtatttgttatggtgatgaggccaacctcacatttataggattggttgggatgcttgatccaccaagagaagaagtttgggatgctatccactcttgtatgtctgcagggatccgtgttatagttgttacgggggataacaagtctacagcagaatcgctgtgtcggcaaattggtgcttttgagcacttgaatgacttttcagggtattcctatacagcatcagaatttgaaggattgcctcctttggaaaggacaaacgcattacaaaggatggttctgttttcaagagtggaaccttcccataagaagatgcttgttgaagccttgcaagcacataatgaagtggttgctatgactggagatggtgtcaatgatgcacctgctctaaagaaagcggatataggaatagcaatgggatcaggaactgcagttgctaagagtgcttcagacatggttttggcggatgacaactttgccacgattgttgcagctgttgcggagggaagggccatatataataacaccaagcagtttatccgatacatgatctcatcaaatattggggaggtggtttgtatttttgtggcggcagtgcttgggatgcctgacacacttatacctgtccagctactctgggtgaaccttgttactgatggattacctgcaactgcaattggtttcaataagcctgatggcaacatcatgtcagtcaagcctcgaaaggttaatgaagctgtggttagtggatggctctttttccgttatttggtcattggagcttatgttggtcttgctactatagcgggttttgtttggtggttcgtttattctgataatggccctaaattaccatattctgaattggtcaactttgattcatgttctacaaggcagacttcatattcttgcagtatatttgaggatcgtcatccatcaactgtttcaatgactgtgcttgttgtcgttgagatgtttaatgccttgaataacctaagtgaaaaccaatctctgcttgtcattcatccatggagtaacctgtggcttgttgggtctattattctgaccatgcttcttcatgtagcagtcctgtacattgaaccactatcagcccttttctctgtctctccattgtcgtgggttgagtggaaaattgttctttatctatccttccctgtaattttgattgatgaggttttgaaattcttctcaaggagaagcccacgaggtcgaagattccctttaaggttgtggagacgtgagatacttccaaaagagtcgagagacaattgattttaggcttcagcatatcagatgcatacaatgcaaagcgaaaagcttgtcttctgttagtattgagcctaattttggcaaatgttcatggatgaagatgacattgtacaaatctttatgtggctgatatctagggccgagcatcttcgagaatagagttcgcgactacacaattcattggggggggggggggggggggttctcagaatgctagttttgctcagaaaacatagagaagcttcgaaagccttctcactagttatagacggtgctacacttgtatcagaatgtcagatgcttacaaaaggatgagttcatgcaacacccctttctcccaaccaatgaaatcactgtacgcatcaggttctgtcaaattttcagggtgacagacgccgttctggtatttctgccattttatacatcgcaaaagttttgcaccttgatattgttggaaacaatggcatgt

SEQ ID NO: 11026 - DNA, 2950 bp, Zea Mays
aattcttacagaggagaaagctgttcagtggcaaaagaggttgaatcaactccagcaatgaatgctgtctaccaggacaaaacaaacattcttttttcgggcactgttgttgtagctggtagagcaagagcaatcgttattgggattggttctaatactgcaatgggaagtatacgtgatgctatgctaagaacagaggatgaagcaacgccgttgaagaaaaagcttgacgagtttggtacttttttggcaaaggtgatagcaggaatctgcatacttgtttgggttgtaaatatcggacatttccgagatccttctcatggtggctttgttaggggtgccatccactattttaaggtggctgttgctcttgccgttgcggctattccagaaggtctcccagctgtggtaacaacgtgcttagctcttggtaccaagagaatggctcgcttgaacgccattgtcaggtcacttccctctgtcgagacattaggatgcacaacagtcatttgcagtgacaaaactggtacccttacaacaaacatgatgtctgtgtcaaaggtgtgtgttgtgcggtctgtgcaccagagaccaatgactgatgagtactccattagtgggacaacatttgctcctgatggttttatttatgatgctgatgggttgcagttagagtttccccctcaatcaccatgtctcctccatcttgctatgtgttcagctctttgcaacgagtccactctacaatacaatcctgataaaaaatcttatgaaaaaattggagagtccactgaagttgctctgcgtgtgctggtggagaaggttggtcttcctggttttgactcaatgccttcatccctcaacatgctaactaagcacgagcgtgcatcatactgcaaccattattgggaaaaccagtttagaaagatatctgttttagagttctcccgagaccgcaaaatgatgagtgtcctctgcagtagaaaacaccaagaaattatgttttcaaaaggtgcccctgaaagtataatggccagatgcacacatatattgtgcaatgacgatggttcttcagtaccattgactatggacattcgtaacgagttggaagctagatttcaaagttttgcagggaaagacacgctaaggtgcttagcattagcattaaaacggatgccagctggtcaacaaagtatttgttatggtgatgaggccaacctcacatttataggattggttgggatgcttgatccaccaagagaagaagtttgggatgctatccactcttgtatgtctgcagggatccgtgttatagttgttacgggggataacaagtctacagcagaatcgctgtgtcggcaaattggtgcttttgagcacttgaatgacttttcagggtattcctatacagcatcagaatttgaaggattgcctcctttggaaaggacaaacgcattacaaaggatggttctgttttcaagagtggaaccttcccataagaagatgcttgttgaagccttgcaagcacataatgaagtggttgctatgactggagatggtgtcaatgatgcacctgctctaaagaaagcggatataggaatagcaatgggatcaggaactgcagttgctaagagtgcttcagacatggttttggcggatgacaactttgccacgattgttgcagctgttgcggagggaagggccatatataataacaccaagcagtttatccgatacatgatctcatcaaatattggggaggtggtttgtatttttgtggcggcagtgcttgggatgcctgacacacttatacctgtccagctactctgggtgaaccttgttactgatggattacctgcaactgcaattggtttcaataagcctgatggcaacatcatgtcagtcaagcctcgaaaggttaatgaagctgtggttagtggatggctctttttccgttatttggtcattggagcttatgttggtcttgctactatagcgggttttgtttggtggttcgtttattctgataatggccctaaattaccatattctgaattggtcaactttgattcatgttctacaaggcagacttcatattcttgcagtatatttgaggatcgtcatccatcaactgtttcaatgactgtgcttgttgtcgttgagatgtttaatgccttgaataacctaagtgaaaaccaatctctgcttgtcattcatccatggagtaacctgtggcttgttgggtctattattctgaccatgcttcttcatgtagcagtcctgtacattgaaccactatcagcccttttctctgtctctccattgtcgtgggttgagtggaaaattgttctttatctatccttccctgtaattttgattgatgaggttttgaaattcttctcaaggagaagcccacgaggtcgaagattccctttaaggttgtggagacgtgagatacttccaaaagagtcgagagacaattgattttaggcttcagcatatcagatgcatacaatgcaaagcgaaaagcttgtcttctgttagtattgagcctaattttggcaaatgttcatggatgaagatgacattgtacaaatctttatgtggctgatatctagggccgagcatcttcgagaatagagttcgcgactacacaattcattggggggggggggggggggggttctcagaatgctagttttgctcagaaaacatagagaagcttcgaaagccttctcactagttatagacggtgctacacttgtatcagaatgtcagatgcttacaaaaggatgagttcatgcaacacccctttctcccaaccaatgaaatcactgtacgcatcaggttctgtcaaattttcagggtgacagacgccgttctggtatttctgccattttatacatcgcaaaagttttgcaccttgatattgttggaaacaatggcatgt

SEQ ID NO: 11027 - DNA, 3024 bp, Zea Mays
caccaattgcgtgttgatcaagcaattcttacagaaagctgttcagtggcaaaagaggttgaatcaactccagcaatgaatgctgtctaccaggacaaaacaaacattcttttttcgggcactgttgttgtagctggtagagcaagagcaatcgttattgggattggttctaatactgcaatgggaagtatacgtgatgctatgctaagaacagaggatcctcacccctcgatttatatggtgattattctgctcacagttaaaaatctcacaatattacaggaagcaacgccgttgaagaaaaagcttgacgagtttggtacttttttggcaaaggtgatagcaggaatctgcatacttgtttgggttgtaaatatcggacatttccgagatccttctcatggtggctttgttaggggtgccatccactattttaaggtggctgttgctcttgccgttgcggctattccagaaggtctcccagctgtggtaacaacgtgcttagctcttggtaccaagagaatggctcgcttgaacgccattgtcaggtcacttccctctgtcgagacattaggatgcacaacagtcatttgcagtgacaaaactggtacccttacaacaaacatgatgtctgtgtcaaaggtgtgtgttgtgcggtctgtgcaccagagaccaatgactgatgagtactccattagtgggacaacatttgctcctgatggttttatttatgatgctgatgggttgcagttagagtttccccctcaatcaccatgtctcctccatcttgctatgtgttcagctctttgcaacgagtccactctacaatacaatcctgataaaaaatcttatgaaaaaattggagagtccactgaagttgctctgcgtgtgctggtggagaaggttggtcttcctggttttgactcaatgccttcatccctcaacatgctaactaagcacgagcgtgcatcatactgcaaccattattgggaaaaccagtttagaaagatatctgttttagagttctcccgagaccgcaaaatgatgagtgtcctctgcagtagaaaacaccaagaaattatgttttcaaaaggtgcccctgaaagtataatggccagatgcacacatatattgtgcaatgacgatggttcttcagtaccattgactatggacattcgtaacgagttggaagctagatttcaaagttttgcagggaaagacacgctaaggtgcttagcattagcattaaaacggatgccagctggtcaacaaagtatttgttatggtgatgaggccaacctcacatttataggattggttgggatgcttgatccaccaagagaagaagtttgggatgctatccactcttgtatgtctgcagggatccgtgttatagttgttacgggggataacaagcagaatcgctgtgtcggcaaattggtgcttttgagcacttgaatgacttttcagggtattcctatacagcatcagaatttgaaggattgcctcctttggaaaggacaaacgcattacaaaggatggttctgttttcaagagtggaaccttcccataagaagatgcttgttgaagccttgcaagcacataatgaagtggttgctatgactggagatggtgtcaatgatgcacctgctctaaagaaagcggatataggaatagcaatgggatcaggaactgcagttgctaagagtgcttcagacatggttttggcggatgacaactttgccacgattgttgcagctgttgcggagggaagggccatatataataacaccaagcagtttatccgatacatgatctcatcaaatattggggaggtggtttgtatttttgtggcggcagtgcttgggatgcctgacacacttatacctgtccagctactctgggtgaaccttgttactgatggattacctgcaactgcaattggtttcaataagcctgatggcaacatcatgtcagtcaagcctcgaaaggttaatgaagctgtggttagtggatggctctttttccgttatttggtcattggagcttatgttggtcttgctactatagcgggttttgtttggtggttcgtttattctgataatggccctaaattaccatattctgaattggtcaactttgattcatgttctacaaggcagacttcatattcttgcagtatatttgaggatcgtcatccatcaactgtttcaatgactgtgcttgttgtcgttgagatgtttaatgccttgaataacctaagtgaaaaccaatctctgcttgtcattcatccatggagtaacctgtggcttgttgggtctattattctgaccatgcttcttcatgtagcagtcctgtacattgaaccactatcagcccttttctctgtctctccattgtcgtgggttgagtggaaaattgttctttatctatccttccctgtaattttgattgatgaggttttgaaattcttctcaaggagaagcccacgaggtcgaagattccctttaaggttgtggagacgtgagatacttccaaaagagtcgagagacaattgattttaggcttcagcatatcagatgcatacaatgcaaagcgaaaagcttgtcttctgttagtattgagcctaattttggcaaatgttcatggatgaagatgacattgtacaaatctttatgtggctgatatctagggccgagcatcttcgagaatagagttcgcgactacacaattcattggggggggggggggggggggttctcagaatgctagttttgctcagaaaacatagagaagcttcgaaagccttctcactagttatagacggtgctacacttgtatcagaatgtcagatgcttacaaaaggatgagttcatgcaacacccctttctcccaaccaatgaaatcactgtacgcatcaggttctgtcaaattttcagggtgacagacgccgttctggtatttctgccattttatacatcgcaaaagttttgcaccttgatattgttggaaacaatggcatgt

SEQ ID NO: 11028 - DNA, 3064 bp, Zea Mays
cttttctatacttccagcaacagaacttgtcccaggagatatagttgaagtaggagttggttgcaaagttccggctgacatgagaatggttgaaatgttaagccaccaattgcgtgttgatcaagcaattcttacaggagaaagctgttcagtggcaaaagaggttgaatcaactccagcaatgaatgctgtctaccaggacaaaacaaacattcttttttcgggcactgttgttgtagctggtagagcaagagcaatcgttattgggattggttctaatactgcaatgggaagtatacgtgatgctatgctaagaacagaggatgaagcaacgccgttgaagaaaaagcttgacgagtttggtacttttttggcaaaggaatctgcatacttgtttgggttgtaaatatcggacatttccgagatccttctcatggtggctttgttaggggtgccatccactattttaaggtggctgttgctcttgccgttgcggctattccagaaggtctcccagctgtggtaacaacgtgcttagctcttggtaccaagagaatggctcgcttgaacgccattgtcaggtcacttccctctgtcgagacattaggatgcacaacagtcatttgcagtgacaaaactggtacccttacaacaaacatgatgtctgtgtcaaaggtgtgtgttgtgcggtctgtgcaccagagaccaatgactgatgagtactccattagtgggacaacatttgctcctgatggttttatttatgatgctgatgggttgcagttagagtttccccctcaatcaccatgtctcctccatcttgctatgtgttcagctctttgcaacgagtccactctacaatacaatcctgataaaaaatcttatgaaaaaattggagagtccactgaagttgctctgcgtgtgctggtggagaaggttggtcttcctggttttgactcaatgccttcatccctcaacatgctaactaagcacgagcgtgcatcatactgcaaccattattgggaaaaccagtttagaaagatatctgttttagagttctcccgagaccgcaaaatgatgagtgtcctctgcagtagaaaacaccaagaaattatgttttcaaaaggtgcccctgaaagtataatggccagatgcacacatatattgtgcaatgacgatggttcttcagtaccattgactatggacattcgtaacgagttggaagctagatttcaaagttttgcagggaaagacacgctaaggtgcttagcattagcattaaaacggatgccagctggtcaacaaagtatttgttatggtgatgaggccaacctcacatttataggattggttgggatgcttgatccaccaagagaagaagtttgggatgctatccactcttgtatgtctgcagggatccgtgttatagttgttacgggggataacaagtctacagcagaatcgctgtgtcggcaaattggtgcttttgagcacttgaatgacttttcagggtattcctatacagcatcagaatttgaaggattgcctcctttggaaaggacaaacgcattacaaaggatggttctgttttcaagagtggaaccttcccataagaagatgcttgttgaagccttgcaagcacataatgaagtggttgctatgactggagatggtgtcaatgatgcacctgctctaaagaaagcggatataggaatagcaatgggatcaggaactgcagttgctaagagtgcttcagacatggttttggcggatgacaactttgccacgattgttgcagctgttgcggagggaagggccatatataataacaccaagcagtttatccgatacatgatctcatcaaatattggggaggtggtttgtatttttgtggcggcagtgcttgggatgcctgacacacttatacctgtccagctactctgggtgaaccttgttactgatggattacctgcaactgcaattggtttcaataagcctgatggcaacatcatgtcagtcaagcctcgaaaggttaatgaagctgtggttagtggatggctctttttccgttatttggtcattggagcttatgttggtcttgctactatagcgggttttgtttggtggttcgtttattctgataatggccctaaattaccatattctgaattggtcaactttgattcatgttctacaaggcagacttcatattcttgcagtatatttgaggatcgtcatccatcaactgtttcaatgactgtgcttgttgtcgttgagatgtttaatgccttgaataacctaagtgaaaaccaatctctgcttgtcattcatccatggagtaacctgtggcttgttgggtctattattctgaccatgcttcttcatgtagcagtcctgtacattgaaccactatcagcccttttctctgtctctccattgtcgtgggttgagtggaaaattgttctttatctatccttccctgtaattttgattgatgaggttttgaaattcttctcaaggagaagcccacgaggtcgaagattccctttaaggttgtggagacgtgagatacttccaaaagagtcgagagacaattgattttaggcttcagcatatcagatgcatacaatgcaaagcgaaaagcttgtcttctgttagtattgagcctaattttggcaaatgttcatggatgaagatgacattgtacaaatctttatgtggctgatatctagggccgagcatcttcgagaatagagttcgcgactacacaattcattggggggggggggggggggggttctcagaatgctagttttgctcagaaaacatagagaagcttcgaaagccttctcactagttatagacggtgctacacttgtatcagaatgtcagatgcttacaaaaggatgagttcatgcaacacccctttctcccaaccaatgaaatcactgtacgcatcaggttctgtcaaattttcagggtgacagacgccgttctggtatttctgccattttatacatcgcaaaagttttgcaccttgatattgttggaaacaatggcatgt

SEQ ID NO: 11029 - DNA, 3075 bp, Zea Mays
gcttttctatacttccagcaacagaacttgtcccaggagatatagttgaagtaggagttggttgcaaagttccggctgacatgagaatggttgaaatgttaagccaccaattgcgtgttgatcaagcaattcttacaggagaaagctgttcagtggcaaaagaggttgaatcaactccagcaatgaatgctgtctaccaggacaaaacaaacattcttttttcgggcactgttgttgtagctggtagagcaagagcaatcgttattgggattggttctaatactgcaatgggaagtatacgtgatgctatgctaagaacagaggaggaagcaacgccgttgaagaaaaagcttgacgagtttggtacttttttggcaaaggtgatagcaggaatctgcatacttgtttgggttgtaaatatcggacatttccgagatccttctcatggtggctttgttaggggtgccatccactattttaaggtggctgttgctcttgccgttgcggctattccagaaggtctcccagctgtggtaacaacgtgcttagctcttggtaccaagagaatggctcgcttgaacgccattgtcaggtcacttccctctgtcgagacattaggatgcacaacagtcatttgcagtgacaaaactggtacccttacaacaaacatgatgtctgtgtcaaaggtgtgtgttgtgcggtctgtgcaccagagaccaatgactgatgagtactccattagtgggacaacatttgctcctgatggttttatttatgatgctgatgggttgcagttagagtttccccctcaatcaccatgtctcctccatcttgctatgtgttcagctctttgcaacgagtccactctacaatacaatcctgataaaaaatcttatgaaaaaattggagagtccactgaagttgctctgcgtgtgctggtggagaaggttggtcttcctggttttgactcaatgccttcatccctcaacatgctaactaagcacgagcgtgcatcatactgcaaccattattgggaaaaccagtttagaaagatatctgttttagagttctcccgagaccgcaaaatgatgagtgtcctctgcagtagaaaacaccaagaaattatgttttcaaaaggtgcccctgaaagtataatggccagatgcacacatatattgtgcaatgacgatggttcttcagtaccattgactatggacattcgtaacgagttggaagctagatttcaaagttttgcagggaaagacacgctaaggtgcttagcattagcattaaaacggatgccagctggtcaacaaagtatttgttatggtgatgaggccaacctcacatttataggattggttgggatgcttgatccaccaagagaagaagtttgggatgctatccactcttgtatgtctgcagggatccgtgttatagttgttacgggggataacaagtctacagcagaatcgctgtgtcggcaaattggtgcttttgagcacttgaatgacttttcagggtattcctatacagcatcagaatttgaaggattgcctcctttggaaaggacaaacgcattacaaaggatggttctgttttcaagagtggaaccttcccataagaagatgcttgttgaagccttgcaagcacataatgaagtggttgctatgactggagatggtgtcaatgatgcacctgctctaaagaaagcggatataggaatagcaatgggatcaggaactgcagttgctaagagtgcttcagacatggttttggcggatgacaactttgccacgattgttgcagctgttgcggagggaagggccatatataataacaccaagcagtttatccgatacatgatctcatcaaatattggggaggtggtttgtatttttgtggcggcagtgcttgggatgcctgacacacttatacctgtccagctactctgggtgaaccttgttactgatggattacctgcaactgcaattggtttcaataagcctgatggcaacatcatgtcagtcaagcctcgaaaggttaatgaagctgtggttagtggatggctctttttccgttatttggtcattggagcttatgttggtcttgctactatagcgggttttgtttggtggttcgtttattctgataatggccctaaattaccatattctgaattggtcaactttgattcatgttctacaaggcagacttcatattcttgcagtatatttgaggatcgtcatccatcaactgtttcaatgactgtgcttgttgtcgttgagatgtttaatgccttgaataacctaagtgaaaaccaatctctgcttgtcattcatccatggagtaacctgtggcttgttgggtctattattctgaccatgcttcttcatgtagcagtcctgtacattgaaccactatcagcccttttctctgtctctccattgtcgtgggttgagtggaaaattgttctttatctatccttccctgtaattttgattgatgaggttttgaaattcttctcaaggagaagcccacgaggtcgaagattccctttaaggttgtggagacgtgagatacttccaaaagagtcgagagacaattgattttaggcttcagcatatcagatgcatacaatgcaaagcgaaaagcttgtcttctgttagtattgagcctaattttggcaaatgttcatggatgaagatgacattgtacaaatctttatgtggctgatatctagggccgagcatcttcgagaatagagttcgcgactacacaattcattggggggggggggggggggggttctcagaatgctagttttgctcagaaaacatagagaagcttcgaaagccttctcactagttatagacggtgctacacttgtatcagaatgtcagatgcttacaaaaggatgagttcatgcaacacccctttctcccaaccaatgaaatcactgtacgcatcaggttctgtcaaattttcagggtgacagacgccgttctggtatttctgccattttatacatcgcaaaagttttgcaccttgatattgttggaaacaatggcatgt

SEQ ID NO: 11030 - DNA, 3078 bp, Zea Mays
gttgcttttctatacttccagcaacagaacttgtcccaggagatatagttgaagtaggagttggttgcaaagttccggctgacatgagaatggttgaaatgttaagccaccaattgcgtgttgatcaagcaattcttacaggagaaagctgttcagtggcaaaagaggttgaatcaactccagcaatgaatgctgtctaccaggacaaaacaaacattcttttttcgggcactgttgttgtagctggtagagcaagagcaatcgttattgggattggttctaatactgcaatgggaagtatacgtgatgctatgctaagaacagaggatgaagcaacgccgttgaagaaaaagcttgacgagtttggtacttttttggcaaaggtgatagcaggaatctgcatacttgtttgggttgtaaatatcggacatttccgagatccttctcatggtggctttgttaggggtgccatccactattttaaggtggctgttgctcttgccgttgcggctattccagaaggtctcccagctgtggtaacaacgtgcttagctcttggtaccaagagaatggctcgcttgaacgccattgtcaggtcacttccctctgtcgagacattaggatgcacaacagtcatttgcagtgacaaaactggtacccttacaacaaacatgatgtctgtgtcaaaggtgtgtgttgtgcggtctgtgcaccagagaccaatgactgatgagtactccattagtgggacaacatttgctcctgatggttttatttatgatgctgatgggttgcagttagagtttccccctcaatcaccatgtctcctccatcttgctatgtgttcagctctttgcaacgagtccactctacaatacaatcctgataaaaaatcttatgaaaaaattggagagtccactgaagttgctctgcgtgtgctggtggagaaggttggtcttcctggttttgactcaatgccttcatccctcaacatgctaactaagcacgagcgtgcatcatactgcaaccattattgggaaaaccagtttagaaagatatctgttttagagttctcccgagaccgcaaaatgatgagtgtcctctgcagtagaaaacaccaagaaattatgttttcaaaaggtgcccctgaaagtataatggccagatgcacacatatattgtgcaatgacgatggttcttcagtaccattgactatggacattcgtaacgagttggaagctagatttcaaagttttgcagggaaagacacgctaaggtgcttagcattagcattaaaacggatgccagctggtcaacaaagtatttgttatggtgatgaggccaacctcacatttataggattggttgggatgcttgatccaccaagagaagaagtttgggatgctatccactcttgtatgtctgcagggatccgtgttatagttgttacgggggataacaagtctacagcagaatcgctgtgtcggcaaattggtgcttttgagcacttgaatgacttttcagggtattcctatacagcatcagaatttgaaggattgcctcctttggaaaggacaaacgcattacaaaggatggttctgttttcaagagtggaaccttcccataagaagatgcttgttgaagccttgcaagcacataatgaagtggttgctatgactggagatggtgtcaatgatgcacctgctctaaagaaagcggatataggaatagcaatgggatcaggaactgcagttgctaagagtgcttcagacatggttttggcggatgacaactttgccacgattgttgcagctgttgcggagggaagggccatatataataacaccaagcagtttatccgatacatgatctcatcaaatattggggaggtggtttgtatttttgtggcggcagtgcttgggatgcctgacacacttatacctgtccagctactctgggtgaaccttgttactgatggattacctgcaactgcaattggtttcaataagcctgatggcaacatcatgtcagtcaagcctcgaaaggttaatgaagctgtggttagtggatggctctttttccgttatttggtcattggagcttatgttggtcttgctactatagcgggttttgtttggtggttcgtttattctgataatggccctaaattaccatattctgaattggtcaactttgattcatgttctacaaggcagacttcatattcttgcagtatatttgaggatcgtcatccatcaactgtttcaatgactgtgcttgttgtcgttgagatgtttaatgccttgaataacctaagtgaaaaccaatctctgcttgtcattcatccatggagtaacctgtggcttgttgggtctattattctgaccatgcttcttcatgtagcagtcctgtacattgaaccactatcagcccttttctctgtctctccattgtcgtgggttgagtggaaaattgttctttatctatccttccctgtaattttgattgatgaggttttgaaattcttctcaaggagaagcccacgaggtcgaagattccctttaaggttgtggagacgtgagatacttccaaaagagtcgagagacaattgattttaggcttcagcatatcagatgcatacaatgcaaagcgaaaagcttgtcttctgttagtattgagcctaattttggcaaatgttcatggatgaagatgacattgtacaaatctttatgtggctgatatctagggccgagcatcttcgagaatagagttcgcgactacacaattcattggggggggggggggggggggttctcagaatgctagttttgctcagaaaacatagagaagcttcgaaagccttctcactagttatagacggtgctacacttgtatcagaatgtcagatgcttacaaaaggatgagttcatgcaacacccctttctcccaaccaatgaaatcactgtacgcatcaggttctgtcaaattttcagggtgacagacgccgttctggtatttctgccattttatacatcgcaaaagttttgcaccttgatattgttggaaacaatggcatgt

SEQ ID NO: 11031 - DNA, 3045 bp, Zea Mays
gttgcttttctatacttccagcaacagaacttgtcccaggagatatagttgaagtaggagttggttgcaaagttccggctgacatgagaatggttgaaatgttaagccaccaattgcgtgttgatcaagcaattcttacaggagaaagctgttcagtggcaaaagaggttgaatcaactccagcaatgaatgctgtctaccaggacaaaacaaacattcttttttcgggcactgttgttgtagctggtagagcaagagcaatcgttattgggattggttctaatactgcaatgggaagtatacgtgatgctatgctaagaacagaggatgaagcaacgccgttgaagaaaaagcttgacgagtttggtacttttttggcaaaggtgatagcaggaatctgcatacttgtttgggttgtaaatatcggacatttccgagatccttctcatggtggctttgttaggggtgccatccactattttaaggtggctgttgctcttgccgttgcggctattccagaaggtctcccagctgtggtaacaacgtgcttagctcttggtaccaagagaatggctcgcttgaacgccattgtcaggtcacttccctctgtcgagacattaggatgcacaacagtcatttgcagtgacaaaactggtacccttacaacaaacatgatgtctgtgtcaaaggtgtgtgttgtgcggtctgtgcaccagagaccaatgactgatgagtactccattagtgggacaacatttgctcctgatggttttatttatgatgctgatgggttgcagttagagtttccccctcaatcaccatgtctcctccatcttgctatgtgttcagctctttgcaacgagtccactctacaatacaatcctgataaaaaatcttatgaaaaaattggagagtccactgaagttgctctgcgtgtgctggtggagaaggttggtcttcctggttttgactcaatgccttcatccctcaacatgctaactaagcacgagcgtgcatcatactgcaaccattattgggaaaaccagtttagaaagatatctgttttagagttctcccgagaccgcaaaatgatgagtgtcctctgcagtagaaaacaccaagaaattatgttttcaaaaggtgcccctgaaagtataatggccagatgcacacatatattgtgcaatgacgatggttcttcagtaccattgactatggacattcgtaacgagttggaagctagatttcaaagttttgcagggaaagacacgctaaggtgcttagcattagcattaaaacggatgccagctggtcaacaaagtatttgttatggtgatgaggccaacctcacatttataggattggttgggatgcttgatccaccaagagaagaagtttgggatgctatccactcttgtatgtctgcagggatccgtgttatagttgttacgggggataacaaggttggtgaagtcttggcttaacttttgagtacttttgctactgcatcagaatttgaaggattgcctcctttggaaaggacaaacgcattacaaaggatggttctgttttcaagagtggaaccttcccataagaagatgcttgttgaagccttgcaagcacataatgaagtggttgctatgactggagatggtgtcaatgatgcacctgctctaaagaaagcggatataggaatagcaatgggatcaggaactgcagttgctaagagtgcttcagacatggttttggcggatgacaactttgccacgattgttgcagctgttgcggagggaagggccatatataataacaccaagcagtttatccgatacatgatctcatcaaatattggggaggtggtttgtatttttgtggcggcagtgcttgggatgcctgacacacttatacctgtccagctactctgggtgaaccttgttactgatggattacctgcaactgcaattggtttcaataagcctgatggcaacatcatgtcagtcaagcctcgaaaggttaatgaagctgtggttagtggatggctctttttccgttatttggtcattggagcttatgttggtcttgctactatagcgggttttgtttggtggttcgtttattctgataatggccctaaattaccatattctgaattggtcaactttgattcatgttctacaaggcagacttcatattcttgcagtatatttgaggatcgtcatccatcaactgtttcaatgactgtgcttgttgtcgttgagatgtttaatgccttgaataacctaagtgaaaaccaatctctgcttgtcattcatccatggagtaacctgtggcttgttgggtctattattctgaccatgcttcttcatgtagcagtcctgtacattgaaccactatcagcccttttctctgtctctccattgtcgtgggttgagtggaaaattgttctttatctatccttccctgtaattttgattgatgaggttttgaaattcttctcaaggagaagcccacgaggtcgaagattccctttaaggttgtggagacgtgagatacttccaaaagagtcgagagacaattgattttaggcttcagcatatcagatgcatacaatgcaaagcgaaaagcttgtcttctgttagtattgagcctaattttggcaaatgttcatggatgaagatgacattgtacaaatctttatgtggctgatatctagggccgagcatcttcgagaatagagttcgcgactacacaattcattggggggggggggggggggggttctcagaatgctagttttgctcagaaaacatagagaagcttcgaaagccttctcactagttatagacggtgctacacttgtatcagaatgtcagatgcttacaaaaggatgagttcatgcaacacccctttctcccaaccaatgaaatcactgtacgcatcaggttctgtcaaattttcagggtgacagacgccgttctggtatttctgccattttatacatcgcaaaagttttgcaccttgatattgttggaaacaatggcatgt

SEQ ID NO: 11032 - DNA, 3339 bp, Zea Mays
aagttagttctgaagcagtttgatgatttactcgtcaaaatattgatagcagctgctgtgatctcgttccttttggcccggatgaatggtgaaactggattatcagcatttttggaaccttcggttatctttatgatactggcagcaaatgcagctgtgggtgtgattacagaaacgaatgctgaaaaagctcttgaggttgcttttctatacttccagcaacagaacttgtcccaggagatatagttgaagtaggagttggttgcaaagttccggctgacatgagaatggttgaaatgttaagccaccaattgcgtgttgatcaagcaattcttacaggagaaagctgttcagtggcaaaagaggttgaatcaactccagcaatgaatgctgtctaccaggacaaaacaaacattcttttttcgggcactgttgttgtagctggtagagcaagagcaatcgttattgggattggttctaatactgcaatgggaagtatacgtgatgctatgctaagaacagaggatcctcacccctcgatttatatggtgattattctgctcacagttaaaaatctcacaatattacaggaagcaacgccgttgaagaaaaagcttgacgagtttggtacttttttggcaaaggtgatagcaggaatctgcatacttgtttgggttgtaaatatcggacatttccgagatccttctcatggtggctttgttaggggtgccatccactattttaaggtggctgttgctcttgccgttgcggctattccagaaggtctcccagctgtggtaacaacgtgcttagctcttggtaccaagagaatggctcgcttgaacgccattgtcaggtcacttccctctgtcgagacattaggatgcacaacagtcatttgcagtgacaaaactggtacccttacaacaaacatgatgtctgtgtcaaaggtgtgtgttgtgcggtctgtgcaccagagaccaatgactgatgagtactccattagtgggacaacatttgctcctgatggttttatttatgatgctgatgggttgcagttagagtttccccctcaatcaccatgtctcctccatcttgctatgtgttcagctctttgcaacgagtccactctacaatacaatcctgataaaaaatcttatgaaaaaattggagagtccactgaagttgctctgcgtgtgctggtggagaaggttggtcttcctggttttgactcaatgccttcatccctcaacatgctaactaagcacgagcgtgcatcatactgcaaccattattgggaaaaccagtttagaaagatatctgttttagagttctcccgagaccgcaaaatgatgagtgtcctctgcagtagaaaacaccaagaaattatgttttcaaaaggtgcccctgaaagtataatggccagatgcacacatatattgtgcaatgacgatggttcttcagtaccattgactatggacattcgtaacgagttggaagctagatttcaaagttttgcagggaaagacacgctaaggtgcttagcattagcattaaaacggatgccagctggtcaacaaagtatttgttatggtgatgaggccaacctcacatttataggattggttgggatgcttgatccaccaagagaagaagtttgggatgctatccactcttgtatgtctgcagggatccgtgttatagttgttacgggggataacaagtctacagcagaatcgctgtgtcggcaaattggtgcttttgagcacttgaatgacttttcagggtattcctatacagcatcagaatttgaaggattgcctcctttggaaaggacaaacgcattacaaaggatggttctgttttcaagagtggaaccttcccataagaagatgcttgttgaagccttgcaagcacataatgaagtggttgctatgactggagatggtgtcaatgatgcacctgctctaaagaaagcggatataggaatagcaatgggatcaggaactgcagttgctaagagtgcttcagacatggttttggcggatgacaactttgccacgattgttgcagctgttgcggagggaagggccatatataataacaccaagcagtttatccgatacatgatctcatcaaatattggggaggtggtttgtatttttgtggcggcagtgcttgggatgcctgacacacttatacctgtccagctactctgggtgaaccttgttactgatggattacctgcaactgcaattggtttcaataagcctgatggcaacatcatgtcagtcaagcctcgaaaggttaatgaagctgtggttagtggatggctctttttccgttatttggtcattggagcttatgttggtcttgctactatagcgggttttgtttggtggttcgtttattctgataatggccctaaattaccatattctgaattggtcaactttgattcatgttctacaaggcagacttcatattcttgcagtatatttgaggatcgtcatccatcaactgtttcaatgactgtgcttgttgtcgttgagatgtttaatgccttgaataacctaagtgaaaaccaatctctgcttgtcattcatccatggagtaacctgtggcttgttgggtctattattctgaccatgcttcttcatgtagcagtcctgtacattgaaccactatcagcccttttctctgtctctccattgtcgtgggttgagtggaaaattgttctttatctatccttccctgtaattttgattgatgaggttttgaaattcttctcaaggagaagcccacgaggtcgaagattccctttaaggttgtggagacgtgagatacttccaaaagagtcgagagacaattgattttaggcttcagcatatcagatgcatacaatgcaaagcgaaaagcttgtcttctgttagtattgagcctaattttggcaaatgttcatggatgaagatgacattgtacaaatctttatgtggctgatatctagggccgagcatcttcgagaatagagttcgcgactacacaattcattggggggggggggggggggggttctcagaatgctagttttgctcagaaaacatagagaagcttcgaaagccttctcactagttatagacggtgctacacttgtatcagaatgtcagatgcttacaaaaggatgagttcatgcaacacccctttctcccaaccaatgaaatcactgtacgcatcaggttctgtcaaattttcagggtgacagacgccgttctggtatttctgccattttatacatcgcaaaagttttgcaccttgatattgttggaaacaatggcatgt

SEQ ID NO: 11033 - DNA, 3347 bp, Zea Mays
cagtgcttcctcaagaagaaagtactcccttttggaagttagttctgaagcagtttgatgatttactcgtcaaaatattgatagcagctgctgtgatctcgttccttttggcccggatgaatggtgaaactggattatcagcatttttggaaccttcggttatctttatgatactggcagcaaatgcagctgtgggtgtgattacagaaacgaatgctgaaaaagctcttgaggttgcttttctatacttccagcaacagaacttgtcccaggagatatagttgaagtaggagttggttgcaaagttccggctgacatgagaatggttgaaatgttaagccaccaattgcgtgttgatcaagcaattcttacaggagaaagctgttcagtggcaaaagaggttgaatcaactccagcaatgaatgctgtctaccaggacaaaacaaacattcttttttcgggcactgttgttgtagctggtagagcaagagcaatcgttattgggattggttctaatactgcaatgggaagtatacgtgatgctatgctaagaacagaggatgaagcaacgccgttgaagaaaaagcttgacgagtttggtacttttttggcaaaggtgatagcaggaatctgcatacttgtttgggttgtaaatatcggacatttccgagatccttctcatggtggctttgttaggggtgccatccactattttaaggtggctgttgctcttgccgttgcggctattccagaaggtctcccagctgtggtaacaacgtgcttagctcttggtaccaagagaatggctcgcttgaacgccattgtcaggtcacttccctctgtcgagacattaggatgcacaacagtcatttgcagtgacaaaactggtacccttacaacaaacatgatgtctgtgtcaaaggtgtgtgttgtgcggtctgtgcaccagagaccaatgactgatgagtactccattagtgggacaacatttgctcctgatggttttatttatgatgctgatgggttgcagttagagtttccccctcaatcaccatgtctcctccatcttgctatgtgttcagctctttgcaacgagtccactctacaatacaatcctgataaaaaatcttatgaaaaaattggagagtccactgaagttgctctgcgtgtgctggtggagaaggttggtcttcctggttttgactcaatgccttcatccctcaacatgctaactaagcacgagcgtgcatcatactgcaaccattattgggaaaaccagtttagaaagatatctgttttagagttctcccgagaccgcaaaatgatgagtgtcctctgcagtagaaaacaccaagaaattatgttttcaaaaggtgcccctgaaagtataatggccagatgcacacatatattgtgcaatgacgatggttcttcagtaccattgactatggacattcgtaacgagttggaagctagatttcaaagttttgcagggaaagacacgctaaggtgcttagcattagcattaaaacggatgccagctggtcaacaaagtatttgttatggtgatgaggccaacctcacatttataggattggttgggatgcttgatccaccaagagaagaagtttgggatgctatccactcttgtatgtctgcagggatccgtgttatagttgttacgggggataacaagtctacagcagaatcgctgtgtcggcaaattggtgcttttgagcacttgaatgacttttcagggtattcctatacagcatcagaatttgaaggattgcctcctttggaaaggacaaacgcattacaaaggatggttctgttttcaagagtggaaccttcccataagaagatgcttgttgaagccttgcaagcacataatgaagtggttgctatgactggagatggtgtcaatgatgcacctgctctaaagaaagcggatataggaatagcaatgggatcaggaactgcagttgctaagagtgcttcagacatggttttggcggatgacaactttgccacgattgttgcagctgttgcggagggaagggccatatataataacaccaagcagtttatccgatacatgatctcatcaaatattggggaggtggtttgtatttttgtggcggcagtgcttgggatgcctgacacacttatacctgtccagctactctgggtgaaccttgttactgatggattacctgcaactgcaattggtttcaataagcctgatggcaacatcatgtcagtcaagcctcgaaaggttaatgaagctgtggttagtggatggctctttttccgttatttggtcattggagcttatgttggtcttgctactatagcgggttttgtttggtggttcgtttattctgataatggccctaaattaccatattctgaattgtgtgtatttactggaactattgttccatggcctgctgtcaactttgattcatgttctacaaggcagacttcatattcttgcagtatatttgaggatcgtcatccatcaactgtttcaatgactgtgcttgttgtcgttgagatgtttaatgccttgaataacctaagtgaaaaccaatctctgcttgtcattcatccatggagtaacctgtggcttgttgggtctattattctgaccatgcttcttcatgtagcagtcctgtacattgaaccactatcagcccttttctctgtctctccattgtcgtgggttgagtggaaaattgttctttatctatccttccctgtaattttgattgatgaggttttgaaattcttctcaaggagaagcccacgaggtcgaagattccctttaaggttgtggagacgtgagatacttccaaaagagtcgagagacaattgattttaggcttcagcatatcagatgcatacaatgcaaagcgaaaagcttgtcttctgttagtattgagcctaattttggcaaatgttcatggatgaagatgacattgtacaaatctttatgtggctgatatctagggccgagcatcttcgagaatagagttcgcgactacacaattcattggggggggggggggggggggttctcagaatgctagttttgctcagaaaacatagagaagcttcgaaagccttctcactagttatagacggtgctacacttgtatcagaatgtcagatgcttacaaaaggatgagttcatgcaacacccctttctcccaaccaatgaaatcactgtacgcatcaggttctgtcaaattttcagggtgacagacgccgttctggtatttctgccattttatacatcgcaaaagttttgcaccttgatattgttggaaacaatggcatgt

SEQ ID NO: 11034 - DNA, 332 bp, Zea Mays
cctttggtttgatccacgccgaacgcctcgagcacctcggcgacggacttggcgtaggcgtcctccatgggcgaccgccgccgccgctgcctctagggacgccgggcggggggagtgaaggctgtgctagagaggaagggagcgcgcgagccggagaagggagaagaggtgcggctagaactacaaagcgatcgagtctgcgacgtttggcagcggtgtttgcaacggtcacgcccgtacaggagcccggagctccggagcccggaacgggacggcacgcgtggcgtcggtcgcggtcgcgtctgtactcgccaacctttttggtgcggagc

SEQ ID NO: 11035 - DNA, 1492 bp, Zea Mays
atggcccccctctacctcctccaccttgccgtttgtggcctccgcaccgccccaacgtcgacacctccgtcctccccctctactcccagcgcaccaccgccgcgtatgcgctatcccacccgatggacgtgttgccgcctctgcagcacgccctgtcgctgccgaccccgcccagccatgcatttggagtttacaatgtggagacatggtttatccaccggacggcgagggccagatgctattattgttggctatatcagacagtttgtcatcaagcctttgtttggattcctttttggcactcttatggagtactaagctacactgaagaatttgggcttaagagtgaggttttgaaggtgactcttgcaactgacgtcgtgaactgagtgtgaatatctactggatgggcaagcaagtttccaaccccatgccctcccatcgattctgctgcctgatccggctagagtttattaggactcgcaactacctcggagttcactgctgtaaatatgggtaacaccctaccagtgcacgatatgtcggaatccacagcagccataggatctcccaacaaggaggatcttgcaacaatgacattgatcaagaattggatgttggaaattatggtttggcattgttacttctcttactcctgtttcatgtcccaatctgagctgactcgtgttggtaatcatgtaatttttccttcgtgcttctattcttcctatacgctttaggcatggcatgttgtgcactaacattttgattaacaatacaacacatggtcatacatatggtattgttgcactatttttttgttgcaacgcacgggtattcaaccagggcatctcagattgggagtgggaggaggatgaggagatgatttggtgctaccagggacaggccccatctcctagaaatggatcttcctcctttgcatgggcaacttgtgcatcgggctactcttcaccaacagaaaaccatcactgagaaagagcagttagcaagtggtgttgtcgtgttgcgactcaaaagggcttgcctatgggcatccacataggagccatccccaaatgctgactgaccaaatgttcggtatgggagccacaaatagcagcacgatgggaatgcagcagcagcagcaaggggtatacgggaacatgcaggcaggtgcccagaacgtgcaaagtatggcgggccttcagaaccagacccagaatcccaacttcactcagcagattcaacaaaaccaacaatgattcaacactaacggtcatggaggttgaaagatgagcaatatagccatcgttttgctatttgtctgttggtctttactcagcttatccgtgagactgatagtagccccaggttgatagccttcgtttttctgtaaatcaatgtagatgcatcgccattagcgagatgcaggtcaattatatacgttgtaactgtgtttcggatatgtgaatcgtgttacgtgcgttccttt

SEQ ID NO: 11036 - DNA, 2110 bp, Zea Mays
caagaggacagcaaccggcggccctcgcagccgcgcctcacgcgccacggaatatccctccagttccacggggggccacggcgtcagaactcagaaggccgcagggataagagagagcgggtcccgtccgagccgaggcagcccattcgccgtccgccccgcctcttcctgccgccgagcgccacgaggcccacgcccgcgatggcgactatcacgacgccgctccgctccgctctgttctctccggccgcctcgtccgcgggccgccaccgcgggggccggcgccgcgcgccctcctccgtgcgctgcgacgcctccccgccctcgcacgccgcggccgcctcgctcgacccggacttcgacaagaaggcgttccgccacaacctcacgcgcagcgacaactacaaccgcaaggggttcgggcacaagaaggagacgctcgagctcatgagccaggagtacaccagcaacgtcatcaagacgctcaaggagaacggcaaccagtacacctggggccccgtcaccgtgaagctcgcggaggcctacgggttctgctggggcgtcgagcgcgccgtgcagatcgcgtacgaggcgcgcaagcagttccccgaggagcgcatctggctcaccaacgaaatcatccacaaccccaccgtcaacaagaggttggatgagatgggtgtagaaatcattcctgttgacgcgggtatcaaggatttcaatgtcgtcgagcaaggtgatgttgttgtgttgcctgcatttggagctgctgtggaggaaatgtacacgctaaatgagaagaaggtgcagattgttgatacgacatgcccttgggtttcaaaggtctggaatatggtcgaaaaacacaagaagagtgaatatacttcaattattcatggaaagtattcccatgaagaaactgttgccactgcttcttttgcaggaaagtacatcattgtgaagaatatggcagaggcaacctatgtgtgtgattatatacttggtggccaacttgatgggtctagctcaacaaaagaggagttccttgagaaattcaagaaagctgtttctccagggtttgatcctgatgttcatcttgatatggtgggaattgcaaatcaaacaacaatgcttaaaggagaaactgaagaaattgcttattgaaaagacgatgatgcaaaaatatggagttgaaaatgtaaacgatcacttcatggccttcaatactatttgtgatgccactcaggaaagacaagatgctatgtatcagctggtgaaagagaaagttgaccttattcttgttgttggaggatggaattcaagtaacacctctcatctgcaagaaatcggagaactcagtggaattccatcatactggattgacagtgaacaaaggattggaccaggaaacaggatcagctacaagttaaatcatggtgaactggttgagaaaaataactggttacccgaggggcctattaccattggtgttacttcaggtgcctcaactccagataaggttgttgaggatgctcttcagaaggtatttgagatcaagcgtcaggaaattttgcaggttgcataaattttaagcagagatttggtgaagagctgaatagttttggcttggcaaaggttactagaaacgttgcacaggcaaatgtttgtacagtagctaaggatgtaacgagttgggcacgaatactaccacgagtcactatccttgtgctggaatttacagtacggtggaaactaaaatggtgttatcattggcccgaataacatttgcatcagcctttctaaagtctaactttttgccacttaaattgatgtcagggaagacactcagatgtgtaagttaaagaatgcacagttcctatgtgtaaaaagcttagttccgaggaggagatggcgccccttcctttcccgcctgaccgttcctatcccctgaccctctcctctacccccgacgcctcttcaccttcctccaccaaccccacgccggagaccactccgatcccggcggccaatcacctctccttccccggcgtcggcggggccctctgtttgtggtcggtccaaggcgcagcggtggtgtgacgacagcgca

SEQ ID NO: 11037 - DNA, 1073 bp, Zea Mays
gctagctagcttgttttacagatagtctccaactggttcatcaacgcccgtgtccggctatggaagcccatgatcgaagagatgtatcagcaggagtgcagggagctcgacggctcctcggccggcggcgggggccccgagtccgtcaacgacccctccggcgccgacgactcgcactccccgaccaccaccggcgcagcgcagctcccgcaacagcaacatcacctcggcacggtgcctggggtgatgccccacaagcccgacccgggcgccgccggtccctcggctgcggacgcggcgttcgtcgggatcgaccctgtggagctccttggcggtggcgcggacgacttgtacgggcggttcgagcccggggtgagggtgcgctacgggcccgctgcggcaggcgctgctgccggcgacgtgtcgctgacgctgggcctgcagcacgccggcgccggcaacgccgccgggcccgacagcaccgggcggttctccttgagagactacagcggttgttgatgcttacacatcgcttacatcacctttattcatggctcatgcatgcgcccatcatgcatttggaagagcaaggatcgacgaaagaaagagagagagagaaaagagtaaccagagaagagatagagggcgctagacaaagagagatgagcatctagaaagagaaaaaatgcatggtgcctggaggtgatgaatgggatgggatatatgaatatgagattatcacaaccaccttcgtcgtcttcttcccagatgattcttaatttacttagctagaagattaattccttttgctaggcattgttgttggggggttaaggataattaatttgtatacagcaaaggaagataggaagtgtataattgtttagtcacacttttttggttctttgttttgcatttgcccgtttttgttctggtgtaccaattttccttgtactcatttttcttccctctgtaaactaaacataagagacacatacatgcatacgtaaatacatatattggtaaatatggtcatacgtatagcatatatatgtaaggcctaaaaattgaac

SEQ ID NO: 11038 - DNA, 3613 bp, Zea Mays
ccaactccaatatctgcagcagcagtcacggcggcaggaggagagctagggaggggaaaaggagctcggtttttttatataccaaccggccacccgccctacgcgctactactatagcctagctagagccagctgcttgcctcgccctcccctttgcgcgtcgtcgcgctcctcgccgtccccctctctcggaatcggaaggcgatcgatcgcacaaggctgcgtctgcgtgctcggccgccgcccgacccgaccggacaaggaggggagggggcaaaaaaaatatatagttagtcacacgcacgcagcacaggagggaggagagggattgagggataaagaaatttcgggagacaaggagagagagacagagatggagaggagcggctggactcggaggcaggcctttcactactcccgcacccagataacgatgtggtagctagttcctcttaggctaaggtaagcagcagcgccgggagctagctcctcctcactatcctgcatgcttcgttccttcgttcagctttggttgcccggtcgatcgatcggttcttttttgtttcttcgtatacatgcaaagctagctagttggagagttcctttatttttcgatttctttgctttgggagagtgcaattcggttcatcgtcttcttaatttggattctatattcgttttccccgcctggccggtgcttattacgatggtgctgctgctgctcatgagcttcgcaggaaggaggtcgtggccgggatcccgccgatgatgatgacagtggcgccgccggcatgggcgtagcggcgccaccgtacgagaccaccacgtacgtgagccaacgcaccaagatcaacatcgcagcgatctccgccgccgccgccaccagggcggctaccgcggcttctatgtcccactcgcagggattccaccagggcagcgccggcgtctacggctactcctcggatggcttcgaccgcccggacgactccggccaccaggaccatcatcagcagcagcagcacgtggcgcagcagagccgccgcgacaagctgagggtgcaggggttcgacccggccgccggcggcggccacggcctgctccccatcgagggcgacgagcatggcgggcccgggtccatgtacgagcacgcggcggccgcagctggggcctccaacatgctctccgagatgttcaacttccccgcgccgccgtcggggccctccgccaccgagctgctggccagccagatgggcgccaactaccgcttcggggggctacggcagcagcagcagcaggggcccggaggggtggtggctggcttgtccggcgacggcggttggttcgtcggggccggcgcggcgggtcgtgctgctggcttggtcctcggtggtggggccaacatggggtcgttaggtgaaacgtcgtccccgaagcagcagggcagcatggctgggctggccaccgacccggccgccgcgatgcagctcttcctgatgaacccgcagcagcagcagcagtccagatcgtcgccgccgtcgccgtcggacgtccaggtccagcaccacgaggcggcgttccaggcgttcggaaacgccggggccccgtttggcggcggcgccgggaccggcgtcgtggaaggccaggggctgtccctgtcgctgtcgccgtcgctgcagcagctggagatggcgaagcaggccgaggagctgagggtccgggacggcgtgctctacttcaaccgccagcagcagcagcagcagcagcagctgccgatggcattgcacggccaggtcggcgcgctggggcagcagctgcacgtcggctacggccccgccggcgtcgcgggcgtgctgcgcaactccaagtacacccgcgcggcgcaggagctcctcgaggagttctgcagcgtcgggcgcgggcagatcaagggcggcgggcgaggggcctcggcgtctaaccctaacaacaacccgggcaacaagggcggcgcctccagctccggcgccgccgcgcagtccccgtcgtccgcgcccaacaaggagcccccgcagctgtcccccgccgaccggttcgagcagcagcgcaagaaggccaagctcatctccatgctcgacgaggtggaccggcggtacaaccactactgcgaccagatgcagatggtggtgaacttcttcgactcggtgatggggttcggcgcggcgacgccgtacacggcgctggcgcagaaggcaatgtcgcggcacttccggtgcctcaaggacgccatcgcggcgcagctgcgggccacgtgcgagctgctgggcgagaaggacgccggcaccagctcgggcctcaccaagggcgagacgccgcggctgcgcgccatcgaccagagcctccgccagcagcgcgccttccaccacatggggatgatggagcaggaggcatggcggccccagcgcggcctccccgagcgctccgtcaacatcctccgctcatggctcttcgagcacttcctccacccgtacccgagcgacgccgataaacacctgttggcgaggcagaccgggctgtccaggaaccaggtctccaactggttcatcaacgcccgtgtccggctatggaagcccatgatcgaagagatgtatcagcaggagtgcagggagctcgacggctcctcggccggcggcgggggccccgagtccgtcaacgacccctccggcgccgacgactcgcactccccgaccaccaccggcgcagcgcagctcccgcaacagcaacatcacctcggcacggtgcctggggtgatgccccacaagcccgacccgggcgccgccggtccctcggctgcggacgcggcgttcgtcgggatcgaccctgtggagctccttggcggtggcgcggacgacttgtacgggcggttcgagcccggggtgagggtgcgctacgggcccgctgcggcaggcgctgctgccggcgacgtgtcgctgacgctgggcctgcagcacgccggcgccggcaacgccgccgggcccgacagcaccgggcggttctccttgagagactacagcggttgttgatgcttacacatcgcttacatcacctttattcatggctcatgcatgcgcccatcatgcatttggaagagcaaggatcgacgaaagaaagagagagagagaaaagagtaaccagagaagagatagagggcgctagacaaagagagatgagcatctagaaagagaaaaaatgcatggtgcctggaggtgatgaatgggatgggatatatgaatatgagattatcacaaccaccttcgtcgtcttcttcccagatgattcttaatttacttagctagaagattaattccttttgctaggcattgttgttggggggttaaggataattaatttgtatacagcaaaggaagataggaagtgtataattgtttagtcacacttttttggttctttgttttgcatttgcccgtttttgttctggtgtaccaattttccttgtactcatttttcttccctctgtaaactaaacataagagacacatacatgcatacgtaaatacatatattggtaaatatggtcatacgtatagcatatatatgtaaggcctaaaaattgaac

SEQ ID NO: 11039 - DNA, 2860 bp, Zea Mays
cccaaactctccaaacccctctcctggcctcctctactcctcccgcgtgtcccgtcttcccacaaatccgcgctgctcgtagattggattgtttcgttgtttagattttggtttgccgttcgagttggtgctttgggctccgtgttagtgggctcggttcgtcggatctgtagcggagcaagcgcttcgccgggaattgttgctttggtttgggattcttggattctattggcttctatcttcagcatgggtgagccaaacagcaatgataatgcaatggtgcatgacaatgagatgatcgatggcaatggggtgatccatggtagtgagatgattcatggtagtgtgatgatacatggagatgagatgccccatggcaatgagatgatccatggaaatgagatgatccatgggactgagatggttgaaggcagtgagatgatccatggtcatgagatggttcaggttaatgatctcatccacggtaatgagatggttgccgttaacgtcatggttaatggtgatgagatgccccatgttaatgaattcatcaatactgaggtgaccccgcggagacgtcggaagaagaagtcgctagtttgggagcacttcactatagaacccatgccaggggggaactcaagagcatgttgcaatttatgcaagcaaacctttgcgtatagttctggttcaaaaatcgcaggcacgagccatctgaagagacacatcacgctaggctcctgtcctgttatgaaagatcaagaccgcaggctaacactgccgctagcagggggccatgccactgataatgatggtgagggtacagtagagcgtcctactaagaggcgttacagatacactggttatgcaaatgctacttttgatcaggaacggagctcctcttatttggcgaagatgataattttgcatgactacccacttcacattgttcagcagtcatcctttacgaagtttatcgagagtctgcagcctcgtttcagggttgtagatgtggagacaatggaaggagaggtgtatgctgttttccagaaagcaaaagaaaacctgttacaagcattcagcactatgccaggaaggatcagcctcactataggactctggacaaccagtcagactcttggctatgtttctcttgctgggcagtttattgactccgattggaaagtgcaccgaagaatgctcaacttcatgatggtgtcttctcctcattcagagaatgcacttagtgaagctattagctcgagccttttggagtggaatatgaaggacaggctattcactatcacattggataatgattgctcttcccatgatatttacagtgcaaatcttagggatcacctgtccaataagaacaacctcatgcttaagggacagctgtttgttgtgaggtgttatgcacatatcctcaatgtagttgctcaggatgtaattgcttcaattcatggtgtgatttacaacatccgtgagagtatcaagttcataaaagcttctccaaatcgtgaggagaagtttgctgagattgctctgcagctggagattcccagtaccaagactctctgtttagatgttacaacccagtggaacacaacttatttgatgctgctggctgccttggactataagcaggcgttttctacactggagacatgtgatgataattacaatgaatctccttcagcagaggactggaagaaagttgaggctacctgtaattacctgaaactgctatatgactctgcacatagtgtcatggcttcagcaaatcctactgcaaacatctttttccatgaagcttggaaaattcagcttgagctagccaatggcacagaacatgaaaatcccatcttcagcagtattgccaaggatatgcatgagagatttgacaaatactggaaagattgcagcctggtattagccattgctgttgtcatggatccacgtttcaagatgaagcttgttgagttcagttactctaaaatttatggtgctgaggctatgaaatatgttaaggttgtcaatgactctctgcatgagctgtataaggagtatgtggcacaaccactccccttgactcctgcttatgttgaagctaataatgtggctgctaacgcaagtgtgaaccagggaaatccttcttccactggtgatggtcttcttgattttgatatgtacctttctgagattcaaagtacccagcctgcaaaatgtgatctggagcagtacttggaggaatccctcactccacgtatccaagagtttgatatccttaattggtggaagcttaacacactcaagtttccaaccctgtcgaagatggcccgggatatcttggccatcccaatgtcgatggttagcagtggcagctccatattctctgctggaactgggaaccgcatgctcgatgactacagaagctctcttcgtccggagactgtggaggcacttgtctgtgcaaaagactggctccagtattcaccgcctgcaactgaggtgctaggttctgagatgatcaaggcagaagcattgtagcttgccgatactgcttccatgatgaagcacaaataagattgtgttattttttagtgtagttaaccgtaggcatattttaggcagcaattgcagacatatatctcttctggcattgatcttatagttgtaatttgtcatgtcgaactcagtttaactcattatagtgtgtattgagtttagctgtggtctgagggatgtctaagggattgaggtggtaaacttatttccagattctgtctattgttggctcgggcattcaggtgatacacttatttccagattttggttattgttggtgctgctgttt

SEQ ID NO: 11040 - DNA, 1994 bp, Zea Mays
ataccagcgccgttaaatttccaacgcccctgcccgtccggccgtccccacactagactagaccgaccgccaccattgcccccgtgtcttaacacggggcgaaaattcctttcgagatctcgcttctctaagcttccgcggcggcacggtgatgactatgacccccgctccggtggcgaacggcgcagcggccggcgctggcgggggcatgaagcggcggggcggtaggttgtggtacgcggccgccggtgccctcctcgtggccctcctcgccgtggccgtgagctaccgcagcttcccgggcgtcccttcctccccctcgtcacctggaagctgcggctgccctgctgcgaggaagtacacggggatggtggaggactgctgctgcgactatgagacggtggacgccatcaacgaggaggtcctgcatccaatcctacaggaactcgttaagttgcccttcttcaggtacttcaagatagtatgatgtgccaagaaggaaaaccccaggctgccgttgataaaactcttgacagcaaggttttcaaaggatgggttgaaactgacaatccgtggacatctgatgacgagactgataataatgagatgacttacgtgaatcttcaactgaatcctgaacgatacactggctatactggtgattcagcaagaagaatatgggacgctatttacaaagagaactgtccaaaatatccctctgaagaactgtgccatgagaagaaggcattgtacaagcttatttcaggattgcactcctcaatttcagtgcatattgcttatgattaccttcttgatgaatctactaactcatggggacaaaatcttcctttgttgtatgaccgcgtcctgaagtacccagaacgtgtccagaatctgtacttcacctacctgtttgttcttcgggccgtgacaaaggcagcaaattatcttgagcaggctgagtacaataccggcaatcctgaagacgacttgaaaacagaatctcttgtgaagcagttgctttacaattccaagttaagatctgcatgtccattgccttttgatgaagccaaactttggcaaggcgaaaatggtcctgagctaaagcaagagattcagaagcaatttagaaacattagtgcaattatggactgtgttggatgcgagaagtgccgactgtggggaaagctccaagttcatggtcttggaactgcactgaaaattcttttctctgttgatggggacagccatatgaatcagccattgcagctgcagcgaaatgaggtcattgcattgttcaatcttctgaacaggctctcagagtctgtcaaatttgtacatgaaaaaggatcatcaattgaagaagtcattgaggaacagatcccttcaacggttcaaaagagtgtttccatgccgaatcttaaactggacttcctctgagatgtatgagagtaatttgtagttatacaagattgcaatgacatgctggaagattaacatagacatgtacggatataacgaaagattaacatgtgctggaagcagtttcatacatacttgtgttgcagctgtatttaagagaatgagagatacagatacttttgagctaaatgcgatgacacagttaacatagcccccccgcacctcaaacttttccgtgtatagggttcctccgctgtaaatcaaaggatgtcacccctctgcactcgccatgatcaagagaatattctcgctcaacttgatcacctgaccacgaaacaggtagcgagcaaattttttttgtccatctcactattcgtccgtaggaaaaggaataacgcatttcttgactggcttttctgtaaagtatggcgaagtgctgggtgtacagttgttacaatcggtacagcccagagcagagaaaaggttaaataatacgccggggattcagtagctggataagatgctcggttaaattttgtgtgcagaaccgcgaatcatgtaccagacacgag

SEQ ID NO: 11041 - DNA, 2117 bp, Zea Mays
ataccagcgccgttaaatttccaacgcccctgcccgtccggccgtccccacactagactagaccgaccgccaccattgcccccgtgtcttaacacggggcgaaaattcctttcgagatctcgcttctctaagcttccgcggcggcacggtgatgactatgacccccgctccggtggcgaacggcgcagcggccggcgctggcgggggcatgaagcggcggggcggtaggttgtggtacgcggccgccggtgccctcctcgtggccctcctcgccgtggccgtgagctaccgcagcttcccgggcgtcccttcctccccctcgtcacctggaagctgcggctgccctgctgcgaggaagtacacggggatggtggaggactgctgctgcgactatgagacggtggacgccatcaacgaggaggtcctgcatccaatcctacaggaactcgttaagttgcccttcttcaggttaaattgtggtgtgactgccctttttggcccgatgatggaatgtgcaagcttagagattgtagtgtttgtgagtgtccggagaatgagttccctgaaccattcaggaaaccttacaatggactttctccagatagtatgatgtgccaagaaggaaaaccccaggctgccgttgataaaactcttgacagcaaggttttcaaaggatgggttgaaactgacaatccgtggacatctgatgacgagactgataataatgagatgacttacgtgaatcttcaactgaatcctgaacgatacactggctatactggtgattcagcaagaagaatatgggacgctatttacaaagagaactgtccaaaatatccctctgaagaactgtgccatgagaagaaggcattgtacaagcttatttcaggattgcactcctcaatttcagtgcatattgcttatgattaccttcttgatgaatctactaactcatggggacaaaatcttcctttgttgtatgaccgcgtcctgaagtacccagaacgtgtccagaatctgtacttcacctacctgtttgttcttcgggccgtgacaaaggcagcaaattatcttgagcaggctgagtacaataccggcaatcctgaagacgacttgaaaacagaatctcttgtgaagcagttgctttacaattccaagttaagatctgcatgtccattgccttttgatgaagccaaactttggcaaggcgaaaatggtcctgagctaaagcaagagattcagaagcaatttagaaacattagtgcaattatggactgtgttggatgcgagaagtgccgactgtggggaaagctccaagttcatggtcttggaactgcactgaaaattcttttctctgttgatggggacagccatatgaatcagccattgcagctgcagcgaaatgaggtcattgcattgttcaatcttctgaacaggctctcagagtctgtcaaatttgtacatgaaaaaggatcatcaattgaagaagtcattgaggaacagatcccttcaacggttcaaaagagtgtttccatgccgaatcttaaactggacttcctctgagatgtatgagagtaatttgtagttatacaagattgcaatgacatgctggaagattaacatagacatgtacggatataacgaaagattaacatgtgctggaagcagtttcatacatacttgtgttgcagctgtatttaagagaatgagagatacagatacttttgagctaaatgcgatgacacagttaacatagcccccccgcacctcaaacttttccgtgtatagggttcctccgctgtaaatcaaaggatgtcacccctctgcactcgccatgatcaagagaatattctcgctcaacttgatcacctgaccacgaaacaggtagcgagcaaattttttttgtccatctcactattcgtccgtaggaaaaggaataacgcatttcttgactggcttttctgtaaagtatggcgaagtgctgggtgtacagttgttacaatcggtacagcccagagcagagaaaaggttaaataatacgccggggattcagtagctggataagatgctcggttaaattttgtgtgcagaaccgcgaatcatgtaccagacacgag

SEQ ID NO: 11042 - DNA, 2121 bp, Zea Mays
ataccagcgccgttaaatttccaacgcccctgcccgtccggccgtccccacactagactagaccgaccgccaccattgcccccgtgtcttaacacggggcgaaaattcctttcgagatctcgcttctctaagcttccgcggcggcacggtgatgactatgacccccgctccggtggcgaacggcgcagcggccggcgctggcgggggcatgaagcggcggggcggtaggttgtggtacgcggccgccggtgccctcctcgtggccctcctcgccgtggccgtgagctaccgcagcttcccgggcgtcccttcctccccctcgtcacctggaagctgcggctgccctgctgcgaggaagtacacggggatggtggaggactgctgctgcgactatgagacggtggacgccatcaacgaggaggtcctgcatccaatcctacaggaactcgttaagttgcccttcttcaggtacttcaaggttaaattgtggtgtgactgccctttttggcccgatgatggaatgtgcaagcttagagattgtagtgtttgtgagtgtccggagaatgagttccctgaaccattcaggaaaccttacaatggactttctccagatagtatgatgtgccaagaaggaaaaccccaggctgccgttgataaaactcttgacagcaaggttttcaaaggatgggttgaaactgacaatccgtggacatctgatgacgagactgataataatgagatgacttacgtgaatcttcaactgaatcctgaacgatacactggctatactggtgattcagcaagaagaatatgggacgctatttacaaagagaactgtccaaaatatccctctgaagaactgtgccatgagaagaaggcattgtacaagcttatttcaggattgcactcctcaatttcagtgcatattgcttatgattaccttcttgatgaatctactaactcatggggacaaaatcttcctttgttgtatgaccgcgtcctgaagtacccagaacgtgtccagaatctgtacttcacctacctgtttgttcttcgggccgtgacaaaggcagcaaattatcttgagcaggctgagtacaataccggcaatcctgaagacgacttgaaaacagaatctcttgtgaagcagttgctttacaattccaagttaagatctgcatgtccattgccttttgatgaagccaaactttggcaaggcgaaaatggtcctgagctaaagcaagagattcagaagcaatttagaaacattagtgcaattatggactgtgttggatgcgagaagtgccgactgtggggaaagctccaagttcatggtcttggaactgcactgaaaattcttttctctgttgatggggacagccatatgaatcagccactgcagcgaaatgaggtcattgcattgttcaatcttctgaacaggctctcagagtctgtcaaatttgtacatgaaaaaggatcatcaattgaagaagtcattgaggaacagatcccttcaacggttcaaaagagtgtttccatgccgaatcttaaactggacttcctctgagatgtatgagagtaatttgtagttatacaagattgcaatgacatgctggaagattaacatagacatgtacggatataacgaaagattaacatgtgctggaagcagtttcatacatacttgtgttgcagctgtatttaagagaatgagagatacagatacttttgagctaaatgcgatgacacagttaacatagcccccccgcacctcaaacttttccgtgtatagggttcctccgctgtaaatcaaaggatgtcacccctctgcactcgccatgatcaagagaatattctcgctcaacttgatcacctgaccacgaaacaggtagcgagcaaattttttttgtccatctcactattcgtccgtaggaaaaggaataacgcatttcttgactggcttttctgtaaagtatggcgaagtgctgggtgtacagttgttacaatcggtacagcccagagcagagaaaaggttaaataatacgccggggattcagtagctggataagatgctcggttaaattttgtgtgcagaaccgcgaatcatgtaccagacacgag

SEQ ID NO: 11043 - DNA, 2052 bp, Zea Mays
ataccagcgccgttaaatttccaacgcccctgcccgtccggccgtccccacactagactagaccgaccgccaccattgcccccgtgtcttaacacggggcgaaaattcctttcgagatctcgcttctctaagcttccgcggcggcacggtgatgactatgacccccgctccggtggcgaacggcgcagcggccggcgctggcgggggcatgaagcggcggggcggtaggttgtggtacgcggccgccggtgccctcctcgtggccctcctcgccgtggccgtgagctaccgcagcttcccgggcgtcccttcctccccctcgtcacctggaagctgcggctgccctgctgcgaggaagtacacggggatggtggaggactgctgctgcgactatgagacggtggacgccatcaacgaggaggtcctgcatccaatcctacaggaactcgttaagttgcccttcttcagtgtttgtgagtgtccggagaatgagttccctgaaccattcaggaaaccttacaatggactttctccagatagtatgatgtgccaagaaggaaaaccccaggctgccgttgataaaactcttgacagcaaggttttcaaaggatgggttgaaactgacaatccgtggacatctgatgacgagactgataataatgagatgacttacgtgaatcttcaactgaatcctgaacgatacactggctatactggtgattcagcaagaagaatatgggacgctatttacaaagagaactgtccaaaatatccctctgaagaactgtgccatgagaagaaggcattgtacaagcttatttcaggattgcactcctcaatttcagtgcatattgcttatgattaccttcttgatgaatctactaactcatggggacaaaatcttcctttgttgtatgaccgcgtcctgaagtacccagaacgtgtccagaatctgtacttcacctacctgtttgttcttcgggccgtgacaaaggcagcaaattatcttgagcaggctgagtacaataccggcaatcctgaagacgacttgaaaacagaatctcttgtgaagcagttgctttacaattccaagttaagatctgcatgtccattgccttttgatgaagccaaactttggcaaggcgaaaatggtcctgagctaaagcaagagattcagaagcaatttagaaacattagtgcaattatggactgtgttggatgcgagaagtgccgactgtggggaaagctccaagttcatggtcttggaactgcactgaaaattcttttctctgttgatggggacagccatatgaatcagccattgcagctgcagcgaaatgaggtcattgcattgttcaatcttctgaacaggctctcagagtctgtcaaatttgtacatgaaaaaggatcatcaattgaagaagtcattgaggaacagatcccttcaacggttcaaaagagtgtttccatgccgaatcttaaactggacttcctctgagatgtatgagagtaatttgtagttatacaagattgcaatgacatgctggaagattaacatagacatgtacggatataacgaaagattaacatgtgctggaagcagtttcatacatacttgtgttgcagctgtatttaagagaatgagagatacagatacttttgagctaaatgcgatgacacagttaacatagcccccccgcacctcaaacttttccgtgtatagggttcctccgctgtaaatcaaaggatgtcacccctctgcactcgccatgatcaagagaatattctcgctcaacttgatcacctgaccacgaaacaggtagcgagcaaattttttttgtccatctcactattcgtccgtaggaaaaggaataacgcatttcttgactggcttttctgtaaagtatggcgaagtgctgggtgtacagttgttacaatcggtacagcccagagcagagaaaaggttaaataatacgccggggattcagtagctggataagatgctcggttaaattttgtgtgcagaaccgcgaatcatgtaccagacacgag

SEQ ID NO: 11044 - DNA, 2182 bp, Zea Mays
attaaaataccgccgtcggccatcgcccaacgatataccagcgccgttaaatttccaacgcccctgcccgtccggccgtccccacactagactagaccgaccgccaccattgcccccgtgtcttaacacggggcgaaaattcctttcgagatctcgcttctctaagcttccgcggcggcacggtgatgactatgacccccgctccggtggcgaacggcgcagcggccggcgctggcgggggcatgaagcggcggggcggtaggttgtggtacgcggccgccggtgccctcctcgtggccctcctcgccgtggccgtgagctaccgcagcttcccgggcgtcccttcctccccctcgtcacctggaagctgcggctgcccttggcggattggcccgtttcaggctgcgaggaagtacacggggatggtggaggactgctgctgcgactatgagacggtggacgccatcaacgaggaggtcctgcatccaatcctacaggaactcgttaagttgcccttcttcaggtacttcaaggttaaattgtggtgtgactgccctttttggcccgatgatggaatgtgcaagcttagagattgtagtgtttgtgagtgtccggagaatgagttccctgaaccattcaggaaaccttacaatggactttctccagatagtatgatgtgccaagaaggaaaaccccaggctgccgttgataaaactcttgacagcaaggttttcaaaggatgggttgaaactgacaatccgtggacatctgatgacgagactgataataatgagatgacttacgtgaatcttcaactgaatcctgaacgatacactggctatactggtgattcagcaagaagaatatgggacgctatttacaaagagaactgtccaaaatatccctctgaagaactgtgccatgagaagaaggcattgtacaagcttatttcaggattgcactcctcaatttcagtgcatattgcttatgattaccttcttgatgaatctactaactcatggggacaaaatcttcctttgttgtatgaccgcgtcctgaagtacccagaacgtgtccagaatctgtacttcacctacctgtttgttcttcgggccgtgacaaaggcagcaaattatcttgagcaggctgagtacaataccggcaatcctgaagacgacttgaaaacagaatctcttgtgaagcagttgctttacaattccaagttaagatctgcatgtccattgccttttgatgaagccaaactttggcaaggcgaaaatggtcctgagctaaagcaagagattcagaagcaatttagaaacattagtgcaattatggactgtgttggatgcgagaagtgccgactgtggggaaagctccaagttcatggtcttggaactgcactgaaaattcttttctctgttgatggggacagccatatgaatcagccattgcagctgcagcgaaatgaggtcattgcattgttcaatcttctgaacaggctctcagagtctgtcaaatttgtacatgaaaaaggatcatcaattgaagaagtcattgaggaacagatcccttcaacggttcaaaagagtgtttccatgccgaatcttaaactggacttcctctgagatgtatgagagtaatttgtagttatacaagattgcaatgacatgctggaagattaacatagacatgtacggatataacgaaagattaacatgtgctggaagcagtttcatacatacttgtgttgcagctgtatttaagagaatgagagatacagatacttttgagctaaatgcgatgacacagttaacatagcccccccgcacctcaaacttttccgtgtatagggttcctccgctgtaaatcaaaggatgtcacccctctgcactcgccatgatcaagagaatattctcgctcaacttgatcacctgaccacgaaacaggtagcgagcaaattttttttgtccatctcactattcgtccgtaggaaaaggaataacgcatttcttgactggcttttctgtaaagtatggcgaagtgctgggtgtacagttgttacaatcggtacagcccagagcagagaaaaggttaaataatacgccggggattcagtagctggataagatgctcggttaaattttgtgtgcagaaccgcgaatcatgtaccagacacgag

SEQ ID NO: 11045 - DNA, 1720 bp, Zea Mays
gccgaagccctgggtgcgctatccgcgaccgcgacgatgggtctgcgcgtggccgccaccgcgccagctccggccggcgtgcgcgtgctcggcaggggcgccgcgcgcgtgacgccgcgaccgtgggcggctgtcggcggcaggagacgcttctccgtgcggatgtccgtcgcgaccaccgaggccaccaccaccatcgccgtgggcgcctcggaggaccaggcgctggaggctaggaactccaagacggtggtggcggtcatcctcggcggtggcgccgggaccaggctcttcccgcttaccagacgcagggccaagcccgcggtgccaattggcggcgcgtacaggctcatcgacgtgccgatgagcaactgcataaacagcgggatcaacaaggtctacatcctcacgcagttcaactcgcaatccctcaatcgccacctctccagagcctacgatttcagcaatggcgtggccatcggagacggattcgtcgaggttctagcagcaacccagaggcctggaacggaggggaaaaggtggtttcagggtactgctgatgcagttcggcagttcgactggcttttcgatgatgcaaaatctaaagacattgaagatgtgctgattctttctggtgaccatctctaccgtatggactacatggactttgttcagagtcatcggcaaagaggtgcaggcatcagcatctgttgtttgccaattgatggcagccgggcatctgattttggcctaatgaagatagacgacactggaagggtaatttcattcagtgagaaaccaaaaggagacgaattaaaggcaatgcaagttgacaccacagtgcttggcttatcaaaggaggaagcagaaaacaaaccttatatagcttcaatggggatctatatttttaagaaagacatactcctaaaccttctaagatggcgttttcccactgcaaatgattttggttctgaaataattcctgcttcagcaaaagaaatcgatgtaaaggcttatcttttcaatgattactgggaagatattggaactattaagtccttctttgaggcaaaccttgctcttgctgaacagcctccaaggttcagtttctacgatgctgacaaaccaatgtatacatcacggagaaacctaccaccatctatggtcaacaatagtaagatcactgattcaatcatttcccacggatgtttcttggataactgcaggatagaacatagtgttgttggagttcgttctcggataggctccaatgtgcacctcaaggatactgtaatgcttggcgctgattattatgaaactgccgtggaaagaggagagctgcttgcagaaggaaaagttcctattgggattggagagaatacaacgattcaaaagtgtatcatagacaagaatgcgaggatagggaagaaagtggtaatctccaactctgaaggtgtagatgaagctgatagaacttccgaaggcttctacattcgatctggcatcactgtcgtactgaagaacgcgataattgctgatggattggtcatatgagctgaaaaggtctcacaggacggctaaattccatcgatttcgcggcacttggggctggttcaaaattaaagtagctgctattctacttacttatccttaccaggcaatttcctttgctcttactcttacttatattctcataaactccataagtatattctacctt

SEQ ID NO: 11046 - DNA, 1829 bp, Zea Mays
gccgaagccctgggtgcgctatccgcgaccgcgacgatgggtctgcgcgtggccgccaccgcgccagctccggccggcgtgcgcgtgctcggcaggggcgccgcgcgcgtgacgccgcgaccgtgggcggctgtcggcggcaggagacgcttctccgtgcggatgtccgtcgcgaccaccgaggccaccaccaccatcgccgtgggcgcctcggaggaccaggcgctggaggctaggaactccaagacggtggtggcggtcatcctcggcggtggcgccgggaccaggctcttcccgcttaccagacgcagggccaagcccgcggtgccaattggcggcgcgtacaggctcatcgacgtgccgatgagcaactgcataaacagcgggatcaacaaggtctacatcctcacgcagttcaactcgcaatccctcaatcgccacctctccagagcctacgatttcagcaatggcgtggccatcggagacggattcgtcgaggttctagcagcaacccagaggcctggaacggaggggaaaaggtggtttcagggtactgctgatgcagttcggcagttcgactggcttttcgatgatgcaaaatctaaagacattgaagatgtgctgattctttctggtgaccatctctaccgtatggactacatggactttgttcagagtcatcggcaaagaggtgcaggcatcagcatctgttgtttgccaattgatggcagccgggcatctgattttggcctaatgaagatagacgacactggaagggtaatttcattcagtgagaaaccaaaaggagacgaattaaaggcaatgcaagttgacaccacagtgcttggcttatcaaaggaggaagcagaaaacaaaccttatatagcttcaatggggatctatatttttaagaaagacatactcctaaaccttctaaggtcagatggcgttttcccactgcaaatgattttggttctgaaataattcctgcttcagcaaaagaaatcgatgtaaaggcttatcttttcaatgattactgggaagatattggaactattaagtccttctttgaggcaaaccttgctcttgctgaacagcctccaaggttcagtttctacgatgctgacaaaccaatgtatacatcacggagaaacctaccaccatctatggtcaacaatagtaagatcactgattcaatcatttcccacggatgtttcttggataactgcaggatagaacatagtgttgttggagttcgttctcggataggctccaatgtgcacctcaaggatactgtaatgcttggcgctgattattatgaaactgccgtggaaagaggagagctgcttgcagaaggaaaagttcctattgggattggagagaatacaacgattcaaaagtgtatcatagacaagaatgcgaggatagggaagaaagtggtaatctccaactctgaaggtgtagatgaagctgatagaacttccgaaggcttctacattcgatctggcatcactgtcgtactgaagaacgcgataattgctgatggattggtcatatgagctgaaaaggtctcacaggacgggtatttgccgcacaaaatatcaataggagttctttgttagttttacaataagatgctgtatagcagtcaacaggttattcttgtctatacaagatacctttgtctacaaatcttgtctcaccatgttgtattcgactcaaacaatgttgcagtcatggacattgtccgtttcaaattttcttccttgcacatttacacaaaccttttcaatttttatttcttgctaaacaataaaagctgttgttct

SEQ ID NO: 11047 - DNA, 1777 bp, Zea Mays
gccgaagccctgggtgcgctatccgcgaccgcgacgatgggtctgcgcgtggccgccaccgcgccagctccggccggcgtgcgcgtgctcggcaggggcgccgcgcgcgtgacgccgcgaccgtgggcggctgtcggcggcaggagacgcttctccgtgcggatgtccgtcgcgaccaccgaggccaccaccaccatcgccgtgggcgcctcggaggaccaggcgctggaggctaggaactccaagacggtggtggcggtcatcctcggcggtggcgccgggaccaggctcttcccgcttaccagacgcagggccaagcccgcggtgccaattggcggcgcgtacaggctcatcgacgtgccgatgagcaactgcataaacagcgggatcaacaaggtctacatcctcacgcagttcaactcgcaatccctcaatcgccacctctccagagcctacgatttcagcaatggcgtggccatcggagacggattcgtcgaggttctagcagcaacccagaggcctggaacggaggggaaaaggtggtttcagggtactgctgatgcagttcggcagttcgactggcttttcgatgatgcaaaatctaaagacattgaagatgtgctgattctttctggtgaccatctctaccgtatggactacatggactttgttcagagtcatcggcaaagaggtgcaggcatcagcatctgttgtttgccaattgatggcagccgggcatctgattttggcctaatgaagatagacgacactggaagggtaatttcattcagtgagaaaccaaaaggagacgaattaaaggcaatgcaagttgacaccacagtgcttggcttatcaaaggaggaagcagaaaacaaaccttatatagcttcaatggggatctatatttttaagaaagacatactcctaaaccttctaagatggcgttttcccactgcaaatgattttggttctgaaataattcctgcttcagcaaaagaaatcgatgtaaaggcttatcttttcaatgattactgggaagatattggaactattaagtccttctttgaggcaaaccttgctcttgctgaacagcctccaaggttcagtttctacgatgctgacaaaccaatgtatacatcacggagaaacctaccaccatctatggtcaacaatagtaaggatagaacatagtgttgttggagttcgttctcggataggctccaatgtgcacctcaaggatactgtaatgcttggcgctgattattatgaaactgccgtggaaagaggagagctgcttgcagaaggaaaagttcctattgggattggagagaatacaacgattcaaaagtgtatcatagacaagaatgcgaggatagggaagaaagtggtaatctccaactctgaaggtgtagatgaagctgatagaacttccgaaggcttctacattcgatctggcatcactgtcgtactgaagaacgcgataattgctgatggattggtcatatgagctgaaaaggtctcacaggacgggtatttgccgcacaaaatatcaataggagttctttgttagttttacaataagatgctgtatagcagtcaacaggttattcttgtctatacaagatacctttgtctacaaatcttgtctcaccatgttgtattcgactcaaacaatgttgcagtcatggacattgtccgtttcaaattttcttccttgcacatttacacaaaccttttcaatttttatttcttgctaaacaataaaagctgttgttct

SEQ ID NO: 11048 - DNA, 1535 bp, Zea Mays
gccgaagccctgggtgcgctatccgcgaccgcgacgatgggtctgcgcgtggccgccaccgcgccagctccggccggcgtgcgcgtgctcggcaggggcgccgcgcgcgtgacgccgcgaccgtgggcggctgtcggcggcaggagacgcttctccgtgcggatgtccgtcgcgaccaccgaggccaccaccaccatcgccgtgggcgcctcggaggaccaggcgctggaggctaggaactccaagacggtggtggcggtcatcctcggcggtggcgccgggaccaggctcttcccgcttaccagacgcagggccaagcccgcggtgccaattggcggcgcgtacaggctcatcgacgtgccgatgagcaactgcataaacagcgggatcaacaaggtctacatcctcacgcagttcaactcgcaatccctcaatcgccacctctccagagcctacgatttcagcaatggcgtggccatcggagacggattcgtcgaggttctagcagcaacccagaggcctggaacggaggggaaaaggtggtttcagggtactgctgatgcagttcggcagttcgactggcttttcgatgatgcaaaatctaaagacattgaagatgtgctgattctttctggtgaccatctctaccgtatggactacatggactttgttcagagtcatcggcaaagaggtgcaggcatcagcatctgttgtttgccaattgatggcagccgggcatctgattttggcctaatgaagatagacgacactggaagggtaatttcattcagtgagaaaccaaaaggagacgaattaaaggcaatgcaagttgacaccacagtgcttggcttatcaaaggaggaagcagaaaacaaaccttatatagcttcaatggggatctatatttttaagaaagacatactcctaaaccttctaaggtatgtcaattcaacttactggagctcacagagtttcattaaaatatctatgtgattatccaggcaaaagggaattaggatcctccattttatgttcaaatattctattcagttaactgcacaattactcgtttaccttaagccggactatatcatcgttaggtcagatggcgttttcccactgcaaatgattttggttctgaaataattcctgcttcagcaaaagaaatcgatgtaaaggtacgtccgtacgtgtacctatgaatttaacatattggattccaagtagcaattacactgtttaagcatggttgcatagttcaaggaaacaggatcgcatcactttgctatttgcattcctgctaacaaacagtcggaaatttaatatgccatgccccatgcagaacattcgacaaaaaaatggcatgcatgctagtatgtaagaactttttcagcaacatcttcacttgttaagttacagttgcgctgcaaatcttgcactatttgaagacaggcatatcaccatcttagttatgtattcatcctgcctcataatcttgtcccaaaatcttgacttgatattatgatggacatttc

SEQ ID NO: 11049 - DNA, 1582 bp, Zea Mays
ataaaccagagcagcagagcgctctgtatcgttggttccgcctagggttttagcttctgccgccgtaacctcacctcccggcccttgtcgccgcaagtccgcaacctcaccatccttcgaatcccatacgaatccctagcccgcaacccgccgggcgacgagcggcggagcccgcagccaacatggaccggtaccatagggtggagcgggcgcggaaccagtcgaccatcgaagagaacgagatccgcatcaccgcgcagggcctcatccgcaactatgtctcatatgctaccttcctcctccaggaaaggagaattaaagagattgttttgaaggccatgggacaggcaatcagtaagtctgttgctgttgcagagattatcaagaaaagggcccctgagttacaccaggataccaacatcagctctgtcagcatcactgatgtctgggaacccatagaagaaggacttgtcccattggagatgactcggcatgtttctatgatatcaattactttgtcccccagagagctggacaagcacactcctgggtaccaagctccagcatatgttgaacatcccaggcaacagcaggtggctatggtggatatggaaacaatcaaggtggctataaccaaggtggtgggtattacgacaatcaaggtggatatggtggctatgatgatcaaggtgggtatggtggtggatatggctacaaccaaggcagatatggaaactatcaagaaaatggtggatataaccgaggtagaggaggtggtatgcgaggaagaggcaattggggttaccgtggaggctatgaaggaggcaggggtggtggctatgaaggaggcagggtcggcggcggctatgaaggtggcaggggtggtggctatgaaggaggcagggtcggcggcggctatgaaggtggcaggggtggtggtggtcctggtggaaggggatatggtggccgaggaaggggtagaatgggtggcggcggacgagcgaactaagtgcatgcagacttctggcgtttccttcaatgcatgccttatcaatatatcagggaaaatacgagcattttatgttggaagcagttcagttacgtgtgaggtctgttgtttttttccctgggcgcgaggtttggttgtgagcataatgcatatgcaagttttatcatgtaagtcatctttcaattttcctgctgcagaggttgttttccactttttcccatgatcgttgatgctgagcatgctgccctatgttcatgcctgcagtattaactgatggcaactcttgccctgagttaaaatgttaattctatttgtgcagtttcctttcgtcagttatgcatccatcattccatcaagattggcgcattatattattattatccaacattagcaaatagcgcacatgaaaatattgtgcatacatgttctgtatggcgtgcgcactcgtcgttcacacatgggtttgcaaaattatcgagcacaacccttattttgattacattcatattttcccccttttcagagcaaatacgcatggaagaaaataaatatcaaattaaaaaaatgagaaca

SEQ ID NO: 11050 - DNA, 1420 bp, Zea Mays
ataaaccagagcagcagagcgctctgtatcgttggttccgcctagggttttagcttctgccgccgtaacctcacctcccggcccttgtcgccgcaagtccgcaacctcaccatccttcgaatcccatacgaatccctagcccgcaacccgccgggcgacgagcggcggagcccgcagccaacatggaccggtaccatagggtggagcgggcgcggaaccagtcgaccatcgaagagaacgagatccgcatcaccgcgcagggcctcatccgcaactatgtctcatatgctaccttcctcctccaggaaaggagaattaaagagattgttttgaaggccatgggacaggcaatcagtaagtctgttgctgttgcagagattatcaagaaaagggcccctgagttacaccaggataccaacatcagctctgtcagcatcactgatgtctgggaacccatagaagaaggacttgtcccattggagatgactcggcatgtttctatgatatcaattactttgtcccccagagagctggacaagcacactcctgggtaccaagctccagcatatgttgaacatcccaggcaacagcaggtgccaccactgcagcgccaacctcgcagaccatcaggacaacaattccagcagctggagtatgaagattcctatgcacggggtcgaggaagagggaggggccgtgggcgtggaaggggttgggctagaggtggctatggtggatatggaaacaatcaaggtggctataaccaaggtggtgggtattacgacaatcaaggggatatggtggccgaggaaggggtagaatgggtggcggcggacgagcgaactaagtgcatgcagacttctggcgtttccttcaatgcatgccttatcaatatatcagggaaaatacgagcattttatgttggaagcagttcagttacgtgtgaggtctgttgtttttttccctgggcgcgaggtttggttgtgagcataatgcatatgcaagttttatcatgtaagtcatctttcaattttcctgctgcagaggttgttttccactttttcccatgatcgttgatgctgagcatgctgccctatgttcatgcctgcagtattaactgatggcaactcttgccctgagttaaaatgttaattctatttgtgcagtttcctttcgtcagttatgcatccatcattccatcaagattggcgcattatattattattatccaacattagcaaatagcgcacatgaaaatattgtgcatacatgttctgtatggcgtgcgcactcgtcgttcacacatgggtttgcaaaattatcgagcacaacccttattttgattacattcatattttcccccttttcagagcaaatacgcatggaagaaaataaatatcaaattaaaaaaatgagaaca

SEQ ID NO: 11051 - DNA, 1042 bp, Zea Mays
ataaaccagagcagcagagcgctctgtatcgttggttccgcctagggttttagcttctgccgccgtaacctcacctcccggcccttgtcgccgcaagtccgcaacctcaccatccttcgaatcccatacgaatccctagcccgcaacccgccgggcgacgagcggcggagcccgcagccaacatggaccggtaccatagggtggagcgggcgcggaaccagtcgaccatcgaagagaacgagatccgcatcaccgcgcagggcctcatccgcaactatgtctcatatgctaccttcctcctccaggaaaggagaattaaagagattgttttgaaggccatgggacaggcaatcagtaagtctgttgctgttgcagagattatcaagaaaagggcccctgagttacaccaggataccaacatcagctctgtcagcatcactgatgtctgggaacccatagaagaaggacttgtcccattggagatgactcggcatgtttctatgatatcaattactttgtcccccagagagctggacaagcacactcctgggtgagtcagatgtgtatctttcttcagtgttaaggtaccaagctccagcatatgttgaacatcccaggcaacagcaggtgccaccactgcagcgccaacctcgcagaccatcaggacaacaattccagcagctggagtatgaagattcctatgcacggggtcgaggaagagggaggggccgtgggcgtggaaggggttgggctagaggtggctatggtggatatggaaacaatcaaggtggctataaccaaggtggtgggtattacgacaatcaaggtggatatggtggctatgatgatcaaggtgggtatggtggtggatatggctacaaccaaggcagatatggaaactatcaagaaaatggtggatataaccgaggtagaggaggtggtatgcgaggaagaggcaattggggttaccgtggagccctaccgagcacaaccataatcattcaatcattaaattggtttgaattttgaatctcgtttccag

SEQ ID NO: 11052 - DNA, 964 bp, Zea Mays
ataaaccagagcagcagagcgctctgtatcgttggttccgcctagggttttagcttctgccgccgtaacctcacctcccggcccttgtcgccgcaagtccgcaacctcaccatccttcgaatcccatacgaatccctagcccgcaacccgccgggcgacgagcggcggagcccgcagccaacatggaccggtaccatagggtggagcgggcgcggaaccagtcgaccatcgaagagaacgagatccgcatcaccgcgcagggcctcatccgcaactatgtctcatatgctaccttcctcctccaggaaaggagaattaaagagattgttttgaaggccatgggacaggcaatcagtaagtctgttgctgttgcagagattatcaagaaaagggcccctgagttacaccaggataccaacatcagctctgtcagcatcactgatgtctgggaacccatagaagaaggacttgtcccattggagatgactcggcatgtttctatgatatcaattactttgtcccccagagagctggacaagcacactcctgggtaccaagctccagcatatgttgaacatcccaggcaacagcaggtgccaccactgcagcgccaacctcgcagaccatcaggacaacaattccagcagctggagtatgaagattcctatgcacggggtcgaggaagagggaggggccgtgggcgtggaaggggttgggctagaggtggctatggtggatatggaaacaatcaaggtggctataaccaaggtggtgggtattacgacaatcaaggtggatatggtggctatgatgatcaaggtgggtatggtggtggatatggctacaaccaaggcagatatggaaactatcaagaaaatggtggatataaccgaggtagaggaggtggtatgcgaggaagaggcaattggggttaccgtggaggatgtggcttgccagtcgagcc

SEQ ID NO: 11053 - DNA, 968 bp, Zea Mays
aaatcagccataaaccagagcagcagagcgctctgtatcgttggttccgcctagggttttagcttctgccgccgtaacctcacctcccggcccttgtcgccgcaagtccgcaacctcaccatccttcgaatcccatacgaatccctagcccgcaacccgccgggcgacgagcggcggagcccgcagccaacatggaccggtaccatagggtggagcgggcgcggaaccagtcgaccatcgaagagaacgagatccgcatcaccgcgcagggcctcatccgcaactatgtctcatatgctaccttcctcctccaggaaaggagaattaaagagattgttttgaaggccatgggacaggcaatcagtaagtctgttgctgttgcagagattatcaagggcccctgagttacaccaggataccaacatcagctctgtcagcatcactgatgtctgggaacccatagaagaaggacttgtcccattggagatgactcggcatgtttctatgatatcaattactttgtcccccagagagctggacaagcacactcctgggtaccaagctccagcatatgttgaacatcccaggcaacagcaggtgccaccactgcagcgccaacctcgcagaccatcaggacaacaattccagcagctggagtatgaagattcctatgcacggggtcgaggaagagggaggggccgtgggcgtggaaggggttgggctagaggtggctatggtggatatggaaacaatcaaggtggctataaccaaggtggtgggtattacgacaatcaaggtggatatggtggctatgatgatcaaggtgggtatggtggtggatatggctacaaccaaggcagatatggaaactatcaagaaaatggtggatataaccgaggtagaggaggtggtatgcgaggaagaggcaattggggttaccgtggaggatgtggcttgccagtcgagcc

SEQ ID NO: 11054 - DNA, 1093 bp, Zea Mays
caacacctgaacgtgggtcccaatcgagccccatccctgagccccatctttcccaatcgagccccatccctcagccctcgccgccgccagctccaatccgctcagccgccgccaggtccaagcctcccgccgccaactactcgtcggtcggccgccctgtctctaggccatctcgacaccatctcctcggcactaggaagcctcggccccgccatcagttcctcactggcaggccgctctaccgcgtcgcgtcgccgccagggcacgctcctcgtcgtcaactcctcctcaccgcctcagtgcgcccccaccgcagatcggagagtagcctgcgcagatcggagagcaggcttgcctccacagtagtcgttgtgccacagatctgctcgacgctccctcctgccgccaagctcgcactcaccattgtcgtcgagccagacgagcaggaggagcttccccacgtcggtcgatgcgaccctagatttgggggcagccgttgtcgatttcacaccatgcactcaacatcctccttcgcccaagactgcttgcagcatggattcacgcatgtcgcgggcgagcggctcctccgatggaggacaaggatggcctaggtatggtccggtgtcgctcatccgctgccccaaatgtgaaaggccggagtcgcttgtttgactcagatcgaaaaggtgggagaacgacaattttggtcgagagttcatgaagtgtgaaagcaagccgcaacaagataaggggcagagttggtggtggtttgagagagatgatgctgtctaaaatatgggatgaacaagcggaagatgtgactacgaactggaacaaatttgctgccaaaatgaagaaggtgaatgataatatggtcgagttgaagaagatgaatgccagcatggtcgagttgaagaacatgtttatagctttttatgcttctatgatgtttattgtcttgctttttcttgtgataaactcaaattgtaagtgctaaatctgtgattaatggtgtgaattctggtgtgagacaaatttatgtgaattctgttgtgagacaaatttatgtgaattgtgtgatgagatctgaatc

SEQ ID NO: 11055 - DNA, 1189 bp, Zea Mays
tgttgacgtccctaacagcacggtcccacgtctttcaacacctgaacgtgggtcccaatcgagccccatccctgagccccatctttcccaatcgagccccatccctcagccctcgccgccgccagctccaatccgctcagccgccgccaggtccaagcctcccgccgccaactactcgtcggtcggccgccctgtctctaggccatctcgacaccatctcctcggcactaggaagcctcggccccgccatcagttcctcactggcaggccgctctaccgcgtcgcgtcgccgccagggcacgctcctcgtcgtcaactcctcctcaccgcctcagtgcgcccccaccgcagatcggagagtagcctgcgcagatcggagagcaggcttgcctccacagtagtcgttgtgccacagatctgctcgacgctccctcctgccgccaagctcgcactcaccattgtcgtcgagccagacgagcaggaggagcttccccacgtcggtcgatgcgaccctagatttgggggcagccgttgtcgatttcacaccatgcactcaacatcctccttcgcccaagactgcttgcagtagcatggattcacgcatgtcgcgggcgagcggctcctccgatggaggacaaggatggcctaggtatggtccggtgtcgctcatccgctgccccaaatgtgaaaggccggagtcgcttgtttgactcagatcgaaaaggtgggagaacgacaattttggtcgagagttcatgaagtgtgaaagcaagccgcaacaagataaggttcttaaaatatgcaattttttcatgtggatggatgattatgtcaagatgattgaaggggcagagttggtggtggtttgagagagatgatgctgtctaaaatatgggatgaacaagcggaagatgtgactacgaactggaacaaatttgctgccaaaatgaagaaggtgaatgataatatggtcgagttgaagaagatgaatgccagcatggtcgagttgaagaacatgtttatagctttttatgcttctatgatgtttattgtcttgctttttcttgtgataaactcaaattgtaagtgctaaatctgtgattaatggtgtgaattctggtgtgagacaaatttatgtgaattctgttgtgagacaaatttatgtgaattgtgtgatgagatctgaatc

SEQ ID NO: 11056 - DNA, 989 bp, Zea Mays
cttttgttgacgtccctaacagcacggtcccacgtctttcaacacctgaacgtgggtcccaatcgagccccatccctgagccccatctttcccaatcgagccccatccctcagccctcgccgccgccagctccaatccgctcagccgccgccaggtccaagcctcccgccgccaactactcgtcggtcggccgccctgtctctaggccatctcgacaccatctcctcggcactaggaagcctcggccccgccatcagttcctcactggcaggccgctctaccgcgtcgcgtcgccgccagggcacgctcctcgtcgtcaactcctcctcaccgcctcacttccccacgtcggtcgatgcgaccctagatttgggggcagccgttgtcgatttcacaccatgcactcaacatcctccttcgcccaagactgcttgcagcatggattcacgcatgtcgcgggcgagcggctcctccgatggaggacaaggatggcctaggtatggtccggtgtcgctcatccgctgccccaaatgtgaaaggccggagtcgcttgtttgactcagatcgaaaaggtgggagaacgacaattttggtcgagagttcatgaagtgtgaaagcaagccgcaacaagataagatgattgaaggggcagagttggtggtggtttgagagagatgatgctgtctaaaatatgggatgaacaagcggaagatgtgactacgaactggaacaaatttgctgccaaaatgaagaaggtgaatgataatatggtcgagttgaagaagatgaatgccagcatggtcgagttgaagaacatgtttatagctttttatgcttctatgatgtttattgtcttgctttttcttgtgataaactcaaattgtaagtgctaaatctgtgattaatggtgtgaattctggtgtgagacaaatttatgtgaattctgttgtgagacaaatttatgtgaattgtgtgatgagatctgaatc

SEQ ID NO: 11057 - DNA, 979 bp, Zea Mays
cttttgttgacgtccctaacagcacggtcccacgtctttcaacacctgaacgtgggtcccaatcgagccccatccctgagccccatctttcccaatcgagccccatccctcagccctcgccgccgccagctccaatccgctcagccgccgccaggtccaagcctcccgccgccaactactcgtcggtcggccgccctgtctctaggccatctcgacaccatctcctcggcactaggaagcctcggccccgccatcagttcctcactggcaggccgctctaccgcgtcgcgtcgccgccagggcacgctcctcgtcgtcaactcctcctcaccgcctcacttccccacgtcggtcgatgcgaccctagatttgggggcagccgttgtcgatttcacaccatgcactcaacatcctccttcgcccaagactgcttgcagcatggattcacgcatgtcgcgggcgagcggctcctccgatggaggacaaggatggcctaggtatggtccggtgtcgctcatccgctgccccaaatgtgaaaggccggagtcgcttgtttgactcagatcgaaaaggtgggagaacgacaattttggtcgagagttcatgaagtgtgaaagcaagccgcaacaagataaggggcagagttggtggtggtttgagagagatgatgctgtctaaaatatgggatgaacaagcggaagatgtgactacgaactggaacaaatttgctgccaaaatgaagaaggtgaatgataatatggtcgagttgaagaagatgaatgccagcatggtcgagttgaagaacatgtttatagctttttatgcttctatgatgtttattgtcttgctttttcttgtgataaactcaaattgtaagtgctaaatctgtgattaatggtgtgaattctggtgtgagacaaatttatgtgaattctgttgtgagacaaatttatgtgaattgtgtgatgagatctgaatc

SEQ ID NO: 11058 - DNA, 1037 bp, Zea Mays
cttttgttgacgtccctaacagcacggtcccacgtctttcaacacctgaacgtgggtcccaatcgagccccatccctgagccccatctttcccaatcgagccccatccctcagccctcgccgccgccagctccaatccgctcagccgccgccaggtccaagcctcccgccgccaactactcgtcggtcggccgccctgtctctaggccatctcgacaccatctcctcggcactaggaagcctcggccccgccatcagttcctcactggcaggccgctctaccgcgtcgcgtcgccgccagggcacgctcctcgtcgtcaactcctcctcaccgcctcacttccccacgtcggtcgatgcgaccctagatttgggggcagccgttgtcgatttcacaccatgcactcaacatcctccttcgcccaagactgcttgcagcatggattcacgcatgtcgcgggcgagcggctcctccgatggaggacaaggatggcctaggtatggtccggtgtcgctcatccgctgccccaaatgtgaaaggccggagtcgcttgtttgactcagatcgaaaaggtgggagaacgacaattttggtcgagagttcatgaagtgtgaaagcaagccgcaacaagataaggttcttaaaatatgcaattttttcatgtggatggatgattatgtcaagatgattgaaggggcagagttggtggtggtttgagagagatgatgctgtctaaaatatgggatgaacaagcggaagatgtgactacgaactggaacaaatttgctgccaaaatgaagaaggtgaatgataatatggtcgagttgaagaagatgaatgccagcatggtcgagttgaagaacatgtttatagctttttatgcttctatgatgtttattgtcttgctttttcttgtgataaactcaaattgtaagtgctaaatctgtgattaatggtgtgaattctggtgtgagacaaatttatgtgaattctgttgtgagacaaatttatgtgaattgtgtgatgagatctgaatc

SEQ ID NO: 11059 - DNA, 1150 bp, Zea Mays
ttccacttttgttgacgtccctaacagcacggtcccacgtctttcaacacctgaacgtgggtcccaatcgagccccatccctgagccccatctttcccaatcgagccccatccctcagccctcgccgccgccagctccaatccgctcagccgccgccaggtccaagcctcccgccgccaactactcgtcggtcggccgccctgtctctaggccatctcgacaccatctcctcggcactaggaagcctcggccccgccatcagttcctcactggcaggccgctctaccgcgtcgcgtcgccgccagggcacgctcctcgtcgtcaactcctcctcaccgcctcagtgcgcccccaccgcagatcggagagtagcctgcgcagatcggagagcaggcttgcctccacagtagtcgttgtgccacagatctgctcgacgctccctcctgccgccaagctcgcactcaccattgtcgtcgagccagacgagcaggaggagcttccccacgtcggtcgatgcgaccctagatttgggggcagccgttgtcgatttcacaccatgcactcaacatcctccttcgcccaagactgcttgcagtagcatggattcacgcatgtcgcgggcgagcggctcctccgatggaggacaaggatggcctaggtatggtccggtgtcgctcatccgctgccccaaatgtgaaaggccggagtcgcttgtttgactcagatcgaaaaggtgggagaacgacaattttggtcgagagttcatgaagtgtgaaagcaagccgcaacaagataagatgattgaaggggcagagttggtggtggtttgagagagatgatgctgtctaaaatatgggatgaacaagcggaagatgtgactacgaactggaacaaatttgctgccaaaatgaagaaggtgaatgataatatggtcgagttgaagaagatgaatgccagcatggtcgagttgaagaacatgtttatagctttttatgcttctatgatgtttattgtcttgctttttcttgtgataaactcaaattgtaagtgctaaatctgtgattaatggtgtgaattctggtgtgagacaaatttatgtgaattctgttgtgagacaaatttatgtgaattgtgtgatgagatctgaatc

SEQ ID NO: 11060 - DNA, 1000 bp, Zea Mays
cgtttccacttttgttgacgtccctaacagcacggtcccacgtctttcaacacctgaacgtgggtcccaatcgagccccatccctgagccccatctttcccaatcgagccccatccctcagccctcgccgccgccagctccaatccgctcagccgccgccaggtccaagcctcccgccgccaactactcgtcggtcggccgccctgtctctaggccatctcgacaccatctcctcggcactaggaagcctcggccccgccatcagttcctcactggcaggccgctctaccgcgtcgcgtcgccgccagggcacgctcctcgtcgtcaactcctcctcaccgcctcacttccccacgtcggtcgatgcgaccctagatttgggggcagccgttgtcgatttcacaccatgcactcaacatcctccttcgcccaagactgcttgcagtagcatggattcacgcatgtcgcgggcgagcggctcctccgatggaggacaaggatggcctaggtatggtccggtgtcgctcatccgctgccccaaatgtgaaaggccggagtcgcttgtttgactcagatcgaaaaggtgggagaacgacaattttggtcgagagttcatgaagtgtgaaagcaagccgcaacaagataagatgattgaaggggcagagttggtggtggtttgagagagatgatgctgtctaaaatatgggatgaacaagcggaagatgtgactacgaactggaacaaatttgctgccaaaatgaagaaggtgaatgataatatggtcgagttgaagaagatgaatgccagcatggtcgagttgaagaacatgtttatagctttttatgcttctatgatgtttattgtcttgctttttcttgtgataaactcaaattgtaagtgctaaatctgtgattaatggtgtgaattctggtgtgagacaaatttatgtgaattctgttgtgagacaaatttatgtgaattgtgtgatgagatctgaatc

SEQ ID NO: 11061 - DNA, 2658 bp, Zea Mays
ggggcacccaccccacccgtcggtcgatagcgcagtgcgcagcggcaacgacagaggagacagacacgagtgggtgtgcgagcattcaggcgaagccgatcaccctcgcccagcccaaagggtcggcgggcaggcgaaagcaacgccccaaccacctgatccctccaccccatcgcacgccataacaaagcagagcgccacgccaccaccaccccagctcactcgtgccgtgcactcgacccgtcccccctccctccactcgatccacccgccaagacctcccattgccgccgccgagccagccagggggggagaagagaggccagccgcgtcgcggcgggcggaggaggaggacgagcgggagagccgagccgagccggccgggcaggatgttcgggcgggacccctggggcgggccgctggagatctccaacgccgactcggcgacggacgacgaccggagccgcgacctggaccgggcggcgctgatgcggcagctggacgagacgcagcagagctggctcctggccgggcccggcgaccaggccggcaagaagaagaagcggtacgtcgacctcggctgcgtcgtcgtcgaccgtaaggtcttcatgtggaccgtcggcaccatcctcggcctcggcgtcttcatcggcttcgtcatcatgatcgtcaagctcgtcccgcacaagcgccccccgccgccgccgcccgaccagtacacgcaggcgctgcacaaggcgctcatgttcttcaacgcgcagcgatccggcccgctgccgaagcacaatggcgtgagctggaggggcaactcctgcatgaaggacggcctctccgacagcaccgtccgccggagcctggtcggaggcttctacgacgcgggggacgccatcaagttcaactaccccatggcatggtccatgaccatgctcagctggagcgtgatcgagtacagggccaagtacgaggccatcggcgagctcgaccatatcagggagctcatcaagtggggaacggactacatcctcaagaccttcaattcgtctgccgacacgatagacaggatcgtcgctcaggtgggtgtaggtgacacctctaaaggcagcagtcagcctaacgaccattactgctggatgaggccagaggacatcgactacaagaggccggtcaccgagtgccactcctgctcagatctagcgtcggaaatggctgccgccctggccgcagcttccatagtgttcaagaacagcaagacctactccgacaagctcgtcaagggcgccaaggccctgtacaagttcggcaggctgcagcgtgggcgatacagccccaacggatctgaccaggccatcttctacaactccaccagctactgggacgagttcgtgtggggcggtgcgtggatgtacttcgccacggggaacaactcgtacctcaccgtcgccacagccccgggaatggcgaagcacgctggagcatactggtttggaagtccaaactacggagtgtttacctgggatgacaaacttccaggagctcaggttcttctcagcaggttgcgactcttcctaagtccagggtacccttacgaagaaatactgaggacattccacaaccaaaccgacaacgtcatgtgctcgtatttacctgtattcaattcattcaacttcaccaaaggaggattaatacagctcaaccatggaaggcctcaaccgcttcagtacgctgtcaacgcagctttccttgcttctttatacagcgactatcttgaagcggctgacacgcctgggtggtactgtggaccgaacttctacaccatagaagtcctccgcaagtttgccaggtcacagaacccattgaagatgagctacgttgtgggtttcggaaacaagtacccgaagcgccctcaccacagaggtgcgtcgatacctcataacggcgtcaagtatggatgcaaaggaggttacaaatggagggacacgaagaaggcaaaccctaacatccttgttggagcaatggtggctggccctgacaggcgtgacggctacaaagatgtccgcacgaactacaactacacagagcctacccttgcagcaaacgctggcctggttgcagcactgatttctatatctgatatcaaaaccggacggttcggcatcgacaagaacaccatcttctctgcgatccctccgatgtttccgacaccaccgccgccaccatcagcatggaaaccatagagagacagacctctgaatatccgccccccccccccccccccccccccccaaaaaaaaaagcatcaacacagggaagtggagcaaacatatgatcagttggtacagcaaaggccaggaacaggaaagcggacagcataagcttatagagcttctatttctgtaccagtgtgacagatcagtataaaatcctctgtcatacatagaccagaagttgtgtgcatcgcgtgaaagctaatttttggggtcttgttgctgtgggcattcctgctcatgtgtgaagttattttttgtagaaattgtacctttacaaattgttataggagtgacttttcatagtagtaaagcatttgtgtgacctgtacgcctgcttcgttttggtcctgttattttgtgtttaaaaatccctacttcaggggaaacatgc

SEQ ID NO: 11062 - DNA, 466 bp, Zea Mays
aaaaaatctctcgcatgagaaggaacgggcgcgtcgcgccactcctcgctcatggcgtcctccactctgccagccttccccttccgtccgtctcttcccggacttacgtccccggatcctgctaagcttaaccacgtatctgtttgaagacccgttcgccgtcttcccgttgcggcctccgcggcaccgtcgggcgccgccgccgcggcgacggagcgcaagcgcttccgggagcgctacgggctcaacccagacgacttcgaggaagatgcagaggaggatccaagggaagagagcagggacaggcggagccgcggagacagcagcagtctgggagaggggagcaaactgtggaagctgcagttactccagcgaaggtggcggagcctcgggagactcacaaatcacaatcaatacgtaatgcagttacttcagatcctggaaaaacaaatatgggtcgtcaagg

SEQ ID NO: 11063 - DNA, 1119 bp, Zea Mays
tgatcaatgaccttgactgcctggttgcttcttgatatatgttgaagaaaatgcaacgggcagtgcaggccgtcaggtcacacggcaatgttcttaaatatgctgttctacaacacatcagcgctcccaagccagcaatgcttcctgctgccttttctcgtttcatgtcagtttcatctgctcgcctagaggatcgtggatttgaaactgccactgtagcagatgtcttgaagtctaaagggaagagtgctgatggatcttggctctggtgcaccacagaggatagcgtctatgacgctgtcaaatctatgactcagcacaacgtgggagctttggtggttgtcaaacctggacagaataaatcaatcgctggcattgtcactgagagagattatctccggaaaatcatagtgcagggaaggtcttccaagtcaactaaggttggcgacatcatgactgaagagaacaaactgatcacagtgaatcccgacaccaaggtcctgcaggcaatgcagctcatgacagaaaaccgcgtcagacacatcccggtgatcgacggcacggggatgctggggatggtctccatcggcgacgtcgtgcgcgcggtggtggccgagcacagggaggagctgaaccggctcaatgactacatccagggaggctactaggacggcgtgtgcagcgacgaccccctccgatcccgccagtcagtgaagtccgcctttgaaatccaataactcggaacaatgatgatgacgaaataggccgtgttttcttggacaatgatgttaagttcggcaaggttttcctttctctttttttattctactgcgtggtctatgtgtatattgccaaaggcatgcgtgagccatgcgcccggtgctggggcgcagagaccatctgatggtggaaacaccggaaataagagcgtgccgctgtgtgtttcctttgaaggaataaaaatggtgttcgtgttgtgcattgcttattgttgatgttcgctttggattaaggccttgtttatgaacggtacggattcagtgcagtactgtacgtgcagaactgggaaggctttactttatgaattacatcttctgtttttagcttcatcatgaaata

SEQ ID NO: 11064 - DNA, 2081 bp, Zea Mays
tatttccttgtctctgtttttctttgtactggactccccctacttctgacaagaagaaaatgcaacgggcagtgcaggccgtcaggtcacacggcaatgttcttaaatatgctgttctacaacacatcagcgctcccaagccagcaatgcttcctgctgccttttctcgtttcatgtcagtttcatctgctcgcctagaggatcgtggatttgaaactgccactgtagcagatgtcttgaagtctaaagggaagagtgctgatggatcttggctctggtgcaccacagaggatagcgtctatgacgctgtcaaatctatgactcagcacaacgtgggagctttggtggttgtcaaacctggacagaataaatcaatcgctggcattgtcactgagagaggtgatgaacaaatttctgtactcttggcatctaacttttggcctgtgggtatgatgggaaaaatacaaaatcatgtaccactacctccattttcatttaactggcacccttgaccaaagtttttctgatcataaatacttgatttaagataaagctggtcagctagtgcttgtagcttgctatttgaaacaatgggcttttgaggtgtttcccaattttctctcatctctctatgttttcatagttcttgccttttcctgttcctttaattggaaaaatatcattagatgcaaaaccatattactttactgcccctttatggtgataagaaactccgacgcattggaaagggaagtatgttcggcgggtaggttgtgaatgtataactccgctttgtttttacttcagctgtgcatcatagtacttttggcatcaaagagtctcaactctttagagcactttatagtagatacaacagaaattgcatcaagttaaagtatacgtgtaagtaacataggatcttcttcacatggcacaatcatagctgccacttcacactgaatttcctattagagatgtataggctaactgacatcacttgttgtattcttgtatcacaagatgtactcagctacacacacgcgtcgcggtacaaacactgccgagcatggaggttgaaactgggccaacttcaggcacatcacatgatgatttctttttcactatgccttgctgcactgttcgcacgttacatcttggacttgaatgtgaccaagtagtatccatatacagacgatcactcgatcagcatacatagatggtatttttgagattagaaccaatacttgacagatcttgcattctgaaaacggaaacgtaagcgtggcaatcttttaagacatgcataagatcatagtgccatgaggctaacatctgagacttggtgttttcagattatctccggaaaatcatagtgcagggaaggtcttccaagtcaactaaggttggcgacatcatgactgaagagaacaaactgatcacagtgaatcccgacaccaaggtcctgcaggcaatgcagctcatgacagaaaaccgcgtcagacacatcccggtgatcgacggcacggggatgctggggatggtctccatcggcgacgtcgtgcgcgcggtggtggccgagcacagggaggagctgaaccggctcaatgactacatccagggaggctactaggacggcgtgtgcagcgacgaccccctccgatcccgccagtcagtgaagtccgcctttgaaatccaataactcggaacaatgatgatgacgaaataggccgtgttttcttggacaatgatgttaagttcggcaaggttttcctttctctttttttattctactgcgtggtctatgtgtatattgccaaaggcatgcgtgagccatgcgcccggtgctggggcgcagagaccatctgatggtggaaacaccggaaataagagcgtgccgctgtgtgtttcctttgaaggaataaaaatggtgttcgtgttgtgcattgcttattgttgatgttcgctttggattaaggccttgtttatgaacggtacggattcagtgcagtactgtacgtgcagaactgggaaggctttactttatgaattacatcttctgtttttagcttcatcatgaaata

SEQ ID NO: 11065 - DNA, 1100 bp, Zea Mays
ctgtgtcagcacagatgctgatctatagaaaatgcaacgggcagtgcaggccgtcaggtcacacggcaatgttcttaaatatgctgttctacaacacatcagcgctcccaagccagcaatgcttcctgctgccttttctcgtttcatgtcagtttcatctgctcgcctagaggatcgtggatttgaaactgccactgtagcagatgtcttgaagtctaaagggaagagtgctgatggatcttggctctggtgcaccacagaggatagcgtctatgacgctgtcaaatctatgactcagcacaacgtgggagctttggtggttgtcaaacctggacagaataaatcaatcgctggcattgtcactgagagagattatctccggaaaatcatagtgcagggaaggtcttccaagtcaactaaggttggcgacatcatgactgaagagaacaaactgatcacagtgaatcccgacaccaaggtcctgcaggcaatgcagctcatgacagaaaaccgcgtcagacacatcccggtgatcgacggcacggggatgctggggatggtctccatcggcgacgtcgtgcgcgcggtggtggccgagcacagggaggagctgaaccggctcaatgactacatccagggaggctactaggacggcgtgtgcagcgacgaccccctccgatcccgccagtcagtgaagtccgcctttgaaatccaataactcggaacaatgatgatgacgaaataggccgtgttttcttggacaatgatgttaagttcggcaaggttttcctttctctttttttattctactgcgtggtctatgtgtatattgccaaaggcatgcgtgagccatgcgcccggtgctggggcgcagagaccatctgatggtggaaacaccggaaataagagcgtgccgctgtgtgtttcctttgaaggaataaaaatggtgttcgtgttgtgcattgcttattgttgatgttcgctttggattaaggccttgtttatgaacggtacggattcagtgcagtactgtacgtgcagaactgggaaggctttactttatgaattacatcttctgtttttagcttcatcatgaaata

SEQ ID NO: 11066 - DNA, 1102 bp, Zea Mays
ctttttttcccccttggtttcttcacgaagaaaatgcaacgggcagtgcaggccgtcaggtcacacggcaatgttcttaaatatgctgttctacaacacatcagcgctcccaagccagcaatgcttcctgctgccttttctcgtttcatgtcagtttcatctgctcgcctagaggatcgtggatttgaaactgccactgtagcagatgtcttgaagtctaaagggaagagtgctgatggatcttggctctggtgcaccacagaggatagcgtctatgacgctgtcaaatctatgactcagcacaacgtgggagctttggtggttgtcaaacctggacagaataaatcaatcgctggcattgtcactgagagagattatctccggaaaatcatagtgcagggaaggtcttccaagtcaactaaggttggcgacatcatgactgaagagaacaaactgatcacagtgaatcccgacaccaaggtcctgcaggcaatgcagctcatgacagaaaaccgcgtcagacacatcccggtgatcgacggcacggggatgctggggatggtctccatcggcgacgtcgtgcgcgcggtggtggccgagcacagggaggagctgaaccggctcaatgactacatccagggaggctactaggacggcgtgtgcagcgacgaccccctccgatcccgccagtcagtgaagtccgcctttgaaatccaataactcggaacaatgatgatgacgaaataggccgtgttttcttggacaatgatgttaagttcggcaaggttttcctttctctttttttattctactgcgtggtctatgtgtatattgccaaaggcatgcgtgagccatgcgcccggtgctggggcgcagagaccatctgatggtggaaacaccggaaataagagcgtgccgctgtgtgtttcctttgaaggaataaaaatggtgttcgtgttgtgcattgcttattgttgatgttcgctttggattaaggccttgtttatgaacggtacggattcagtgcagtactgtacgtgcagaactgggaaggctttactttatgaattacatcttctgtttttagcttcatcatgaaata

SEQ ID NO: 11067 - DNA, 1133 bp, Zea Mays
aaaagacaagttttttccgcgaggaaagctagctcgacgtttacggtggtctcgctttaagaaaatgcaacgggcagtgcaggccgtcaggtcacacggcaatgttcttaaatatgctgttctacaacacatcagcgctcccaagccagcaatgcttcctgctgccttttctcgtttcatgtcagtttcatctgctcgcctagaggatcgtggatttgaaactgccactgtagcagatgtcttgaagtctaaagggaagagtgctgatggatcttggctctggtgcaccacagaggatagcgtctatgacgctgtcaaatctatgactcagcacaacgtgggagctttggtggttgtcaaacctggacagaataaatcaatcgctggcattgtcactgagagagattatctccggaaaatcatagtgcagggaaggtcttccaagtcaactaaggttggcgacatcatgactgaagagaacaaactgatcacagtgaatcccgacaccaaggtcctgcaggcaatgcagctcatgacagaaaaccgcgtcagacacatcccggtgatcgacggcacggggatgctggggatggtctccatcggcgacgtcgtgcgcgcggtggtggccgagcacagggaggagctgaaccggctcaatgactacatccagggaggctactaggacggcgtgtgcagcgacgaccccctccgatcccgccagtcagtgaagtccgcctttgaaatccaataactcggaacaatgatgatgacgaaataggccgtgttttcttggacaatgatgttaagttcggcaaggttttcctttctctttttttattctactgcgtggtctatgtgtatattgccaaaggcatgcgtgagccatgcgcccggtgctggggcgcagagaccatctgatggtggaaacaccggaaataagagcgtgccgctgtgtgtttcctttgaaggaataaaaatggtgttcgtgttgtgcattgcttattgttgatgttcgctttggattaaggccttgtttatgaacggtacggattcagtgcagtactgtacgtgcagaactgggaaggctttactttatgaattacatcttctgtttttagcttcatcatgaaata

SEQ ID NO: 11068 - DNA, 3848 bp, Zea Mays
aatgcgttggagcagttggcatccattgatctcatcgagctatgcaaggaggccagaattgagcgctgccgtgcaactagagacttgagtagctgtggccgctatgtgcaccatgtgcttaactcatgtggccatgcctcattatgtgctgagtgcagccaaagatgtgacgtctgcccaatctgcaggagtccaatatcggacaatggaaatagggttcagctacgtctttactacaagtgcctggaagcgggccttatttctaagcagcacgatgacaggtttcaggaaaaggaagaccatggcaatcctgttagcatggatgtccagcggctgcattcattgtttgatgttgcagtccagaacaatcttacttcccttatttgccactatatcacagatgtttgtttggatgagaatgctgtgtcaagtgatccacttctggcttttcttttggatgaggtggtcatcaaggactggtgcaagaaggctgttaatgcgctcattactgagattggcgtgatctgtatccaaaaactctagattcagttacgtggtttatatacatttttattatgtttcgcttttcatgtgttcaaggccacacatgttgagggacagatctcctattccatcccctatttcaaactccactttgcaaacagtgtcatctacagttccacgtcccctattttaggcgacccgctggagacagtcttaagtaactaaccttaacgacgccttagataagtttggattagaaatgatgagatctaagttatcccaactgcaaaagtttgccacacagttggcaggaatttacagtgtacttgaagttatggtttcatctttcaccgaagcggtttcagcgcatgttaatgacctgcatcaactcattgagaacacattgaaggcaaagcagcatttggaggctatgatctggtgtatcaggcatagctttattcaggatatctgctcaaggtacgctgatcatacatcatggagttctgatgtgattcaaaggaaagcatatgcagaaacaaaatggcctggattttctgatgaagtgtcagatgtaaatcaagccagtaagagtacactattcattgagcaggccctacaaaaccttgggattgaacaaagttatatggataaggaggaagaaatagcaatcacatgtttacagaatgaacaatcatcatctatgttctgttccacaattacaaccgatcattttagtattgacagatacccttttaagaatttgcgtgaggcagttgatgtactctttctacacggagcatcagacatggtgattgcaaaacaagctattttattgtattatctatttgatcgacattggagtaggccagattcagaatggaggtatctggtggatgattttgctgctacttttgggattactaatagaacattgcttgagtgcctggtattttgccttctagatgattattcttcagaagccttggaggaggcctgctctcatcttcccaagatctctagcaaggaaacacatccaaagatagcacaagttcttctggaacgacaaaaatatgatatggcacttcttgtgctaaagtgcacagggcatggaagcttctctgctacagaaaactttaaaaaagatgacatttcatctcttagtgaggcagtgactgtggttcgtgtcagaattgaatgtcgcctcctaacagaagcgtttatgtatcataggagctactgctctaaggtgaaagagcaacactcagcagatatgacacatgctgaggatgcattaaaaaactcttgggtttatcatgttgagatgatggtgaccgaattttgtgctatctgcattaaaaggaatttagttgataaaatgattgatctgccctgggattctgaggaggagaaacatcttcacaagtccctctttgactctgctcatgaaatgcccatgaaaccaaatggtagtctgcttgttgtctactaccttcggcgttatcggtatttggaggcatatgaggttgaccgtagtcttcaaaaatttgagcaaaagatattggaaaatacaactgaagagattgcttcaaaaatcagagcaattgctcgatggagagaaagtttagttgttaaatgccttgacatgcttccggaggtccagagagagaatgtgaaagccatcaacagtggagaacaaagtcaatttgctcgaactgctcaattatcttctccagctcatgtgggcaaatcacaaagtcctgtcatggacttgagcacaacttttacgacttctcttcaaaataagtcaagcctcctccgaaaaaacaatgcattgactgattctggtggtctgatccgaagcagccgctcagaatttggtagaaaggtcccatctgttctggataccagggcatcaccccatgggccacctacatccaatatgagatcaagtgcaggggatatgttccccacagtgggccagagagttgagagtccatttttgaggggggcgaaagatatcagttctagaaaaggagaggagggtttcaaaaaagggattaaatatggtgatcacgatccagtgcctatgtatttgaacttaagttctggtgatacacctatgaaagactaccgaacgagtttgctgaagactgcagttaacaaaaccactatttttcaaggaaaagattctgttggaaaaggagagctccactttggttcacgtgccgagaagcctttcatcttaaatggaactggtgtaggtcaaaatggcctcgctaaggtgtctggatatgctggttttcgtgaggattacaaagtaccaactaaggagaacatcttgagctctagcaagagatcttcaatcgatggagcagaagccagcaaaggtgtgtcaaggtggagatccgacgagtctagtgaagacgaagaagagagaacaaacagggagagcggagcttctcttgttactagaaggcgacctagattttcgagaagatgatatatccacgtcctcatggatctttattaattgtttgcagggcgaggattttttttgaatatctccacagttattaccctaatgtaacaaaaaaaacgtttcatcggaaaagtctaacaaacaaccgtatgcatggaatccggtccttaatagtgtctaggggacacgcatgggatacgccatatgcagcgtgagagagaaagaagctgctacctaggggctacggagggggcagcgctgcagtgacaagaggagcattgtcgcctctacaacggctacagtgttaacggagggagactccagtggtatgcgctgcaaatagcctaagtgcttcctcactgtgacttctgcagatgatggccacatgtgcttggctgcttgcaaataagcaaatggcaccgtgctttctgctgggctgaacacaccatatttcttcataagcatgattagttaaatactgagttacttttcatgttgtaatttcagtttcaaggtttagtactaacctttccgttttcattgcagacatcttgatcatttctgagattaaactgatgatgctgatgctcgtttagttatcttggtttggagatatatcagatatgggtgatcagaatcatggacgctttctccctctactgctctatctacatcttttgctgctaataattcagtttgctatgatagatatagcctccaagaagcaagcactccttgcttttgcctctgcagtctaccatggcaacaagctgaattggagccaaaaatatcccaatgtgatcatggcatggacatgctgaaaaatctcacaattataccagtcactgtcgattcattggcataa

SEQ ID NO: 11069 - DNA, 3864 bp, Zea Mays
aatgcgttggagcagttggcatccattgatctcatcgagctatgcaaggaggccagaattgagcgctgccgtgcaactagagacttgagtagctgtggccgctatgtgcaccatgtgcttaactcatgtggccatgcctcattatgtgctgagtgcagccaaagatgtgacgtctgcccaatctgcaggagtccaatatcggacaatggaaatagggttcagctacgtctttactacaagtgcctggaagcgggccttatttctaagcagcacgatgacaggtttcaggaaaaggaagaccatggcaatcctgttagcatggatgtccagcggctgcattcattgtttgatgttgcagtccagaacaatcttacttcccttatttgccactatatcacagatgtttgtttggatgagaatgctgtgtcaagtgatccacttctggcttttcttttggatgaggtggtcatcaaggactggtgcaagaaggctgttaatgcgctcattactgagattggcgtgatctgtatccaaaaactctagattcagttacgtggtttatatacatttttattatgtttcgcttttcatgtgttcaaggccacacatgttgagggacagatctcctattccatcccctatttcaaactccactttgcaaacagtgtcatctacagttccacgtcccctattttaggcgacccgctggagacagtcttaagtaactaaccttaacgacgccttagataagtttggattagaaatgatgagatctaagttatcccaactgcaaaagtttgccacacagttggcaggaatttacagtgtacttgaagttatggtttcatctttcaccgaagcggtttcagcgcatgttaatgacctgcatcaactcattgagaacacattgaaggcaaagcagcatttggaggctatgatctggtgtatcaggcatagctttattcaggatatctgctcaaggtacgctgatcatacatcatggagttctgatgtgattcaaaggaaagcatatgcagaaacaaaatggcctggattttctgatgaagtgtcagatgtaaatcaagccagtaagagtacactattcattgagcaggccctacaaaaccttgggattgaacaaagttatatggataaggaggaagaaatagcaatcacatgtttacagaatgaacaatcatcatctatgttctgttccacaattacaaccgatcattttagtattgacagatacccttttaagaatttgcgtgaggcagttgatgtactctttctacacggagcatcagacatggcatgctacttcattaaattttcttgacgcttctcagttattgtattatctatttgatcgacattggagtaggccagattcagaatggaggtatctggtggatgattttgctgctacttttgggattactaatagaacattgcttgagtgcctggtattttgccttctagatgattattcttcagaagccttggaggaggcctgctctcatcttcccaagatctctagcaaggaaacacatccaaagatagcacaagttcttctggaacgacaaaaatatgatatggcacttcttgtgctaaagtgcacagggcatggaagcttctctgctacagaaaactttaaaaaagatgacatttcatctcttagtgaggcagtgactgtggttcgtgtcagaattgaatgtcgcctcctaacagaagcgtttatgtatcataggagctactgctctaaggtgaaagagcaacactcagcagatatgacacatgctgaggatgcattaaaaaactcttgggtttatcatgttgagatgatggtgaccgaattttgtgctatctgcattaaaaggaatttagttgataaaatgattgatctgccctgggattctgaggaggagaaacatcttcacaagtccctctttgactctgctcatgaaatgcccatgaaaccaaatggtagtctgcttgttgtctactaccttcggcgttatcggtatttggaggcatatgaggttgaccgtagtcttcaaaaatttgagcaaaagatattggaaaatacaactgaagagattgcttcaaaaatcagagcaattgctcgatggagagaaagtttagttgttaaatgccttgacatgcttccggaggtccagagagagaatgtgaaagccatcaacagtggagaacaaagtcaatttgctcgaactgctcaattatcttctccagctcatgtgggcaaatcacaaagtcctgtcatggacttgagcacaacttttacgacttctcttcaaaataagtcaagcctcctccgaaaaaacaatgcattgactgattctggtggtctgatccgaagcagccgctcagaatttggtagaaaggtcccatctgttctggataccagggcatcaccccatgggccacctacatccaatatgagatcaagtgcaggggatatgttccccacagtgggccagagagttgagagtccatttttgaggggggcgaaagatatcagttctagaaaaggagaggagggtttcaaaaaagggattaaatatggtgatcacgatccagtgcctatgtatttgaacttaagttctggtgatacacctatgaaagactaccgaacgagtttgctgaagactgcagttaacaaaaccactatttttcaaggaaaagattctgttggaaaaggagagctccactttggttcacgtgccgagaagcctttcatcttaaatggaactggtgtaggtcaaaatggcctcgctaaggtgtctggatatgctggttttcgtgaggattacaaagtaccaactaaggagaacatcttgagctctagcaagagatcttcaatcgatggagcagaagccagcaaaggtgtgtcaaggtggagatccgacgagtctagtgaagacgaagaagagagaacaaacagggagagcggagcttctcttgttactagaaggcgacctagattttcgagaagatgatatatccacgtcctcatggatctttattaattgtttgcagggcgaggattttttttgaatatctccacagttattaccctaatgtaacaaaaaaaacgtttcatcggaaaagtctaacaaacaaccgtatgcatggaatccggtccttaatagtgtctaggggacacgcatgggatacgccatatgcagcgtgagagagaaagaagctgctacctaggggctacggagggggcagcgctgcagtgacaagaggagcattgtcgcctctacaacggctacagtgttaacggagggagactccagtggtatgcgctgcaaatagcctaagtgcttcctcactgtgacttctgcagatgatggccacatgtgcttggctgcttgcaaataagcaaatggcaccgtgctttctgctgggctgaacacaccatatttcttcataagcatgattagttaaatactgagttacttttcatgttgtaatttcagtttcaaggtttagtactaacctttccgttttcattgcagacatcttgatcatttctgagattaaactgatgatgctgatgctcgtttagttatcttggtttggagatatatcagatatgggtgatcagaatcatggacgctttctccctctactgctctatctacatcttttgctgctaataattcagtttgctatgatagatatagcctccaagaagcaagcactccttgcttttgcctctgcagtctaccatggcaacaagctgaattggagccaaaaatatcccaatgtgatcatggcatggacatgctgaaaaatctcacaattataccagtcactgtcgattcattggcataa

SEQ ID NO: 11070 - DNA, 3386 bp, Zea Mays
aatgcgttggagcagttggcatccattgatctcatcgagctatgcaaggaggccagaattgagcgctgccgtgcaactagagacttgagtagctgtggccgctatgtgcaccatgtgcttaactcatgtggccatgcctcattatgtgctgagtgcagccaaagatgtgacgtctgcccaatctgcaggagtccaatatcggacaatggaaatagggttcagctacgtctttactacaagtgcctggaagcgggccttatttctaagcagcacgatgacaggtttcaggaaaaggaagaccatggcaatcctgttagcatggatgtccagcggctgcattcattgtttgatgttgcagtccagaacaatcttacttcccttatttgccactatatcacagatgtttgtttggatgagaatgctgtgtcaagtgatccacttctggcttttcttttggatgaggtggtcatcaaggactggtgcaagaaggctgttaatgcgctcattactgagattggcgtgatctgtatccaaaaactctagattcagttacgtggtttatatacatttttattatgtttcgcttttcatgtgttcaaggccacacatgttgagggacagatctcctattccatcccctatttcaaactccactttgcaaacagtgtcatctacagttccacgtcccctattttaggcgacccgctggagacagtcttaagtaactaaccttaacgacgccttagataagtttggattagaaatgatgagatctaagttatcccaactgcaaaagtttgccacacagttggcaggaatttacagtgtacttgaagttatggtttcatctttcaccgaagcggtttcagcgcatgttaatgacctgcatcaactcattgagaacacattgaaggcaaagcagcatttggaggctatgatctggtgtatcaggcatagctttattcaggatatctgctcaaggtacgctgatcatacatcatggagttctgatgtgattcaaaggaaagcatatgcagaaacaaaatggcctggattttctgatgaagtgtcagatgtaaatcaagccagtaagagtacactattcattgagcaggccctacaaaaccttgggattgaacaaagttatatggataaggaggaagaaatagcaatcacatgtttacagaatgaacaatcatcatctatgttctgttccacaattacaaccgatcattttagtattgacagatacccttttaagaatttgcgtgaggcagttgatgtactctttctacacggagcatcagacatgttattgtattatctatttgatcgacattggagtaggccagattcagaatggaggtatctggtggatgattttgctgctacttttgggattactaatagaacattgcttgagtgcctggtattttgccttctagatgattattcttcagaagccttggaggaggcctgctctcatcttcccaagatctctagcaaggaaacacatccaaagatagcacaagttcttctggaacgacaaaaatatgatatggcacttcttgtgctaaagtgcacagggcatggaagcttctctgctacagaaaactttaaaaaagatgacatttcatctcttagtgaggcagtgactgtggttcgtgtcagaattgaatgtcgcctcctaacagaagcgtttatgtatcataggagctactgctctaaggtgaaagagcaacactcagcagatatgacacatgctgaggatgcattaaaaaactcttgggtttatcatgttgagatgatggtgaccgaattttgtgctatctgcattaaaaggaatttagttgataaaatgattgatctgccctgggattctgaggaggagaaacatcttcacaagtccctctttgactctgctcatgaaatgcccatgaaaccaaatggtagtctgcttgttgtctactaccttcggcgttatcggtatttggaggcatatgaggttgaccgtagtcttcaaaaatttgagcaaaagatattggaaaatacaactgaagagattgcttcaaaaatcagagcaattgctcgatggagagaaagtttagttgttaaatgccttgacatgcttccggaggtccagagagagaatgtgaaagccatcaacagtggagaacaaagtcaatttgctcgaactgctcaattatcttctccagctcatgtgggcaaatcacaaagtcctgtcatggacttgagcacaacttttacgacttctcttcaaaataagtcaagcctcctccgaaaaaacaatgcattgactgattctggtggtctgatccgaagcagccgctcagaatttggtagaaaggtcccatctgttctggataccagggcatcaccccatgggccacctacatccaatatgagatcaagtgcaggggatatgttccccacagtgggccagagagttgagagtccatttttgaggggggcgaaagatatcagttctagaaaaggagaggagggtttcaaaaaagggattaaatatggtgatcacgatccagtgcctatgtatttgaacttaagttctggtgatacacctatgaaagactaccgaacgagtttgctgaagactgcagttaacaaaaccactatttttcaaggaaaagattctgttggaaaaggagagctccactttggttcacgtgccgagaagcctttcatcttaaatggaactggtgtaggtcaaaatggcctcgctaaggtgtctggatatgctggttttcgtgaggattacaaagtaccaactaaggagaacatcttgagctctagcaagagatcttcaatcgatggagcagaagccagcaaaggtgtgtcaaggtggagatccgacgagtctagtgaagacgaagaagagagaacaaacagggagagcggagcttctcttgttactagaaggcgacctagattttcgagaagatgatatatccacgtcctcatggatctttattaattgtttgcagggcgaggattttttttgaatatctccacagttattaccctaatgtaacaaaaaaaacgtttcatcggaaaagtgtatgtgataatcatgcataattttacactgccaaggccgagatgtgtagttcaggtgtcacacaggatgctataaaacaaaaatgagatggcataggcatgttgtattcagatagttcagttcgcgtagttgtaaaccggtgcaatagtagttgtaaaccggtgcagtagcaaaatactaccttctgtggacatgagtttgagtttgtctttttagatttgcttttaagttaatcactattgactttgatctgttatacctgatattttataagattttacaatacaaa

SEQ ID NO: 11071 - DNA, 910 bp, Zea Mays
ccaggggtaaaaatcttgattttttgtcagaataaatagtttcatatcctttgctgctcgacagttgagcattgtacttgcatatagaatttcattttgttaggggtatacctcaacatcgttggcttgttatctggtgtgcttttaatgttttgttcctatggaatcaatgatcttttttcttagttcaagttttcgactgggtgcaggcagttaaagaaatacttgaagagaagacaaggaaacgatctagtccatgtatgaacggcgctagttttaccttggagaagtcaaatatgcacaacgagttacacgcagctctccaagaagctgcggtgctgatgtctgaacagcagcaggctgatccggcgaacggcagtggcggtgatatttgctcggcataggtacctcacagtgaagctgaagcagtcgaacgccaaactgaagtttgtggcaaaataaccagcactgcagtcctgaactcctgatctcacattgagatctgtaaacatggtgccaacaagtggaggaagtttgtacatacgctctctccggcctttacactactattctgctggcaaggccgtcagggatcgtttctaccttgctatcgctgacgaggaaatgaagacaactgaacagttgagctgtggcgcttgcacgcaccatgttttctccgctgaacaagtgcgcatttttgagctttcgggcattcgtgctgttaactttttaccattctatatgtcgacttctaccaaaagaaaacagaaccaatagaaataacagaaattattcaacaatctggtgccatgataagctctacacatatacacaatccagattcaaaatcactgatcagttaaaaaacgattcacaacagcaggtggatcatcttggattcggcgtttaa

SEQ ID NO: 11072 - DNA, 1553 bp, Zea Mays
ctttctttgaatttaactaactcgttgagtggccctgtttctcggacctgcggtggcatgggaggccggcaagccactgtcgatcgaggaggtggaggtagcgcctccgcaggccatggaggtgcgcgtcaagatcctcttcacctcgctctgccacaccgacgtctacttctgggaggccaaggggcagactcccgtgttccctcggatctttggccacgaggctggaggtatcatagagagtgttggagagggtgtgactgacgtagctccgggcgaccatgtccttcctgtgttcactggggagtgcaaggagtgtgcccactgcaagtcggcagagagcaacatgtgtgatctgctcaggatcaacaccgaccgcggtgtgatgattgccgatggcaagtcgcggttttcaatcaatgggaagcctatctaccactttgttgggacttccaccttcagcgagtacaccgtcatgcatgtgggttgtgttgcaaagatcaaccctcaggctccccttgataaagtttgcgtccttagctgtggtatttctaccggtcttggtgcatcaattaatgttgcaaaacctccgaagggttcgacagtggctgttttcggtttaggagccgttggtcttgccgctgcagaaggtgcaaggattgctggagcgtcaaggatcattggtgtcgacctgaaccccagcagattcgaagaagctaggaagttcggttgcactgaatttgtgaacccaaaagaccacaacaagccagtgcaggaggtacttgctgagatgaccaacggaggggtcgaccgcagtgtggaatgcactggcaacattaatgctatgatccaagctttcgaatgtgttcatgatggctggggtgttgctgtgctggtgggtgtgccacataaggacgctgagttcaagacccacccgatgaacttcctgaacgaaaggaccctgaaggggaccttctttggcaactataagccacgcactgatctgccaaatgtggtggagctgtacatgaaaaaggagctggaggtggagaagttcatcacgcacagcgtcccgttcgccgagatcaacaaggcgttcgacctgatggccaagggggagggcatccgctgcatcatccgcatggagaactagatttcgctgtctagtttgtgatctggcctgggcttggggttaataaaagaggcaatgctagcctgccctttcgatgaggaggtacatacacgctggcgatggaccgcgcttgtgtgtcgcgttcagtttggcttttgccaagcagtagggtagcttcccgtgtcggtaattatatggtatgaaccatcaccttttggctctacatggtatgaacgtaagatacaaattccaactacctctagctcgcttgtgtggtatctgtatcagtattcatgtgtttgtttgcttatgtgtttgtttgcttgtatttgctggtgcttgtatcgcgggatgcaatgagttgttgtttggttgttgtcaaccaggctctatgtgtgtgtgcgaggtgtgtgtttggtta

SEQ ID NO: 11073 - DNA, 1962 bp, Zea Mays
ctagaaatcctaatgattcagcagcacacctgtccgcctagccgcctacgcgtacacagaaaacaatttttttgtccacacacgcgcgcgctccgagccgcagatccgagctagcgcggcgcatccgacggccacgacagcgcagtgccgtcctccgccgccaccgcttggcgattgtccgcaccccaccagtccaccacctcccccacgagcgaaaaccacggtccacggaccacggctatgttccactccaggtggaggctgcagccccggtttcgcaagccgcgccgtggctcatctcgctttggatcgattggtttcgtaactggtgagggactgagggtctcggagtggattgatttgggattctgttcgaagatttgcggaggggggcaatggcgaccgcggggaaggtgatcaagtgcaaagctgcggtggcatgggaggccggcaagccactgtcgatcgaggaggtggaggtagcgcctccgcaggccatggaggtgcgcgtcaagatcctcttcacctcgctctgccacaccgacgtctacttctgggaggccaaggggcagactcccgtgttccctcggatctttggccacgaggctggaggccgcctgaaatttcttgattttgccagtatcatagagagtgttggagagggtgtgactgacgtagctccgggcgaccatgtccttcctgtgttcactggggagtgcaaggagtgtgcccactgcaagtcggcagagagcaacatgtgtgatctgctcaggatcaacaccgaccgcggtgtgatgattgccgatggcaagtcgcggttttcaatcaatgggaagcctatctaccactttgttgggacttccaccttcagcgagtacaccgtcatgcatgtgggttgtgttgcaaagatcaaccctcaggctccccttgataaagtttgcgtccttagctgtggtatttctaccggtcttggtgcatcaattaatgttgcaaaacctccgaagggttcgacagtggctgttttcggtttaggagccgttggtcttgccgctgcagaaggtgcaaggattgctggagcgtcaaggatcattggtgtcgacctgaaccccagcagattcgaagaagctaggaagttcggttgcactgaatttgtgaacccaaaagaccacaacaagccagtgcaggaggtacttgctgagatgaccaacggaggggtcgaccgcagtgtggaatgcactggcaacattaatgctatgatccaagctttcgaatgtgttcatgatggctggggtgttgctgtgctggtgggtgtgccacataaggacgctgagttcaagacccacccgatgaacttcctgaacgaaaggaccctgaaggggaccttctttggcaactataagccacgcactgatctgccaaatgtggtggagctgtacatgaaaaaggagctggaggtggagaagttcatcacgcacagcgtcccgttcgccgagatcaacaaggcgttcgacctgatggccaagggggagggcatccgctgcatcatccgcatggagaactagatttcgctgtctagtttgtgatctggcctgggcttggggttaataaaagaggcaatgctagcctgccctttcgatgaggaggtacatacacgctggcgatggaccgcgcttgtgtgtcgcgttcagtttggcttttgccaagcagtagggtagcttcccgtgtcggtaattatatggtatgaaccatcaccttttggctctacatggtatgaacgtaagatacaaattccaactacctctagctcgcttgtgtggtatctgtatcagtattcatgtgtttgtttgcttatgtgtttgtttgcttgtatttgctggtgcttgtatcgcgggatgcaatgagttgttgtttggttgttgtcaaccaggctctatgtgtgtgtgcgaggtgtgtgtttggtta

SEQ ID NO: 11074 - DNA, 1368 bp, Zea Mays
ccatctccttcagtttaagctgttacagctaggggtgattggaaaattcagcttcaagcttggccgaaaccattcagcaaggagaactgcctgcaaaagcatctgcgatagcaccgaccattttagagacagggaagtcatttacagcaaaaggaatggaagtgcttgaacgtgttggaaaggagacaatggagtttattgttgaagaaactggtatggaagttgataaaggcagtaccggtgaaggtgaccagcagacagaagaggaacagtttgaagaagtctcatttgacagatgcttctatatttatggggggcctgatcaattagaggagctggaagcattatcaagccactatgcattgttgtttaataggaaaaaggggaaacttaattctgaccagaaaacatattacgatggaaagcttaaagaaatagagcagatttttagtcttagcaccaatgctgatgaagatggaccagaatctgacaaagggaagaagactgaatcagctgacactgatactgacgctgagatgaagaagttatgtgaatatagtgttcgcaaggctgctaagatggctgcagggttcaccactgccttgggtgggctttctccaaacgagattatgaaacgaaccactagtaggcttgagaccattcactcagagggtgttcatagattatcggagatgtgctgccttgcagtttctcagcttctggtgctaggaaagtcagtaatatcttctgccaataaatcaaagaatgaggacggtgaaaatgatgttaagattgattggcccgaagatgccatttcaaaagccaaaataatcagatggaaggcgcaatccatctctgtggatatggaaaaggtgtctactagtttcgctacaggtatctcggatgtcgctgaagcttatgcggcagctatgcaaagtgctctcgccgacaagcaggacgacctcccaaatcagaagtctttacaggagaaggttaagtccatatccatccatctcaactccgatcagaccagcgctgtcagcaagctacaagatgccctgcggtacctggcctacgtcgtcgtatgcgcttcaatgccaagtgtgtgattgtggtgtgttccctgtctgagcatttgcctcaatcgttggccatctatgtacatttgcgtacacggggatcccttcaggcttcagggttgcagaattaggtacctcactaggacgtgttggttagttgtgatgttttgtactccattgctcttggaaagttgttgctctctttgtttttcctctgagaacaatctgatgtttaatatacatacaagtgaactgatgtgttcaatttaccgttgatggcttactgctc

SEQ ID NO: 11075 - DNA, 1835 bp, Zea Mays
acggcacggcacgcgacttgactcatctctccggccaggtagttggagtcgcgagcccactggtggttgcagtgttagatccgtccgcctgagccagagccagagcgaaggagtcaatctcacggcacgcgccatgtccgacgagtcgccgccgccagctccggcggccgagaagagtcagcccgccgagcaggcggcaggaggctggggcggatggggactctccatcttctcagagatctcccgcaacgcggtggaggttgctaagagtgccatcgccgacattcagcaaccgccggagcaggacacggtaccgggtagtggcgagaaggatcaagagaaggaaccggagggggaggaggaggaggaggagagacgcaaggcggctctggacaagttggagaaggggctgaaggcctttgatagctcggtggagaccatcacgactggtacttggcaagctcttgggaccgcatggaggagtggttcactatttgttcaaaaattggaaaattcagcttcaagcttggccgaaaccattcagcaaggagaactgcctgcaaaagcatctgcgatagcaccgaccattttagagacagggaagtcatttacagcaaaaggaatggaagtgcttgaacgtgttggaaaggagacaatggagtttattgttgaagaaactggtatggaagttgataaaggcagtaccggtgaaggtgaccagcagacagaagaggaacagtttgaagaagtctcatttgacagatgcttctatatttatggggggcctgatcaattagaggagctggaagcattatcaagccactatgcattgttgtttaataggaaaaaggggaaacttaattctgaccagaaaacatattacgatggaaagcttaaagaaatagagcagatttttagtcttagcaccaatgctgatgaagatggaccagaatctgacaaagggaagaagactgaatcagctgacactgatactgacgctgagatgaagaagttatgtgaatatagtgttcgcaaggctgctaagatggctgcagggttcaccactgccttgggtgggctttctccaaacgagattatgaaacgaaccactagtaggcttgagaccattcactcagagggtgttcatagattatcggagatgtgctgccttgcagtttctcagcttctggtgctaggaaagtcagtaatatcttctgccaataaatcaaagaatgaggacggtgaaaatgatgttaagattgattggcccgaagatgccatttcaaaagccaaaataatcagatggaaggcgcaatccatctctgtggatatggaaaaggtgtctactagtttcgctacaggtatctcggatgtcgctgaagcttatgcggcagctatgcaaagtgctctcgccgacaagcaggacgacctcccaaatcagaagtctttacaggagaaggttaagtccatatccatccatctcaactccgatcagaccagcgctgtcagcaagctacaagatgccctgcggtacctggcctacgtcgtcgtatgcgcttcaatgccaagtgtgtgattgtggtgtgttccctgtctgagcatttgcctcaatcgttggccatctatgtacatttgcgtacacggggatcccttcaggcttcagggttgcagaattaggtacctcactaggacgtgttggttagttgtgatgttttgtactccattgctcttggaaagttgttgctctctttgtttttcctctgagaacaatctgatgtttaatatacatacaagtgaactgatgtgttcaatttaccgttgatggcttactgctc

SEQ ID NO: 11076 - DNA, 1843 bp, Zea Mays
acggcacggcacgcgacttgactcatctctccggccaggtagttggagtcgcgagcccactggtggttgcagtgttagatccgtccgcctgagccagagccagagcgaaggagtcaatctcacggcacgcgccatgtccgacgagtcgccgccgccagctccggcggccgagaagagtcagcccgccgagcaggcggcaggaggctggggcggatggggactctccatcttctcagagatctcccgcaacgcggtggaggttgctaagagtgccatcgccgacattcagcaaccgccggagcaggacacggtaccgggtagtggcgagaaggatcaagagaaggaaccggagggggaggaggaggaggaggagagacgcaaggcggctctggacaagttggagaaggccggtgaggactcaatcctgggccaggggctgaaggcctttgatagctcggtggagaccatcacgactggtacttggcaagctcttgggaccgcatggaggagtggttcactatttgttcaaaaattggaaaattcagcttcaagcttggccgaaaccattcagcaaggagaactgcctgcaaaagcatctgcgatagcaccgaccattttagagcaaaaggaatggaagtgcttgaacgtgttggaaaggagacaatggagtttattgttgaagaaactggtatggaagttgataaaggcagtaccggtgaaggtgaccagcagacagaagaggaacagtttgaagaagtctcatttgacagatgcttctatatttatggggggcctgatcaattagaggagctggaagcattatcaagccactatgcattgttgtttaataggaaaaaggggaaacttaattctgaccagaaaacatattacgatggaaagcttaaagaaatagagcagatttttagtcttagcaccaatgctgatgaagatggaccagaatctgacaaagggaagaagactgaatcagctgacactgatactgacgctgagatgaagaagttatgtgaatatagtgttcgcaaggctgctaagatggctgcagggttcaccactgccttgggtgggctttctccaaacgagattatgaaacgaaccactagtaggcttgagaccattcactcagagggtgttcatagattatcggagatgtgctgccttgcagtttctcagcttctggtgctaggaaagtcagtaatatcttctgccaataaatcaaagaatgaggacggtgaaaatgatgttaagattgattggcccgaagatgccatttcaaaagccaaaataatcagatggaaggcgcaatccatctctgtggatatggaaaaggtgtctactagtttcgctacaggtatctcggatgtcgctgaagcttatgcggcagctatgcaaagtgctctcgccgacaagcaggacgacctcccaaatcagaagtctttacaggagaaggttaagtccatatccatccatctcaactccgatcagaccagcgctgtcagcaagctacaagatgccctgcggtacctggcctacgtcgtcgtatgcgcttcaatgccaagtgtgtgattgtggtgtgttccctgtctgagcatttgcctcaatcgttggccatctatgtacatttgcgtacacggggatcccttcaggcttcagggttgcagaattaggtacctcactaggacgtgttggttagttgtgatgttttgtactccattgctcttggaaagttgttgctctctttgtttttcctctgagaacaatctgatgtttaatatacatacaagtgaactgatgtgttcaatttaccgttgatggcttactgctc

SEQ ID NO: 11077 - DNA, 900 bp, Zea Mays
cttggatcagcatgtcatcatgttcattttaaataagagaagcaacagagttccaaaaattgtatttccaacatctatgtacgatgaacgccgtctcagtcaaccaagtcatgggttcaaaatagcctctcctgcctcagtttactccactacaccccacaaaggtggaagactggcagtgggtctacctttatatgttacaaaagggaactaccaaaaccataggtacagcatgtacattatatttgaaccagataaagtctacatcagttgataaggttcctatggagaaaagaggatagtttttttttctgcacatcattatcttaagaagaggggtccaaaatagaccaacaatcaagggtcagcctaaagtaacttgccttctcatcttttcttcaatgttctctgcctctttggccaggtcaaccgtcgctacaaggtcttcaactcttaatccagaggggccgtgtaccgtgtccccatcaaattgcaaatgctgggtcgttcaattgcacatttgacgcataccatgtgcaagcccgattacaaaaacagtacactagcttagcgttccacattgttgatattcggaatatatggggttcggcagaaaagatattgtatatgaccaggccatgggctgcacgtgtatgctcgattgttatttggctaattcacttggaccaatccatagccattcaacattcatgcgtaccatggagcctcttctttgccagcatttgaggggctggatcgaattcaaaccctcctacatctcatgtttaaacagttaatcacagcctctgctttggataaaagggaaaaaataatagacacaatcaaagattttaaacctgtttcactagcatccatagcagccatatcatgtgttggtcg

SEQ ID NO: 11078 - DNA, 1476 bp, Zea Mays
gccggccagataagggtgcagttagggtaaaaacgctaactgctcctccctttctacagccgccagcggccatggaggcgtttcgcggcggcgcgcggcatcccggcggcgggcgcgggttcctcccggtggcgcggtcctagcagcgaggtctcggtttggctagggggcgagcaggaccgacccggctcgggcggcaccagccacggcgcgggtgggcgatcgctgccccgccacgcggccccagtggcacggttgcaggccaaggcacgggcgccccctagtgcacgagcgcacggcctcaacagcacgcaggcgcgcgacccccggcgcataggcgtggcctcagcgacggcacgggcgcagtccccgcggcggcacgcgtgcgcggctgtgggcgcgtccccgcggcggctcgcgggcgcggcccgtcgtctgtgagcgcggccccggtggcacggcggtctccgtccccggccccagcgcgcgcgcggagcgcgactccccggcggcgcgcgagaatagttcgtcgttcaggggcgcgggcgcggcacccggcctcacatggcgcaggcgcgcgacccagcgtgggcttggccagccaggcgcgtccctgtgcgggcacgcggcctcgccacaggcgtgcggccccggccaggtcccggcgcggtctcgacgctcggtgtgccgctgttaggcgggcgaggcctcgacggcacgggtgcggctggcatggccccgtccggccgtgggtgtccccggcgtgggcacgggcccagcagccccggtggcgtggcgtggccccaacagcccaagcggagcgggcgcgagactcctctggcgcaagttctggcgggcagcgctaccaccgtctgtccgcaagattgcagcacacatgtgtgcaagaacagcgccattgcagatgaggaccgacagatacataacaaaactgatgcggttggccattgttgatgtgacgcaagtacatcggtcatccatcatcgtgattaaggctagaaaattgcctctgcagcatcatgtcgctgagaactgctctagcgacagcgtagtccgttctcttctgccgattaactcagtggagaatcgcgtgctgataacgtgttataactcggtggtaacgagacacgaaaatgtagagagaaagtgacagttatcctttattattgcagggagtcctgattatatacatgtgaaggggtgtatcccaagggatatgtcccttagggagaatctgtcgtaccctttggattggtcacatatacaatatacaatattttgtaacagctttgacaagacactccaaagatagatgaggacgaaaattatgttttattttttttatttactgatttgtcgttatacacacaaatgtgaaggtatgtttctatagatgtacatatttagagagcagttgctcattgataaagtggtctataacacttcttgatcaacgac

SEQ ID NO: 11079 - DNA, 1317 bp, Zea Mays
cctggcccaagcggccaggggcggcccaaccaaccagttaggtggccaggcgcagcccaaacggccatgggcggcccagccggccagataagggtgcagttagggtaaaaacgctaactgctcctccctttctacagccgccagcggccatggaggcgtttcgcggcggcgcgcggcatcccggcggcgggcgcgggttcctcccggtggcgcggtcctagcagcgaggtctcggtttggctagggggcgagcaggaccgacccggctcgggcggcaccagccacggcgcgggtgggcgatcgctgccccgccacgcggccccagtggcacggttgcaggccaaggcacgggcgccccctagtgcacgagcgcacggcctcaacagcacgcaggcgcgcgacccccggcgcataggcgtggcctcagcgacggcacgggcgcagtccccgcggcggcacgcgtgcgcggctgtgggcgcgtccccgcggcggctcgcgggcgcggcccgtcgtctgtgagcgcggccccggtggcacggcggtctccgtccccggccccagcgcgcgcgcggagcgcgactccccggcggcgcgcgagaatagttcgtcgttcaggggcgcgggcgcggcacccggcctcacatggcgcaggcgcgcgacccagcgtgggcttggccagccaggcgcgtccctgtgcgggcacgcggcctcgccacaggcgtgcggccccggccaggtcccggcgcggtctcgacgctcggtgtgccgctgttaggcgggcgaggcctcgacggcacgggtgcggctggcatggccccgtccggccgtgggtgtccccggcgtgggcacgggcccagcagccccggtggcgtggcgtggccccaacagcccaagcggagcgggcgcgagactcctctggcgcaagttctggcgggcagcgctaccaccgtctgtccgcaagattgcagcacacatgtgtgcaagaacagcgccattgcagatgaggaccgacagatacataacaaaactgaggagtcctgattatatacatgtgaaggggtgtatcccaagggatatgtcccttagggagaatctgtcgtaccctttggattggtcacatatacaatatacaatattttgtaacagctttgacaagacactccaaagatagatgaggacgaaaattatgttttattttttttatttactgatttgtcgttatacacacaaatgtgaaggtatgtttctatagatgtacatatttagagagcagttgctcattgataaagtggtctataacacttcttgatcaacgac

SEQ ID NO: 11080 - DNA, 886 bp, Zea Mays
ttcattctaggggacttgaattgtcttcagctttaactatttggagactaaagtgctaaaaagatcatgatttactttcaattttggaattttaatattacagtggtgccaggtcgggtgttgaaaatggaagaagctatcaagaaccgtgactttgaatcatttgccaaattaacttgtgcagatagcaaccagtttcatgctgtatgcttagacacgagccctcccatcttctatatgaatgacacgtcacaccggataattagccttgtggaaaaatggaaccactcagaaggaaccccacaggtcgcttacaccttcgatgctgggccaaacgctgttctaatcgcccaaaaccgtaaaactgcagcacatttcctccagaagctcctatactatttccctccacaggataatgatttgagcagctatctggttggcgataaatcaattctaggtgacgccggattgcattccatgaaagacgtcgaggctcttccagcacctccagatacgaagataccggatcagaaattcaagggcgatgttagctacttcatctgcagcaggcttggggcaggtccaaaggttgttgttgacgaaggtcaagcactgatcgattcagtcaccggacttccaaaaggcgtgtagttctagatttaggttggaataatggtttaagctggggattaaagacaatggtatcatacaagcaacctgggccggccaataaagatagaacacgttctcgccttttgtttttctccctcgcctagtatgtggctgaaatatttgtttcgctattttattgagcacttcagctgagacgcaagcggagaataataactttgtcgtgtaggagtactgcaggagcgctgcatcttgg

SEQ ID NO: 11081 - DNA, 993 bp, Zea Mays
gtatatatggtggttttgtgaaatggtgcatgggagaaaaagatgatggaagtgacagtattgccgtgcagcttgctgacgaaacacactggaatgatcttgtaattattattgcagtggtcagttcaaagcagaaggaaaccagtagcaccagtgggatgcgagatagtgttgaaacaagtcctctcttgcagtacagggcccagacagtggtgccaggtcgggtgttgaaaatggaagaagctatcaagaaccgtgactttgaatcatttgccaaattaacttgtgcagatagcaaccagtttcatgctgtatgcttagacacgagccctcccatcttctatatgaatgacacgtcacaccggataattagccttgtggaaaaatggaaccactcagaaggaaccccacaggtcgcttacaccttcgatgctgggccaaacgctgttctaatcgcccaaaaccgtaaaactgcagcacatttcctccagaagctcctatactatttccctccacaggataatgatttgagcagctatctggttggcgataaatcaattctaggtgacgccggattgcattccatgaaagacgtcgaggctcttccagcacctccagatacgaagataccggatcagaaattcaagggcgatgttagctacttcatctgcagcaggcttggggcaggtccaaaggttgttgttgacgaaggtcaagcactgatcgattcagtcaccggacttccaaaaggcgtgtagttctagatttaggttggaataatggtttaagctggggattaaagacaatggtatcatacaagcaacctgggccggccaataaagatagaacacgttctcgccttttgtttttctccctcgcctagtatgtggctgaaatatttgtttcgctattttattgagcacttcagctgagacgcaagcggagaataataactttgtcgtgtaggagtactgcaggagcgctgcatcttgg

SEQ ID NO: 11082 - DNA, 1337 bp, Zea Mays
gttttttacgtgtcactctggaatctggacgttgactaagtggcagataaagaattctagagatctcgctattaggaggaaggtttcagagctgcctcagagaaatcagaaagcgtgctcgtgactttgaggacaaggagaagggcgtcaagatcaagaaagaggactgggacaagttgcatgttcacatagcctcgtacaacaacttccccactgctgctggtttggcctcttcggctgctggccttgcctgtttcgttttcacccttggaaagctgatgaatgtgaaagaagattatggagaactttcttcaatagcaagggatctgggagtgcatgccgcagtatatatggtggttttgtgaaatggtgcatgggagaaaaagatgatggaagtgacagtattgccgtgcagcttgctgacgaaacacactggaatgatcttgtaattattattgcagtggtcagttcaaagcagaaggaaaccagtagcaccagtgggatgcgagatagtgttgaaacaagtcctctcttgcagtacagggcccagacagtggtgccaggtcgggtgttgaaaatggaagaagctatcaagaaccgtgactttgaatcatttgccaaattaacttgtgcagatagcaaccagtttcatgctgtatgcttagacacgagccctcccatcttctatatgaatgacacgtcacaccggataattagccttgtggaaaaatggaaccactcagaaggaaccccacaggtcgcttacaccttcgatgctgggccaaacgctgttctaatcgcccaaaaccgtaaaactgcagcacatttcctccagaagctcctatactatttccctccacaggataatgatttgagcagctatctggttggcgataaatcaattctaggtgacgccggattgcattccatgaaagacgtcgaggctcttccagcacctccagatacgaagataccggatcagaaattcaagggcgatgttagctacttcatctgcagcaggcttggggcaggtccaaaggttgttgttgacgaaggtcaagcactgatcgattcagtcaccggacttccaaaaggcgtgtagttctagatttaggttggaataatggtttaagctggggattaaagacaatggtatcatacaagcaacctgggccggccaataaagatagaacacgttctcgccttttgtttttctccctcgcctagtatgtggctgaaatatttgtttcgctattttattgagcacttcagctgagacgcaagcggagaataataactttgtcgtgtaggagtactgcaggagcgctgcatcttgg

SEQ ID NO: 11083 - DNA, 1322 bp, Zea Mays
cgctgcttcgtcacctccgtggtctgttcattagggagggaaaaaacaggagatctcgctattaggaggaaggtttcagagctgcctcagagaaatcagaaagcgtgctcgtgactttgaggacaaggagaagggcgtcaagatcaagaaagaggactgggacaagttgcatgttcacatagcctcgtacaacaacttccccactgctgctggtttggcctcttcggctgctggccttgcctgtttcgttttcacccttggaaagctgatgaatgtgaaagaagattatggagaactttcttcaatagcaagggatctgggagtgcatgccgcagtatatatggtggttttgtgaaatggtgcatgggagaaaaagatgatggaagtgacagtattgccgtgcagcttgctgacgaaacacactggaatgatcttgtaattattattgcagtgttcaaagcagaaggaaaccagtagcaccagtgggatgcgagatagtgttgaaacaagtcctctcttgcagtacagggcccagacagtggtgccaggtcgggtgttgaaaatggaagaagctatcaagaaccgtgactttgaatcatttgccaaattaacttgtgcagatagcaaccagtttcatgctgtatgcttagacacgagccctcccatcttctatatgaatgacacgtcacaccggataattagccttgtggaaaaatggaaccactcagaaggaaccccacaggtcgcttacaccttcgatgctgggccaaacgctgttctaatcgcccaaaaccgtaaaactgcagcacatttcctccagaagctcctatactatttccctccacaggataatgatttgagcagctatctggttggcgataaatcaattctaggtgacgccggattgcattccatgaaagacgtcgaggctcttccagcacctccagatacgaagataccggatcagaaattcaagggcgatgttagctacttcatctgcagcaggcttggggcaggtccaaaggttgttgttgacgaaggtcaagcactgatcgattcagtcaccggacttccaaaaggcgtgtagttctagatttaggttggaataatggtttaagctggggattaaagacaatggtatcatacaagcaacctgggccggccaataaagatagaacacgttctcgccttttgtttttctccctcgcctagtatgtggctgaaatatttgtttcgctattttattgagcacttcagctgagacgcaagcggagaataataactttgtcgtgtaggagtactgcaggagcgctgcatcttgg

SEQ ID NO: 11084 - DNA, 1343 bp, Zea Mays
cgctaatttgtctctaccgctgcttcgtcacctccgtggtctgttcattagggagggaaaaaacaggagatctcgctattaggaggaaggtttcagagctgcctcagagaaatcagaaagcgtgctcgtgactttgaggacaaggagaagggcgtcaagatcaagaaagaggactgggacaagttgcatgttcacatagcctcgtacaacaacttccccactgctgctggtttggcctcttcggctgctggccttgcctgtttcgttttcacccttggaaagctgatgaatgtgaaagaagattatggagaactttcttcaatagcaaggcagggatctgggagtgcatgccgcagtatatatggtggttttgtgaaatggtgcatgggagaaaaagatgatggaagtgacagtattgccgtgcagcttgctgacgaaacacactggaatgatcttgtaattattattgcagtgttcaaagcagaaggaaaccagtagcaccagtgggatgcgagatagtgttgaaacaagtcctctcttgcagtacagggcccagacagtggtgccaggtcgggtgttgaaaatggaagaagctatcaagaaccgtgactttgaatcatttgccaaattaacttgtgcagatagcaaccagtttcatgctgtatgcttagacacgagccctcccatcttctatatgaatgacacgtcacaccggataattagccttgtggaaaaatggaaccactcagaaggaaccccacaggtcgcttacaccttcgatgctgggccaaacgctgttctaatcgcccaaaaccgtaaaactgcagcacatttcctccagaagctcctatactatttccctccacaggataatgatttgagcagctatctggttggcgataaatcaattctaggtgacgccggattgcattccatgaaagacgtcgaggctcttccagcacctccagatacgaagataccggatcagaaattcaagggcgatgttagctacttcatctgcagcaggcttggggcaggtccaaaggttgttgttgacgaaggtcaagcactgatcgattcagtcaccggacttccaaaaggcgtgtagttctagatttaggttggaataatggtttaagctggggattaaagacaatggtatcatacaagcaacctgggccggccaataaagatagaacacgttctcgccttttgtttttctccctcgcctagtatgtggctgaaatatttgtttcgctattttattgagcacttcagctgagacgcaagcggagaataataactttgtcgtgtaggagtactgcaggagcgctgcatcttgg

SEQ ID NO: 11085 - DNA, 3980 bp, Zea Mays
gttttttcaagaattaagctaaaacaaatgaagtctacaagcaaggaatcaaatacagcaatttctcagatttgtgccagaagcaagaggctgttaaagaagtgcttggatctttagcaaagtttgcatgtgttttattccctaatattcctgaagcctacttggatcgctggtgcgacgtttacagctttggtgtcatattatgggagctggcaacgcttagaatgccatggagtgggatgaatccaatgcaggttgtgggggcagttggtttccaggatagacgacttgatattcccaaggaagttgatcctctggtagcaaggatcatattcgaatgctggcagaatgaccaacaacgcacgggcatatacctagtacaccttaaggctggagcgagggcgtccaccactcaccgtgcccccgctccagcccccgcccgcaacgtcttcctcccggcaatcccgcccccgcccacgccgtcccttcccttccctgcatcccgcccgcgccgtccctccctgcaatcccgcccccgccagcgtcgtgtccccgccgcacatctttcccacctctttctttcccttgctctgctaacgcgccgccggtccgtcggttgccgcctatcctgcttgctcgcgcgaccgctgttcatggtgatggtggatgaaggcggcaaaggagaggcgcagccgcctggattagacccaagaacccgccgatctgcggcgaccagggcgaccgacgacatggatggcggtggccgaggagaggagtgggagggggcccccccggctacgtgctctcgctcccggcggcggcgctgcccctgcccgtcgtcgtctcctgcctggacgccaccgtccggcgcaaggggcgcaaccatatccgccaccgtggccatccgtcgggctggccccgccgccccggcccccggtccacacactcccacgcctgcagaggagaggtcagcgaagagggtcaggatgtgcctgcagtgcggcgcggcggtgacgccgcagtggaggtcggggccgatggggcagggcacgctctgcaacgcctaccgggttcggctcaaggtggccggggtactgcgggatcagggccggttgctgccggagtaccggccgctggcgagccccaccttcgagccgtcggagcacgccaacaagcacagccaggtgatgcagctccaccggcagcggaagagccagggccagcaccaccctctgcccgcggagcatccgcgagccatggacgtcctccagtttccccagcggtggcaggcctacacggcgctccggagcgccggcaagagcgtcgagataatcttcgtgtcgttggaccgcgacgaggccagcttccgggaccacttccagggcatgtcgtggctcgcggtaccgttcgacgctgctggcctactacggcagaagctgtgcgcgcgcttcgccatcgagcgtatcccggcgctgatccctctgtcagcgtcagcgacgccgtccagcgggctgggatgtggagaggacgcggtgaggctggttggcgagtatggagtagatgcgtacccgttcagtgcgcagaggaggagggagctggagagcatggacgatgccaggagaggaggaggccggcttcaggagcttcttggctgcgaggagagagactatgtcatcagtgcagatgacataaagattcctatagctgaccttgctggcaagacagtcggcctgtactttggagcacactggtgcccaccttgccatgtcttcaccaaacagctcaaggaggtgtataacgagctgaaaatcttgagaccggtaagcttcgaggtcatcttcgtctcgatagaccgcagcaagggggaattccaagcaagcatgagttcaatgccatggcttgccatcccttattctgacgctgtaaggaaaaagcttacaagaatcttcgttgtcaagggtatcccaggactcctgatacttggtctggacggtaaagctctaaaaacagatgtccatcgccccgagctcctccccacctacgaaggctccaggtgtaataaaataaaaggtatcaaggcgcctaggatcacgcctaaaaacgtcatcagatttagcagctatactgataccttttattttattacacctgaagcttggtactggtctgagtatctttatctcaaaaaggaatccctcactgttgttatctcagatgtgaaatgcgatgacctaaaagaggagggcaaggtacaacaaactaaaaggggaaacagtattcacgaccattctagttcacactcaattcggtcgttttctgcattaacggagtcaggcccaggcctaacctcagttcatccgagcagccgaacacgcccgccgccattctacgccctgctgcccaggtcggacggaccctttgccggagacgagcacacgccacagcaggaattatcgggcgtagagcagcgcgaagcgagagatccaatggcggcggcggaggggcagtgggtgctcatggcaacggggcggacgccgactaacattgcggtgatcaagtactgggggaagcgggacgaggcgctcatcctccccatcaacgacagcatcagcgtaacgctcgaccctgaccatctctccgccaccaccactgtcgccgtcagcccctcattcccttccgaccgcatgtggctcaatggcaaggagatctcgctattaggaggaaggtttcagagctgcctcagagaaatcagaaagcgtgctcgtgactttgaggacaaggagaagggcgtcaagatcaagaaagaggactgggacaagttgcatgttcacatagcctcgtacaacaacttccccactgctgctggtttggcctcttcggctgctggccttgcctgtttcgttttcacccttggaaagctgatgaatgtgaaagaagattatggagaactttcttcaatagcaagggatctgggagtgcatgccgcagtatatatggtggttttgtgaaatggtgcatgggagaaaaagatgatggaagtgacagtattgccgtgcagcttgctgacgaaacacactggaatgatcttgtaattattattgcagtggtcagttcaaagcagaaggaaaccagtagcaccagtgggatgcgagatagtgttgaaacaagtcctctcttgcagtacagggcccagacagtggtgccaggtcgggtgttgaaaatggaagaagctatcaagaaccgtgactttgaatcatttgccaaattaacttgtgcagatagcaaccagtttcatgctgtatgcttagacacgagccctcccatcttctatatgaatgacacgtcacaccggataattagccttgtggaaaaatggaaccactcagaaggaaccccacaggtcgcttacaccttcgatgctgggccaaacgctgttctaatcgcccaaaaccgtaaaactgcagcacatttcctccagaagctcctatactatttccctccacaggataatgatttgagcagctatctggttggcgataaatcaattctaggtgacgccggattgcattccatgaaagacgtcgaggctcttccagcacctccagatacgaagataccggatcagaaattcaagggcgatgttagctacttcatctgcagcaggcttggggcaggtccaaaggttgttgttgacgaaggtcaagcactgatcgattcagtcaccggacttccaaaaggcgtgtagttctagatttaggttggaataatggtttaagctggggattaaagacaatggtatcatacaagcaacctgggccggccaataaagatagaacacgttctcgccttttgtttttctccctcgcctagtatgtggctgaaatatttgtttcgctattttattgagcacttcagctgagacgcaagcggagaataataactttgtcgtgtaggagtactgcaggagcgctgcatcttgg

SEQ ID NO: 11086 - DNA, 4126 bp, Zea Mays
tgacctcccacagttcctgacttcctgacatatcagccactgtatttttagttgattgaccgacctgagggtggatacttgactgctgatttaccaatgcctcggggagaaattgtcattggaggtccaaatataattaaaggttttttcaagaattaagctaaaacaaatgaagtctacaagcaaggaatcaaatacagcaatttctcagatttgtgccagaagcaagaggctgttaaagaagtgcttggatctttagcaaagtttgcatgtgttttattccctaatattcctgaagcctacttggatcgctggtgcgacgtttacagctttggtgtcatattatgggagctggcaacgcttagaatgccatggagtgggatgaatccaatgcaggttgtgggggcagttggtttccaggatagacgacttgatattcccaaggaagttgatcctctggtagcaaggatcatattcgaatgctggcagaatgaccaacaacgcacgggcatatacctagtacaccttaaggctggagcgagggcgtccaccactcaccgtgcccccgctccagcccccgcccgcaacgtcttcctcccggcaatcccgcccccgcccacgccgtcccttcccttccctgcatcccgcccgcgccgtccctccctgcaatcccgcccccgccagcgtcgtgtccccgccgcacatctttcccacctctttctttcccttgctctgctaacgcgccgccggtccgtcggttgccgcctatcctgcttgctcgcgcgaccgctgttcatggtgatggtggatgaaggcggcaaaggagaggcgcagccgcctggattagacccaagaacccgccgatctgcggcgaccagggcgaccgacgacatggatggcggtggccgaggagaggagtgggagggggcccccccggctacgtgctctcgctcccggcggcggcgctgcccctgcccgtcgtcgtctcctgcctggacgccaccgtccggcgcaaggggcgcaaccatatccgccaccgtggccatccgtcgggctggccccgccgccccggcccccggtccacacactcccacgcctgcagaggagaggtcagcgaagagggtcaggatgtgcctgcagtgcggcgcggcggtgacgccgcagtggaggtcggggccgatggggcagggcacgctctgcaacgcctaccgggttcggctcaaggtggccggggtactgcgggatcagggccggttgctgccggagtaccggccgctggcgagccccaccttcgagccgtcggagcacgccaacaagcacagccaggtgatgcagctccaccggcagcggaagagccagggccagcaccaccctctgcccgcggagcatccgcgagccatggacgtcctccagtttccccagcggtggcaggcctacacggcgctccggagcgccggcaagagcgtcgagataatcttcgtgtcgttggaccgcgacgaggccagcttccgggaccacttccagggcatgtcgtggctcgcggtaccgttcgacgctgctggcctactacggcagaagctgtgcgcgcgcttcgccatcgagcgtatcccggcgctgatccctctgtcagcgtcagcgacgccgtccagcgggctgggatgtggagaggacgcggtgaggctggttggcgagtatggagtagatgcgtacccgttcagtgcgcagaggaggagggagctggagagcatggacgatgccaggagaggaggaggccggcttcaggagcttcttggctgcgaggagagagactatgtcatcagtgcagatgacataaagattcctatagctgaccttgctggcaagacagtcggcctgtactttggagcacactggtgcccaccttgccatgtcttcaccaaacagctcaaggaggtgtataacgagctgaaaatcttgagaccggtaagcttcgaggtcatcttcgtctcgatagaccgcagcaagggggaattccaagcaagcatgagttcaatgccatggcttgccatcccttattctgacgctgtaaggaaaaagcttacaagaatcttcgttgtcaagggtatcccaggactcctgatacttggtctggacggtaaagctctaaaaacagatgtccatcgccccgagctcctccccacctacgaaggctccaggtgtaataaaataaaaggtatcaaggcgcctaggatcacgcctaaaaacgtcatcagatttagcagctatactgataccttttattttattacacctgaagcttggtactggtctgagtatctttatctcaaaaaggaatccctcactgttgttatctcagatgtgaaatgcgatgacctaaaagaggagggcaaggtacaacaaactaaaaggggaaacagtattcacgaccattctagttcacactcaattcggtcgttttctgcattaacggagtcaggcccaggcctaacctcagttcatccgagcagccgaacacgcccgccgccattctacgccctgctgcccaggtcggacggaccctttgccggagacgagcacacgccacagcaggaattatcgggcgtagagcagcgcgaagcgagagatccaatggcggcggcggaggggcagtgggtgctcatggcaacggggcggacgccgactaacattgcggtgatcaagtactgggggaagcgggacgaggcgctcatcctccccatcaacgacagcatcagcgtaacgctcgaccctgaccatctctccgccaccaccactgtcgccgtcagcccctcattcccttccgaccgcatgtggctcaatggcaaggagatctcgctattaggaggaaggtttcagagctgcctcagagaaatcagaaagcgtgctcgtgactttgaggacaaggagaagggcgtcaagatcaagaaagaggactgggacaagttgcatgttcacatagcctcgtacaacaacttccccactgctgctggtttggcctcttcggctgctggccttgcctgtttcgttttcacccttggaaagctgatgaatgtgaaagaagattatggagaactttcttcaatagcaaggcagggatctgggagtgcatgccgcagtatatatggtggttttgtgaaatggtgcatgggagaaaaagatgatggaagtgacagtattgccgtgcagcttgctgacgaaacacactggaatgatcttgtaattattattgcagtggtcagttcaaagcagaaggaaaccagtagcaccagtgggatgcgagatagtgttgaaacaagtcctctcttgcagtacagggcccagacagtggtgccaggtcgggtgttgaaaatggaagaagctatcaagaaccgtgactttgaatcatttgccaaattaacttgtgcagatagcaaccagtttcatgctgtatgcttagacacgagccctcccatcttctatatgaatgacacgtcacaccggataattagccttgtggaaaaatggaaccactcagaaggaaccccacaggtcgcttacaccttcgatgctgggccaaacgctgttctaatcgcccaaaaccgtaaaactgcagcacatttcctccagaagctcctatactatttccctccacaggataatgatttgagcagctatctggttggcgataaatcaattctaggtgacgccggattgcattccatgaaagacgtcgaggctcttccagcacctccagatacgaagataccggatcagaaattcaagggcgatgttagctacttcatctgcagcaggcttggggcaggtccaaaggttgttgttgacgaaggtcaagcactgatcgattcagtcaccggacttccaaaaggcgtgtagttctagatttaggttggaataatggtttaagctggggattaaagacaatggtatcatacaagcaacctgggccggccaataaagatagaacacgttctcgccttttgtttttctccctcgcctagtatgtggctgaaatatttgtttcgctattttattgagcacttcagctgagacgcaagcggagaataataactttgtcgtgtaggagtactgcaggagcgctgcatcttgg

SEQ ID NO: 11087 - DNA, 1914 bp, Zea Mays
ggatggttttagggtagatggagcatcccctacatgtgtcttccatgggatggcccaactgcagatctgttcctgggatactacacaatgactacattgcatactcggagctgctcgacaggagcgtcgtcggcggtgctgtaaacatctcctagagtcctcgggcacaagaaggtcaggcggtgatgccaatgcagatcatccaatcagatccagaatgcctgccactgtatacttggagctgctcgacaggagcgccgttggcggcattgcaaacatctcctatagtcctcgggcacaacaaggtcagccaatgacgccaacgcagatcatcccatcggatccggtattcttgacgaaaatccctgaagatgggaaacccacgctgctggtgcaaacaccgccggtgatgccagtgtaggccccattgcccttggacgggatgtcactgactacaatggagtacctttctttcttcgatgtcagtcgattatgtttactatggaatatggatgttctcttatatgcttggttgtagctcctgacatgcagttgtagcttggctcgaggcgggcatcagcgacgacaaacatcctgctcaatttgttgtatgataaatactgcgaaacaatgctggtgtttcataagatgaccgtgcagctcatgaaaatccagagggtggagtcgagcgagacgacgtggccggcgcggcgccaggtcgtggcgtgcgccgctgtttgctggtcgtggcgtgaggtcaccaaggaggtggtgaagacgctcaaggagtgcggcaggatcaccttccccatgtcccttaagcaggttggcactctctgccttttctctactttgatgatcaatcacatgtcttcacctttgcagaggcttatgattttgaagatctagaatctatggttgaagaaatagccaaagcattcaagacaaagataatgtttatatatgttgacactgctgaagaaaaccttgcaaaaaccattcctcactctttatggcattgaatcagaaaaggcctactggtccagttcttgaaagggtgggaatgtgtccaagaagacaaaggcatcgacccgccaattcttcgctacaaattaaaacagcactaggcttcctggaaaaaatgtcttttgaagctaatcttgctccatacagctaatcttcacatctttcaaagcatttgctagggccccttcggtgagcaatagaatacgacttgcgctaccaaagcgtccataggttgaggacctccatgacacctatgttggtgtgggttgtgccgccccatcgtgaccgtcatcgattgggcctccgagtccaggagaagacctccgatgaagaaagagacatgctgcacatgcacgagggtacttgcagatagatgtcggctctatggacgaacactcgaccaagtcagatgaggagtatgagggcctagccatgcgagacatgatggctaccggtccaacaatgagcagcaagctgtgagttaaagatgaactcacctgtcctggagagcaacatccataggagtgaggcaaaatggcgggtaccaccacaacatggacccgttcctgaagatgtccaaggaggtggtagccgacaccataatgtcttgcgcgtcattgtgtcaccggccggcaacacgctgcgctggtaccggcgggtgttatgtttcttaggcgtatgtttctgtgctttgagctgtgctatagactggttgtgccaactactgattttaaaagaaaaaggtgagctgaaaatcattgttgaaaacaaacatgtaacggttcgttctcatcagttgtgccaactaccaatcatttcattgatcagaatctgtcgttgctcatgagaaccaaaagtaagacacttcttaataacattggatgcaaa

SEQ ID NO: 11088 - DNA, 1162 bp, Zea Mays
tgaaactgtcgcagcccacgatgcactccacccccggccgatgcttccccgcccagccgcctgcgcccgcggctacatcatccagcctgccgcgttcgctaccgacgatgcactccacccacctccgccgcccgccatggcctccacccaactcacgtgcagcaggttccaactcccaagatctagggtccagttcttgaaagggtgggaatgtgtccaagaagacaaaggcatcgacccgccaattcttcgctacaaattaaaacagcactagggtgagatcagtgggcttgagagtagcatcatccttcaaacatgatgatgggtttctagctgatggtgtctctatagctcactggtatccttcaaaaagaaacttcctggaaaaaatgtcttttgaagctaatcttgctccatacagctaatcttcacatctttcaaagcatttgctagggccccttcggtgagcaatagaatacgacttgcgctaccaaagcgtccataggttgaggacctccatgacacctatgttggtgtgggttgtgccgccccatcgtgaccgtcatcgattgggcctccgagtccaggagaagacctccgatgaagaaagagacatgctgcacatgcacgagggtacttgcagatagatgtcggctctatggacgaacactcgaccaagtcagatgaggagtatgagggcctagccatgcgagacatgatggctaccggtccaacaatgagcagcaagctgtgagttaaagatgaactcacctgtcctggagagcaacatccataggagtgaggcaaaatggcgggtaccaccacaacatggacccgttcctgaagatgtccaaggaggtggtagccgacaccataatgtcttgcgcgtcattgtgtcaccggccggcaacacgctgcgctggtaccggcgggtgttatgtttcttaggcgtatgtttctgtgctttgagctgtgctatagactggttgtgccaactactgattttaaaagaaaaaggtgagctgaaaatcattgttgaaaacaaacatgtaacggttcgttctcatcagttgtgccaactaccaatcatttcattgatcagaatctgtcgttgctcatgagaaccaaaagtaagacacttcttaataacattggatgcaaa

SEQ ID NO: 11089 - DNA, 2298 bp, Zea Mays
tgaaactgtcgcagcccacgatgcactccacccccggccgatgcttccccgcccagccgcctgcgcccgcggctacatcatccagcctgccgcgttcgctaccgacgatgcactccacccacctccgccgcccgccatggcctccacccaactcacgtgcagcaggttccaactcccaagatctaggtcggacaccggcgcacaccacgtcagcgacgccaagcaccactcgttcgacctcggcaagcacctgcctctccgtcatcgcccccccccccccctccgctctctatcgcttgctctagccgatctatgtgcatggggctcaacgactggaacaaatcctcgtcgatgctcagggatggttttagggtagatggagcatcccctacatgtgtcttccatgggatggcccaactgcagatctgttcctgggatactacacaatgactacattgcatactcggagctgctcgacaggagcgtcgtcggcggtgctgtaaacatctcctagagtcctcgggcacaagaaggtcaggcggtgatgccaatgcagatcatccaatcagatccagaatgcctgccactgtatacttggagctgctcgacaggagcgccgttggcggcattgcaaacatctcctatagtcctcgggcacaacaaggtcagccaatgacgccaacgcagatcatcccatcggatccggtattcttgacgaaaatccctgaagatgggaaacccacgctgctggtgcaaacaccgccggtgatgccagtgtaggccccattgcccttggacgggatgtcactgactacaatggactcctgacatgcagttgtagcttggctcgaggcgggcatcagcgacgacaaacatcctgctcaatttgttgtatgataaatactgcgaaacaatgctggtgtttcataagatgaccgtgcagctcatgaaaatccagagggtggagtcgagcgagacgacgtggccggcgcggcgccaggtcgtggcgtgcgccgctgtttgctggtcgtggcgtgaggtcaccaaggaggtggtgaagacgctcaaggagtgcggcaggatcaccttccccatgtcccttaagcaggttggcactctctgccttttctctactttgatgatcaatcacatgtcttcacctttgcagaggcttatgattttgaagatctagaatctatggttgaagaaatagccaaagcattcaagacaaagataatgtttatatatgttgacactgctgaagaaaaccttgcaaaaaccattcctcactctttatggcattgaatcagaaaaggcctactggtccagttcttgaaagggtgggaatgtgtccaagaagacaaaggcatcgacccgccaattcttcgctacaaattaaaacagcactagggtgagatcagtgggcttgagagtagcatcatccttcaaacatgatgatgggtttctagctgatggtgtctctatagctcactggtatccttcaaaaagaaacttcctggaaaaaatgtcttttgaagctaatcttgctccatacagctaatcttcacatctttcaaagcatttgctagggccccttcggtgagcaatagaatacgacttgcgctaccaaagcgtccataggttgaggacctccatgacacctatgttggtgtgggttgtgccgccccatcgtgaccgtcatcgattgggcctccgagtccaggagaagacctccgatgaagaaagagacatgctgcacatgcacgagggtacttgcagatagatgtcggctctatggacgaacactcgaccaagtcagatgaggagtatgagggcctagccatgcgagacatgatggctaccggtccaacaatgagcagcaagctgtgagttaaagatgaactcacctgtcctggagagcaacatccataggagtgaggcaaaatggcgggtaccaccacaacatggacccgttcctgaagatgtccaaggaggtggtagccgacaccataatgtcttgcgcgtcattgtgtcaccggccggcaacacgctgcgctggtaccggcgggtgttatgtttcttaggcgtatgtttctgtgctttgagctgtgctatagactggttgtgccaactactgattttaaaagaaaaaggtgagctgaaaatcattgttgaaaacaaacatgtaacggttcgttctcatcagttgtgccaactaccaatcatttcattgatcagaatctgtcgttgctcatgagaaccaaaagtaagacacttcttaataacattggatgcaaa

SEQ ID NO: 11090 - DNA, 2221 bp, Zea Mays
tgaaactgtcgcagcccacgatgcactccacccccggccgatgcttccccgcccagccgcctgcgcccgcggctacatcatccagcctgccgcgttcgctaccgacgatgcactccacccacctccgccgcccgccatggcctccacccaactcacgtgcagcaggttccaactcccaagatctaggtcggacaccggcgcacaccacgtcagcgacgccaagcaccactcgttcgacctcggcaagcacctgcctctccgtcatcgcccccccccccccctccgctctctatcgcttgctctagccgatctatgtgcatggggctcaacgactggaacaaatcctcgtcgatgctcagggatggttttagggtagatggagcatcccctacatgtgtcttccatgggatggcccaactgcagatctgttcctgggatactacacaatgactacattgcatactcggagctgctcgacaggagcgtcgtcggcggtgctgtaaacatctcctagagtcctcgggcacaagaaggtcaggcggtgatgccaatgcagatcatccaatcagatccagaatgcctgccactgtatacttggagctgctcgacaggagcgccgttggcggcattgcaaacatctcctatagtcctcgggcacaacaaggtcagccaatgacgccaacgcagatcatcccatcggatccggtattcttgacgaaaatccctgaagatgggaaacccacgctgctggtgcaaacaccgccggtgatgccagtgtaggccccattgcccttggacgggatgtcactgactacaatggactcctgacatgcagttgtagcttggctcgaggcgggcatcagcgacgacaaacatcctgctcaatttgttgtatgataaatactgcgaaacaatgctggtgtttcataagatgaccgtgcagctcatgaaaatccagagggtggagtcgagcgagacgacgtggccggcgcggcgccaggtcgtggcgtgcgccgctgtttgctggtcgtggcgtgaggtcaccaaggaggtggtgaagacgctcaaggagtgcggcaggatcaccttccccatgtcccttaagcaggttggcactctctgccttttctctactttgatgatcaatcacatgtcttcacctttgcagaggcttatgattttgaagatctagaatctatggttgaagaaatagccaaagcattcaagacaaagataatgtttatatatgttgacactgctgaagaaaaccttgcaaaaaccattcctcactctttatggcattgaatcagaaaaggcctactggtccagttcttgaaagggtgggaatgtgtccaagaagacaaaggcatcgacccgccaattcttcgctacaaattaaaacagcactagggtgagatcagtgggcttgagagtagcatcatccttcaaacatgatgatgggtttctagctgatggtgtctctatagctcactggtatccttcaaaaagaaacttcctggaaaaaatgtcttttgaagctaatcttgctccatacagctaatcttcacatctttcaaagcatttgctagggccccttcggtgagcaatagaatacgacttgcgctaccaaagcgtccatagtccaggagaagacctccgatgaagaaagagacatgctgcacatgcacgagggtacttgcagatagatgtcggctctatggacgaacactcgaccaagtcagatgaggagtatgagggcctagccatgcgagacatgatggctaccggtccaacaatgagcagcaagctgtgagttaaagatgaactcacctgtcctggagagcaacatccataggagtgaggcaaaatggcgggtaccaccacaacatggacccgttcctgaagatgtccaaggaggtggtagccgacaccataatgtcttgcgcgtcattgtgtcaccggccggcaacacgctgcgctggtaccggcgggtgttatgtttcttaggcgtatgtttctgtgctttgagctgtgctatagactggttgtgccaactactgattttaaaagaaaaaggtgagctgaaaatcattgttgaaaacaaacatgtaacggttcgttctcatcagttgtgccaactaccaatcatttcattgatcagaatctgtcgttgctcatgagaaccaaaagtaagacacttcttaataacattggatgcaaa

SEQ ID NO: 11091 - DNA, 2326 bp, Zea Mays
tgaaactgtcgcagcccacgatgcactccacccccggccgatgcttccccgcccagccgcctgcgcccgcggctacatcatccagcctgccgcgttcgctaccgacgatgcactccacccacctccgccgcccgccatggcctccacccaactcacgtgcagcaggttccaactcccaagatctaggtcggacaccggcgcacaccacgtcagcgacgccaagcaccactcgttcgacctcggcaagcacctgcctctccgtcatcgcccccccccccccctccgctctctatcgcttgctctagccgatctatgtgcatggggctcaacgactggaacaaatcctcgtcgatgctcagggatggttttagggtagatggagcatcccctacatgtgtcttccatgggatggcccaactgcagatctgttcctgggatactacacaatgactacattgcatactcggagctgctcgacaggagcgtcgtcggcggtgctgtaaacatctcctagagtcctcgggcacaagaaggtcaggcggtgatgccaatgcagatcatccaatcagatccagaatgcctgccactgtatacttggagctgctcgacaggagcgccgttggcggcattgcaaacatctcctatagtcctcgggcacaacaaggtcagccaatgacgccaacgcagatcatcccatcggatccggtattcttgacgaaaatccctgaagatgggaaacccacgctgctggtgcaaacaccgccggtgatgccagtgtaggccccattgcccttggacgggatgtcactgactacaatggactcctgacatgcagttgtagcttggctcgaggcgggcatcagcgacgacaaacatcctgctcaatttgttgtatgataaatactgcgaaacaatgctggtgtttcataagatgaccgtgcagctcatgaaaatccagagggtggagtcgagcgagacgacgtggccggcgcggcgccaggtcgtggcgtgcgccgctgtttgctggtcgtggcgtgaggtcaccaaggaggtggtgaagacgctcaaggagtgcggcaggatcaccttccccatgtcccttaagcaggttggcactctctgccttttctctactttgatgatcaatcacatgtcttcacctttgcagaggcttatgattttgaagatctagaatctatggttgaagaaatagccaaagcattcaagacaaagataatgtttatatatgttgacactgctgaagaaaaccttgcaaaaaccattcctcactctttatggcattgaatcagaaaaggcctactggtccagttcttgaaagggtgggaatgtgtccaagaagacaaaggcatcgacccgccaattcttcgctacaaattaaaacagcactagggtgagatcagtgggcttgagagtagcatcatccttcaaacatgatgatgggtttctagctgatggtgtctctatagctcactggtatccttcaaaaagaaacttcctggaaaaaatgtcttttgaagctaatcttgctccatacagctaatcttcacatctttcaaagcatttgctagggccccttcggtgagcaatagaatacgacttgcgctaccaaagcgtccatagctgaatgcaaaccattgagatggtccaggttgaggacctccatgacacctatgttggtgtgggttgtgccgccccatcgtgaccgtcatcgattgggcctccgagtccaggagaagacctccgatgaagaaagagacatgctgcacatgcacgagggtacttgcagatagatgtcggctctatggacgaacactcgaccaagtcagatgaggagtatgagggcctagccatgcgagacatgatggctaccggtccaacaatgagcagcaagctgtgagttaaagatgaactcacctgtcctggagagcaacatccataggagtgaggcaaaatggcgggtaccaccacaacatggacccgttcctgaagatgtccaaggaggtggtagccgacaccataatgtcttgcgcgtcattgtgtcaccggccggcaacacgctgcgctggtaccggcgggtgttatgtttcttaggcgtatgtttctgtgctttgagctgtgctatagactggttgtgccaactactgattttaaaagaaaaaggtgagctgaaaatcattgttgaaaacaaacatgtaacggttcgttctcatcagttgtgccaactaccaatcatttcattgatcagaatctgtcgttgctcatgagaaccaaaagtaagacacttcttaataacattggatgcaaa

SEQ ID NO: 11092 - DNA, 2111 bp, Zea Mays
tgaaactgtcgcagcccacgatgcactccacccccggccgatgcttccccgcccagccgcctgcgcccgcggctacatcatccagcctgccgcgttcgctaccgacgatgcactccacccacctccgccgcccgccatggcctccacccaactcacgtgcagcaggttccaactcccaagatctaggtcggacaccggcgcacaccacgtcagcgacgccaagcaccactcgttcgacctcggcaagcacctgcctctccgtcatcgcccccccccccccctccgctctctatcgcttgctctagccgatctatgtgcatggggctcaacgactggaacaaatcctcgtcgatgctcagggatggttttagggtagatggagcatcccctacatgtgtcttccatgggatggcccaactgcagatctgttcctgggatactacacaatgactacattgcatactcggagctgctcgacaggagcgtcgtcggcggtgctgtaaacatctcctagagtcctcgggcacaagaaggtcaggcggtgatgccaatgcagatcatccaatcagatccagaatgcctgccactgtatacttggagctgctcgacaggagcgccgttggcggcattgcaaacatctcctatagtcctcgggcacaacaagttgtagcttggctcgaggcgggcatcagcgacgacaaacatcctgctcaatttgttgtatgataaatactgcgaaacaatgctggtgtttcataagatgaccgtgcagctcatgaaaatccagagggtggagtcgagcgagacgacgtggccggcgcggcgccaggtcgtggcgtgcgccgctgtttgctggtcgtggcgtgaggtcaccaaggaggtggtgaagacgctcaaggagtgcggcaggatcaccttccccatgtcccttaagcaggtcttcacctttgcagaggcttatgattttgaagatctagaatctatggttgaagaaatagccaaagcattcaagacaaagataatgtttatatatgttgacactgctgaagaaaaccttgcaaaaaccattcctcactctttatggcattgaatcagaaaaggcctactggtccagttcttgaaagggtgggaatgtgtccaagaagacaaaggcatcgacccgccaattcttcgctacaaattaaaacagcactagggtgagatcagtgggcttgagagtagcatcatccttcaaacatgatgatgggtttctagctgatggtgtctctatagctcactggtatccttcaaaaagaaacttcctggaaaaaatgtcttttgaagctaatcttgctccatacagctaatcttcacatctttcaaagcatttgctagggccccttcggtgagcaatagaatacgacttgcgctaccaaagcgtccatagctgaatgcaaaccattgagatggtccaggttgaggacctccatgacacctatgttggtgtgggttgtgccgccccatcgtgaccgtcatcgattgggcctccgagtccaggagaagacctccgatgaagaaagagacatgctgcacatgcacgagggtacttgcagatagatgtcggctctatggacgaacactcgaccaagtcagatgaggagtatgagggcctagccatgcgagacatgatggctaccggtccaacaatgagcagcaagctgtgagttaaagatgaactcacctgtcctggagagcaacatccataggagtgaggcaaaatggcgggtaccaccacaacatggacccgttcctgaagatgtccaaggaggtggtagccgacaccataatgtcttgcgcgtcattgtgtcaccggccggcaacacgctgcgctggtaccggcgggtgttatgtttcttaggcgtatgtttctgtgctttgagctgtgctatagactggttgtgccaactactgattttaaaagaaaaaggtgagctgaaaatcattgttgaaaacaaacatgtaacggttcgttctcatcagttgtgccaactaccaatcatttcattgatcagaatctgtcgttgctcatgagaaccaaaagtaagacacttcttaataacattggatgcaaa

SEQ ID NO: 11093 - DNA, 2282 bp, Zea Mays
tgaaactgtcgcagcccacgatgcactccacccccggccgatgcttccccgcccagccgcctgcgcccgcggctacatcatccagcctgccgcgttcgctaccgacgatgcactccacccacctccgccgcccgccatggcctccacccaactcacgtgcagcaggttccaactcccaagatctaggtcggacaccggcgcacaccacgtcagcgacgccaagcaccactcgttcgacctcggcaagcacctgcctctccgtcatcgcccccccccccccctccgctctctatcgcttgctctagccgatctatgtgcatggggctcaacgactggaacaaatcctcgtcgatgctcagggatggttttagggtagatggagcatcccctacatgtgtcttccatgggatggcccaactgcagatctgttcctgggatactacacaatgactacattgcatactcggagctgctcgacaggagcgtcgtcggcggtgctgtaaacatctcctagagtcctcgggcacaagaaggtcaggcggtgatgccaatgcagatcatccaatcagatccagaatgcctgccactgtatacttggagctgctcgacaggagcgccgttggcggcattgcaaacatctcctatagtcctcgggcacaacaaggtcagccaatgacgccaacgcagatcatcccatcggatccggtattcttgacgaaaatccctgaagatgggaaacccacgctgctggtgcaaacaccgccggtgatgccagtgtaggccccattgcccttggacgggatgtcactgactacaatggactcctgacatgcagttgtagcttggctcgaggcgggcatcagcgacgacaaacatcctgctcaatttgttgtatgataaatactgcgaaacaatgctggtgtttcataagatgaccgtgcagctcatgaaaatccagagggtggagtcgagcgagacgacgtggccggcgcggcgccaggtcgtggcgtgcgccgctgtttgctggtcgtggcgtgaggtcaccaaggaggtggtgaagacgctcaaggagtgcggcaggatcaccttccccatgtcccttaagcaggtcttcacctttgcagaggcttatgattttgaagatctagaatctatggttgaagaaatagccaaagcattcaagacaaagataatgtttatatatgttgacactgctgaagaaaaccttgcaaaaaccattcctcactctttatggcattgaatcagaaaaggcctactggtccagttcttgaaagggtgggaatgtgtccaagaagacaaaggcatcgacccgccaattcttcgctacaaattaaaacagcactagggtgagatcagtgggcttgagagtagcatcatccttcaaacatgatgatgggtttctagctgatggtgtctctatagctcactggtatccttcaaaaagaaacttcctggaaaaaatgtcttttgaagctaatcttgctccatacagctaatcttcacatctttcaaagcatttgctagggccccttcggtgagcaatagaatacgacttgcgctaccaaagcgtccatagctgaatgcaaaccattgagatggtccaggttgaggacctccatgacacctatgttggtgtgggttgtgccgccccatcgtgaccgtcatcgattgggcctccgagtccaggagaagacctccgatgaagaaagagacatgctgcacatgcacgagggtacttgcagatagatgtcggctctatggacgaacactcgaccaagtcagatgaggagtatgagggcctagccatgcgagacatgatggctaccggtccaacaatgagcagcaagctgtgagttaaagatgaactcacctgtcctggagagcaacatccataggagtgaggcaaaatggcgggtaccaccacaacatggacccgttcctgaagatgtccaaggaggtggtagccgacaccataatgtcttgcgcgtcattgtgtcaccggccggcaacacgctgcgctggtaccggcgggtgttatgtttcttaggcgtatgtttctgtgctttgagctgtgctatagactggttgtgccaactactgattttaaaagaaaaaggtgagctgaaaatcattgttgaaaacaaacatgtaacggttcgttctcatcagttgtgccaactaccaatcatttcattgatcagaatctgtcgttgctcatgagaaccaaaagtaagacacttcttaataacattggatgcaaa

SEQ ID NO: 11094 - DNA, 2221 bp, Zea Mays
tgaaactgtcgcagcccacgatgcactccacccccggccgatgcttccccgcccagccgcctgcgcccgcggctacatcatccagcctgccgcgttcgctaccgacgatgcactccacccacctccgccgcccgccatggcctccacccaactcacgtgcagcaggttccaactcccaagatctaggtcggacaccggcgcacaccacgtcagcgacgccaagcaccactcgttcgacctcggcaagcacctgcctctccgtcatcgcccccccccccccctccgctctctatcgcttgctctagccgatctatgtgcatggggctcaacgactggaacaaatcctcgtcgatgctcagggatggttttagggtagatggagcatcccctacatgtgtcttccatgggatggcccaactgcagatctgttcctgggatactacacaatgactacattgcatactcggagctgctcgacaggagcgtcgtcggcggtgctgtaaacatctcctagagtcctcgggcacaagaaggtcaggcggtgatgccaatgcagatcatccaatcagatccagaatgcctgccactgtatacttggagctgctcgacaggagcgccgttggcggcattgcaaacatctcctatagtcctcgggcacaacaaggtcagccaatgacgccaacgcagatcatcccatcggatccggtattcttgacgaaaatccctgaagatgggaaacccacgctgctggtgcaaacaccgccggtgatgccagtgtaggccccattgcccttggacgggatgtcactgactacaatggactcctgacatgcagttgtagcttggctcgaggcgggcatcagcgacgacaaacatcctgctcaatttgttgtatgataaatactgcgaaacaatgctggtgtttcataagatgaccgtgcagctcatgaaaatccagagggtggagtcgagcgagacgacgtggccggcgcggcgccaggtcgtggcgtgcgccgctgtttgctggtcgtggcgtgaggtcaccaaggaggtggtgaagacgctcaaggagtgcggcaggatcaccttccccatgtcccttaagcagaggcttatgattttgaagatctagaatctatggttgaagaaatagccaaagcattcaagacaaagataatgtttatatatgttgacactgctgaagaaaaccttgcaaaaaccattcctcactctttatggcattgaatcagaaaaggcctactggtccagttcttgaaagggtgggaatgtgtccaagaagacaaaggcatcgacccgccaattcttcgctacaaattaaaacagcactagggtgagatcagtgggcttgagagtagcatcatccttcaaacatgatgatgggtttctagctgatggtgtctctatagctcactggtatccttcaaaaagaaactaatcttcacatctttcaaagcatttgctagggccccttcggtgagcaatagaatacgacttgcgctaccaaagcgtccatagctgaatgcaaaccattgagatggtccaggttgaggacctccatgacacctatgttggtgtgggttgtgccgccccatcgtgaccgtcatcgattgggcctccgagtccaggagaagacctccgatgaagaaagagacatgctgcacatgcacgagggtacttgcagatagatgtcggctctatggacgaacactcgaccaagtcagatgaggagtatgagggcctagccatgcgagacatgatggctaccggtccaacaatgagcagcaagctgtgagttaaagatgaactcacctgtcctggagagcaacatccataggagtgaggcaaaatggcgggtaccaccacaacatggacccgttcctgaagatgtccaaggaggtggtagccgacaccataatgtcttgcgcgtcattgtgtcaccggccggcaacacgctgcgctggtaccggcgggtgttatgtttcttaggcgtatgtttctgtgctttgagctgtgctatagactggttgtgccaactactgattttaaaagaaaaaggtgagctgaaaatcattgttgaaaacaaacatgtaacggttcgttctcatcagttgtgccaactaccaatcatttcattgatcagaatctgtcgttgctcatgagaaccaaaagtaagacacttcttaataacattggatgcaaa

SEQ ID NO: 11095 - DNA, 2963 bp, Zea Mays
tgaaactgtcgcagcccacgatgcactccacccccggccgatgcttccccgcccagccgcctgcgcccgcggctacatcatccagcctgccgcgttcgctaccgacgatgcactccacccacctccgccgcccgccatggcctccacccaactcacgtgcagcaggttccaactcccaagatctaggtcggacaccggcgcacaccacgtcagcgacgccaagcaccactcgttcgacctcggcaagcacctgcctctccgtcatcgcccccccccccccctccgctctctatcgcttgctctagccgatctatgtgcatggggctcaacgactggaacaaatcctcgtcgatgctcagggatggttttagggtagatggagcatcccctacatgtgtcttccatgggatggcccaactgcagatctgttcctgggatactacacaatgactacattgcatactcggagctgctcgacaggagcgtcgtcggcggtgctgtaaacatctcctagagtcctcgggcacaagaaggtcaggcggtgatgccaatgcagatcatccaatcagatccagaatgcctgccactgtatacttggagctgctcgacaggagcgccgttggcggcattgcaaacatctcctatagtcctcgggcacaacaaggtcagccaatgacgccaacgcagatcatcccatcggatccggtattcttgacgaaaatccctgaagatgggaaacccacgctgctggtgcaaacaccgccggtgatgccagtttgtagcttggctcgaggcgggcatcagcgacgacaaacatcctgctcaatttgttgtatgataaatactgcgaaacaatgctggtgtttcataagatgaccgtgcagctcatgaaaatccagagggtggagtcgagcgagacgacgtggccggcgcggcgccaggtcgtggcgtgcgccgctgtttgctggtcgtggcgtgaggtcaccaaggaggtggtgaagacgctcaaggagtgcggcaggatcaccttccccatgtcccttaagcaggttggcactctctgccttttctctactttgatgatcaatcacatgtcttcacctttgcagaggcttatgattttgaagatctagaatctatggttgaagaaatagccaaagcattcaagacaaagataatgtttatatatgttgacactgctgaagaaaaccttgcaaaaaccattcctcactctttatggcattgaatcagaaaaggcctactggtccagttcttgaaagggtgggaatgtgtccaagaagacaaaggcatcgacccgccaattcttcgctacaaattaaaacagcactagggtgagatcagtgggcttgagagtagcatcatccttcaaacatgatgatgggtttctagctgatggtgtctctatagctcactggtatccttcaaaaagaaagtatggtgttgttttataagctctcatgtttatgactaaggttgagatttgtgaagattcagaaataattagctacatgcccttgcgtagcttacaatgcacaattagctagcttcattgttttaacttctctgcaatatgaacatgcaaattttaaccacctcatttgtttttaataagctgaaacaaattgttggttattattcccccttgtttggtcgccctcatttaagttgtggcttagatattcctactcagagagttggtacatgttttttatgcttatctttttcatttatcaaccatatgtgtgtttgatgttttttctatgcttagacctaaacaaaacattcttggtagccacatctaaaacattcatttcaagttctacattaattcatttatattccatcaacttttaaaatacaacacttagtttgtttgaaaagaaatagtttttgtgaaatcttcaaacaaggcttgacaatgatttattcatcgacaatgcatctgagccctctttgcattgtaagctcctacaatgaagttatacaaaagtcttatctattcattttggtttaagctggttgagcactttttacaatatctggtcaacacatctaggatgactcttcacatctgtcaattcaaattctcttcaaaacagctaatattgctccatattgtcttttgaagcttcctggaaaaaatgtcttttgaagctaatcttgctccatacagctaatcttcacatctttcaaagcatttgctagggccccttcggtgagcaatagaatacgacttgcgctaccaaagcgtccatagctgaatgcaaaccattgagatggtccaggttgaggacctccatgacacctatgttggtgtgggttgtgccgccccatcgtgaccgtcatcgattgggcctccgagtccaggagaagacctccgatgaagaaagagacatgctgcacatgcacgagggtacttgcagatagatgtcggctctatggacgaacactcgaccaagtcagatgaggagtatgagggcctagccatgcgagacatgatggctaccggtccaacaatgagcagcaagctgtgagttaaagatgaactcacctgtcctggagagcaacatccataggagtgaggcaaaatggcgggtaccaccacaacatggacccgttcctgaagatgtccaaggaggtggtagccgacaccataatgtcttgcgcgtcattgtgtcaccggccggcaacacgctgcgctggtaccggcgggtgttatgtttcttaggcgtatgtttctgtgctttgagctgtgctatagactggttgtgccaactactgattttaaaagaaaaaggtgagctgaaaatcattgttgaaaacaaacatgtaacggttcgttctcatcagttgtgccaactaccaatcatttcattgatcagaatctgtcgttgctcatgagaaccaaaagtaagacacttcttaataacattggatgcaaa

SEQ ID NO: 11096 - DNA, 2254 bp, Zea Mays
tgaaactgtcgcagcccacgatgcactccacccccggccgatgcttccccgcccagccgcctgcgcccgcggctacatcatccagcctgccgcgttcgctaccgacgatgcactccacccacctccgccgcccgccatggcctccacccaactcacgtgcagcaggttccaactcccaagatctaggtcggacaccggcgcacaccacgtcagcgacgccaagcaccactcgttcgacctcggcaagcacctgcctctccgtcatcgcccccccccccccctccgctctctatcgcttgctctagccgatctatgtgcatggggctcaacgactggaacaaatcctcgtcgatgctcagggatggttttagggtagatggagcatcccctacatgtgtcttccatgggatggcccaactgcagatctgttcctgggatactacacaatgactacattgcatactcggagctgctcgacaggagcgtcgtcggcggtgctgtaaacatctcctagagtcctcgggcacaagaaggtcaggcggtgatgccaatgcagatcatccaatcagatccagaatgcctgccactgtatacttggagctgctcgacaggagcgccgttggcggcattgcaaacatctcctatagtcctcgggcacaacaaggtcagccaatgacgccaacgcagatcatcccatcggatccggtattcttgacgaaaatccctgaagatgggaaacccacgctgctggtgcaaacaccgccggtgatgccagtgtaggccccattgcccttggacgggatgtcactgactacaatggactcctgacatgcagttgtagcttggctcgaggcgggcatcagcgacgacaaacatcctgctcaatttgttgtatgataaatactgcgaaacaatgctggtgtttcataagatgaccgtgcagctcatgaaaatccagagggtggagtcgagcgagacgacgtggccggcgcggcgccaggtcgtggcgtgcgccgctgtttgctggtcgtggcgtgaggtcaccaaggaggtggtgaagacgctcaaggagtgcggcaggatcaccttccccatgtcccttaagcaggtcttcacctttgcagaggcttatgattttgaagatctagaatctatggttgaagaaatagccaaagcattcaagacaaagataatgtttatatatgttgacactgctgaagaaaaccttgcaaaaaccattcctcactctttatggcattgaatcagaaaaggcctactggtccagttcttgaaagggtgggaatgtgtccaagaagacaaaggcatcgacccgccaattcttcgctacaaattaaaacagcactagggtgagatcagtgggcttgagagtagcatcatccttcaaacatgatgatgggtttctagctgatggtgtctctatagctcactggtatccttcaaaaagaaacttcctggaaaaaatgtcttttgaagctaatcttgctccatacagctaatcttcacatctttcaaagcatttgctagggccccttcggtgagcaatagaatacgacttgcgctaccaaagcgtccataggttgaggacctccatgacacctatgttggtgtgggttgtgccgccccatcgtgaccgtcatcgattgggcctccgagtccaggagaagacctccgatgaagaaagagacatgctgcacatgcacgagggtacttgcagatagatgtcggctctatggacgaacactcgaccaagtcagatgaggagtatgagggcctagccatgcgagacatgatggctaccggtccaacaatgagcagcaagctgtgagttaaagatgaactcacctgtcctggagagcaacatccataggagtgaggcaaaatggcgggtaccaccacaacatggacccgttcctgaagatgtccaaggaggtggtagccgacaccataatgtcttgcgcgtcattgtgtcaccggccggcaacacgctgcgctggtaccggcgggtgttatgtttcttaggcgtatgtttctgtgctttgagctgtgctatagactggttgtgccaactactgattttaaaagaaaaaggtgagctgaaaatcattgttgaaaacaaacatgtaacggttcgttctcatcagttgtgccaactaccaatcatttcattgatcagaatctgtcgttgctcatgagaaccaaaagtaagacacttcttaataacattggatgcaaa

SEQ ID NO: 11097 - DNA, 2266 bp, Zea Mays
tgaaactgtcgcagcccacgatgcactccacccccggccgatgcttccccgcccagccgcctgcgcccgcggctacatcatccagcctgccgcgttcgctaccgacgatgcactccacccacctccgccgcccgccatggcctccacccaactcacgtgcagcaggttccaactcccaagatctaggtcggacaccggcgcacaccacgtcagcgacgccaagcaccactcgttcgacctcggcaagcacctgcctctccgtcatcgcccccccccccccctccgctctctatcgcttgctctagccgatctatgtgcatggggctcaacgactggaacaaatcctcgtcgatgctcagggatggttttagggtagatggagcatcccctacatgtgtcttccatgggatggcccaactgcagatctgttcctgggatactacacaatgactacattgcatactcggagctgctcgacaggagcgtcgtcggcggtgctgtaaacatctcctagagtcctcgggcacaagaaggtcaggcggtgatgccaatgcagatcatccaatcagatccagaatgcctgccactgtatacttggagctgctcgacaggagcgccgttggcggcattgcaaacatctcctatagtcctcgggcacaacaaggtcagccaatgacgccaacgcagatcatcccatcggatccggtattcttgacgaaaatccctgaagatgggaaacccacgctgctggtgcaaacaccgccggtgatgccagtgtaggccccattgcccttggacgggatgtcactgactacaatggactcctgacatgcagttgtagcttggctcgaggcgggcatcagcgacgacaaacatcctgctcaatttgttgtatgataaatactgcgaaacaatgctggtgtttcataagatgaccgtgcagctcatgaaaatccagagggtggagtcgagcgagacgacgtggccggcgcggcgccaggtcgtggcgtgcgccgctgtttgctggtcgtggcgtgaggtcaccaaggaggtggtgaagacgctcaaggagtgcggcaggatcaccttccccatgtcccttaagcagaggcttatgattttgaagatctagaatctatggttgaagaaatagccaaagcattcaagacaaagataatgtttatatatgttgacactgctgaagaaaaccttgcaaaaaccattcctcactctttatggcattgaatcagaaaaggcctactggtccagttcttgaaagggtgggaatgtgtccaagaagacaaaggcatcgacccgccaattcttcgctacaaattaaaacagcactagggtgagatcagtgggcttgagagtagcatcatccttcaaacatgatgatgggtttctagctgatggtgtctctatagctcactggtatccttcaaaaagaaacttcctggaaaaaatgtcttttgaagctaatcttgctccatacagctaatcttcacatctttcaaagcatttgctagggccccttcggtgagcaatagaatacgacttgcgctaccaaagcgtccatagctgaatgcaaaccattgagatggtccaggttgaggacctccatgacacctatgttggtgtgggttgtgccgccccatcgtgaccgtcatcgattgggcctccgagtccaggagaagacctccgatgaagaaagagacatgctgcacatgcacgagggtacttgcagatagatgtcggctctatggacgaacactcgaccaagtcagatgaggagtatgagggcctagccatgcgagacatgatggctaccggtccaacaatgagcagcaagctgtgagttaaagatgaactcacctgtcctggagagcaacatccataggagtgaggcaaaatggcgggtaccaccacaacatggacccgttcctgaagatgtccaaggaggtggtagccgacaccataatgtcttgcgcgtcattgtgtcaccggccggcaacacgctgcgctggtaccggcgggtgttatgtttcttaggcgtatgtttctgtgctttgagctgtgctatagactggttgtgccaactactgattttaaaagaaaaaggtgagctgaaaatcattgttgaaaacaaacatgtaacggttcgttctcatcagttgtgccaactaccaatcatttcattgatcagaatctgtcgttgctcatgagaaccaaaagtaagacacttcttaataacattggatgcaaa

SEQ ID NO: 11098 - DNA, 2994 bp, Zea Mays
tgaaactgtcgcagcccacgatgcactccacccccggccgatgcttccccgcccagccgcctgcgcccgcggctacatcatccagcctgccgcgttcgctaccgacgatgcactccacccacctccgccgcccgccatggcctccacccaactcacgtgcagcaggttccaactcccaagatctaggtcggacaccggcgcacaccacgtcagcgacgccaagcaccactcgttcgacctcggcaagcacctgcctctccgtcatcgcccccccccccccctccgctctctatcgcttgctctagccgatctatgtgcatggggctcaacgactggaacaaatcctcgtcgatgctcagggatggttttagggtagatggagcatcccctacatgtgtcttccatgggatggcccaactgcagatctgttcctgggatactacacaatgactacattgcatactcggagctgctcgacaggagcgtcgtcggcggtgctgtaaacatctcctagagtcctcgggcacaagaaggtcaggcggtgatgccaatgcagatcatccaatcagatccagaatgcctgccactgtatacttggagctgctcgacaggagcgccgttggcggcattgcaaacatctcctatagtcctcgggcacaacaaggtcagccaatgacgccaacgcagatcatcccatcggatccggtattcttgacgaaaatccctgaagatgggaaacccacgctgctggtgcaaacaccgccggtgatgccagtgtaggccccattgcccttggacgggatgtcactgactacaatggactcctgacatgcagttgtagcttggctcgaggcgggcatcagcgacgacaaacatcctgctcaatttgttgtatgataaatactgcgaaacaatgctggtgtttcataagatgaccgtgcagctcatgaaaatccagagggtggagtcgagcgagacgacgtggccggcgcggcgccaggtcgtggcgtgcgccgctgtttgctggtcgtggcgtgaggtcaccaaggaggtggtgaagacgctcaaggagtgcggcaggatcaccttccccatgtcccttaagcaggttggcactctctgccttttctctactttgatgatcaatcacatgtcttcacctttgcagaggcttatgattttgaagatctagaatctatggttgaagaaatagccaaagcattcaagacaaagataatgtttatatatgttgacactgctgaagaaaaccttgcaaaaaccattcctcactctttatggcattgaatcagaaaaggcctactggtccagttcttgaaagggtgggaatgtgtccaagaagacaaaggcatcgacccgccaattcttcgctacaaattaaaacagcactagggtgagatcagtgggcttgagagtagcatcatccttcaaacatgatgatgggtttctagctgatggtgtctctatagctcactggtatccttcaaaaagaaagtatggtgttgttttataagctctcatgtttatgactaaggttgagatttgtgaagattcagaaataattagctacatgcccttgcgtagcttacaatgcacaattagctagcttcattgttttaacttctctgcaatatgaacatgcaaattttaaccacctcatttgtttttaataagctgaaacaaattgttggttattattcccccttgtttggtcgccctcatttaagttgtggcttagatattcctactcagagagttggtacatgttttttatgcttatctttttcatttatcaaccatatgtgtgtttgatgttttttctatgcttagacctaaacaaaacattcttggtagccacatctaaaacattcatttcaagttctacattaattcatttatattccatcaacttttaaaatacaacacttagtttgtttgaaaagaaatagtttttgtgaaatcttcaaacaaggcttgacaatgatttattcatcgacaatgcatctgagccctctttgcattgtaagctcctacaatgaagttatacaaaagtcttatctattcattttggtttaagctggttgagcactttttacaatatctggtcaacacatctaggatgactcttcacatctgtcaattcaaattctcttcaaaacagctaatattgctccatattgtcttttgaagcttcctggaaaaaatgtcttttgaagctaatcttgctccatacagctaatcttcacatctttcaaagcatttgctagggccccttcggtgagcaatagaatacgacttgcgctaccaaagcgtccataggttgaggacctccatgacacctatgttggtgtgggttgtgccgccccatcgtgaccgtcatcgattgggcctccgagtccaggagaagacctccgatgaagaaagagacatgctgcacatgcacgagggtacttgcagatagatgtcggctctatggacgaacactcgaccaagtcagatgaggagtatgagggcctagccatgcgagacatgatggctaccggtccaacaatgagcagcaagctgtgagttaaagatgaactcacctgtcctggagagcaacatccataggagtgaggcaaaatggcgggtaccaccacaacatggacccgttcctgaagatgtccaaggaggtggtagccgacaccataatgtcttgcgcgtcattgtgtcaccggccggcaacacgctgcgctggtaccggcgggtgttatgtttcttaggcgtatgtttctgtgctttgagctgtgctatagactggttgtgccaactactgattttaaaagaaaaaggtgagctgaaaatcattgttgaaaacaaacatgtaacggttcgttctcatcagttgtgccaactaccaatcatttcattgatcagaatctgtcgttgctcatgagaaccaaaagtaagacacttcttaataacattggatgcaaa

SEQ ID NO: 11099 - DNA, 2977 bp, Zea Mays
tgaaactgtcgcagcccacgatgcactccacccccggccgatgcttccccgcccagccgcctgcgcccgcggctacatcatccagcctgccgcgttcgctaccgacgatgcactccacccacctccgccgcccgccatggcctccacccaactcacgtgcagcaggttccaactcccaagatctaggtcggacaccggcgcacaccacgtcagcgacgccaagcaccactcgttcgacctcggcaagcacctgcctctccgtcatcgcccccccccccccctccgctctctatcgcttgctctagccgatctatgtgcatggggctcaacgactggaacaaatcctcgtcgatgctcagggatggttttagggtagatggagcatcccctacatgtgtcttccatgggatggcccaactgcagatctgttcctgggatactacacaatgactacattgcatactcggagctgctcgacaggagcgtcgtcggcggtgctgtaaacatctcctagagtcctcgggcacaagaaggtcaggcggtgatgccaatgcagatcatccaatcagatccagaatgcctgccactgtatacttggagctgctcgacaggagcgccgttggcggcattgcaaacatctcctatagtcctcgggcacaacaaggtcagccaatgacgccaacgcagatcatcccatcggatccggtattcttgacgaaaatccctgaagatgggaaacccacgctgctggtgcaaacaccgccggtgatgccagtctcctgacatgcagttgtagcttggctcgaggcgggcatcagcgacgacaaacatcctgctcaatttgttgtatgataaatactgcgaaacaatgctggtgtttcataagatgaccgtgcagctcatgaaaatccagagggtggagtcgagcgagacgacgtggccggcgcggcgccaggtcgtggcgtgcgccgctgtttgctggtcgtggcgtgaggtcaccaaggaggtggtgaagacgctcaaggagtgcggcaggatcaccttccccatgtcccttaagcaggttggcactctctgccttttctctactttgatgatcaatcacatgtcttcacctttgcagaggcttatgattttgaagatctagaatctatggttgaagaaatagccaaagcattcaagacaaagataatgtttatatatgttgacactgctgaagaaaaccttgcaaaaaccattcctcactctttatggcattgaatcagaaaaggcctactggtccagttcttgaaagggtgggaatgtgtccaagaagacaaaggcatcgacccgccaattcttcgctacaaattaaaacagcactagggtgagatcagtgggcttgagagtagcatcatccttcaaacatgatgatgggtttctagctgatggtgtctctatagctcactggtatccttcaaaaagaaagtatggtgttgttttataagctctcatgtttatgactaaggttgagatttgtgaagattcagaaataattagctacatgcccttgcgtagcttacaatgcacaattagctagcttcattgttttaacttctctgcaatatgaacatgcaaattttaaccacctcatttgtttttaataagctgaaacaaattgttggttattattcccccttgtttggtcgccctcatttaagttgtggcttagatattcctactcagagagttggtacatgttttttatgcttatctttttcatttatcaaccatatgtgtgtttgatgttttttctatgcttagacctaaacaaaacattcttggtagccacatctaaaacattcatttcaagttctacattaattcatttatattccatcaacttttaaaatacaacacttagtttgtttgaaaagaaatagtttttgtgaaatcttcaaacaaggcttgacaatgatttattcatcgacaatgcatctgagccctctttgcattgtaagctcctacaatgaagttatacaaaagtcttatctattcattttggtttaagctggttgagcactttttacaatatctggtcaacacatctaggatgactcttcacatctgtcaattcaaattctcttcaaaacagctaatattgctccatattgtcttttgaagcttcctggaaaaaatgtcttttgaagctaatcttgctccatacagctaatcttcacatctttcaaagcatttgctagggccccttcggtgagcaatagaatacgacttgcgctaccaaagcgtccatagctgaatgcaaaccattgagatggtccaggttgaggacctccatgacacctatgttggtgtgggttgtgccgccccatcgtgaccgtcatcgattgggcctccgagtccaggagaagacctccgatgaagaaagagacatgctgcacatgcacgagggtacttgcagatagatgtcggctctatggacgaacactcgaccaagtcagatgaggagtatgagggcctagccatgcgagacatgatggctaccggtccaacaatgagcagcaagctgtgagttaaagatgaactcacctgtcctggagagcaacatccataggagtgaggcaaaatggcgggtaccaccacaacatggacccgttcctgaagatgtccaaggaggtggtagccgacaccataatgtcttgcgcgtcattgtgtcaccggccggcaacacgctgcgctggtaccggcgggtgttatgtttcttaggcgtatgtttctgtgctttgagctgtgctatagactggttgtgccaactactgattttaaaagaaaaaggtgagctgaaaatcattgttgaaaacaaacatgtaacggttcgttctcatcagttgtgccaactaccaatcatttcattgatcagaatctgtcgttgctcatgagaaccaaaagtaagacacttcttaataacattggatgcaaa

SEQ ID NO: 11100 - DNA, 2281 bp, Zea Mays
tgaaactgtcgcagcccacgatgcactccacccccggccgatgcttccccgcccagccgcctgcgcccgcggctacatcatccagcctgccgcgttcgctaccgacgatgcactccacccacctccgccgcccgccatggcctccacccaactcacgtgcagcaggttccaactcccaagatctaggtcggacaccggcgcacaccacgtcagcgacgccaagcaccactcgttcgacctcggcaagcacctgcctctccgtcatcgcccccccccccccctccgctctctatcgcttgctctagccgatctatgtgcatggggctcaacgactggaacaaatcctcgtcgatgctcagggatggttttagggtagatggagcatcccctacatgtgtcttccatgggatggcccaactgcagatctgttcctgggatactacacaatgactacattgcatactcggagctgctcgacaggagcgtcgtcggcggtgctgtaaacatctcctagagtcctcgggcacaagaaggtcaggcggtgatgccaatgcagatcatccaatcagatccagaatgcctgccactgtatacttggagctgctcgacaggagcgccgttggcggcattgcaaacatctcctatagtcctcgggcacaacaaggtcagccaatgacgccaacgcagatcatcccatcggatccggtattcttgacgaaaatccctgaagatgggaaacccacgctgctggtgcaaacaccgccggtgatgccagtgtaggccccattgcccttggacgggatgtcactgactacaatggactcctgacatgcagttgtagcttggctcgaggcgggcatcagcgacgacaaacatcctgctcaatttgttgtatgataaatactgcgaaacaatgctggtgtttcataagatgaccgtgcagctcatgaaaatccagagggtggagtcgagcgagacgacgtggccggcgcggcgccaggtcgtggcgtgcgccgctgtttgctggtcgtggcgtgaggtcaccaaggaggtggtgaagacgctcaaggagtgcggcaggatcaccttccccatgtcccttaagcaggttggcactctctgccttttctctactttgatgatcaatcacatgtcttcacctttgcagaggcttatgattttgaagatctagaatctatggttgaagaaatagccaaagcattcaagacaaagataatgtttatatatgttgacactgctgaagaaaaccttgcaaaaaccattcctcactctttatggcattgaatcagaaaaggcctactggtccagttcttgaaagggtgggaatgtgtccaagaagacaaaggcatcgacccgccaattcttcgctacaaattaaaacagcactagggtgagatcagtgggcttgagagtagcatcatccttcaaacatgatgatgggtttctagctgatggtgtctctatagctcactggtatccttcaaaaagaaactaatcttcacatctttcaaagcatttgctagggccccttcggtgagcaatagaatacgacttgcgctaccaaagcgtccatagctgaatgcaaaccattgagatggtccaggttgaggacctccatgacacctatgttggtgtgggttgtgccgccccatcgtgaccgtcatcgattgggcctccgagtccaggagaagacctccgatgaagaaagagacatgctgcacatgcacgagggtacttgcagatagatgtcggctctatggacgaacactcgaccaagtcagatgaggagtatgagggcctagccatgcgagacatgatggctaccggtccaacaatgagcagcaagctgtgagttaaagatgaactcacctgtcctggagagcaacatccataggagtgaggcaaaatggcgggtaccaccacaacatggacccgttcctgaagatgtccaaggaggtggtagccgacaccataatgtcttgcgcgtcattgtgtcaccggccggcaacacgctgcgctggtaccggcgggtgttatgtttcttaggcgtatgtttctgtgctttgagctgtgctatagactggttgtgccaactactgattttaaaagaaaaaggtgagctgaaaatcattgttgaaaacaaacatgtaacggttcgttctcatcagttgtgccaactaccaatcatttcattgatcagaatctgtcgttgctcatgagaaccaaaagtaagacacttcttaataacattggatgcaaa

SEQ ID NO: 11101 - DNA, 2281 bp, Zea Mays
tgaaactgtcgcagcccacgatgcactccacccccggccgatgcttccccgcccagccgcctgcgcccgcggctacatcatccagcctgccgcgttcgctaccgacgatgcactccacccacctccgccgcccgccatggcctccacccaactcacgtgcagcaggttccaactcccaagatctaggtcggacaccggcgcacaccacgtcagcgacgccaagcaccactcgttcgacctcggcaagcacctgcctctccgtcatcgcccccccccccccctccgctctctatcgcttgctctagccgatctatgtgcatggggctcaacgactggaacaaatcctcgtcgatgctcagggatggttttagggtagatggagcatcccctacatgtgtcttccatgggatggcccaactgcagatctgttcctgggatactacacaatgactacattgcatactcggagctgctcgacaggagcgtcgtcggcggtgctgtaaacatctcctagagtcctcgggcacaagaaggtcaggcggtgatgccaatgcagatcatccaatcagatccagaatgcctgccactgtatacttggagctgctcgacaggagcgccgttggcggcattgcaaacatctcctatagtcctcgggcacaacaaggtcagccaatgacgccaacgcagatcatcccatcggatccggtattcttgacgaaaatccctgaagatgggaaacccacgctgctggtgcaaacaccgccggtgatgccagtctcctgacatgcagttgtagcttggctcgaggcgggcatcagcgacgacaaacatcctgctcaatttgttgtatgataaatactgcgaaacaatgctggtgtttcataagatgaccgtgcagctcatgaaaatccagagggtggagtcgagcgagacgacgtggccggcgcggcgccaggtcgtggcgtgcgccgctgtttgctggtcgtggcgtgaggtcaccaaggaggtggtgaagacgctcaaggagtgcggcaggatcaccttccccatgtcccttaagcaggttggcactctctgccttttctctactttgatgatcaatcacatgtcttcacctttgcagaggcttatgattttgaagatctagaatctatggttgaagaaatagccaaagcattcaagacaaagataatgtttatatatgttgacactgctgaagaaaaccttgcaaaaaccattcctcactctttatggcattgaatcagaaaaggcctactggtccagttcttgaaagggtgggaatgtgtccaagaagacaaaggcatcgacccgccaattcttcgctacaaattaaaacagcactagggtgagatcagtgggcttgagagtagcatcatccttcaaacatgatgatgggtttctagctgatggtgtctctatagctcactggtatccttcaaaaagaaacttcctggaaaaaatgtcttttgaagctaatcttgctccatacagctaatcttcacatctttcaaagcatttgctagggccccttcggtgagcaatagaatacgacttgcgctaccaaagcgtccatagctgaatgcaaaccattgagatggtccaggttgaggacctccatgacacctatgttggtgtgggttgtgccgccccatcgtgaccgtcatcgattgggcctccgagtccaggagaagacctccgatgaagaaagagacatgctgcacatgcacgagggtacttgcagatagatgtcggctctatggacgaacactcgaccaagtcagatgaggagtatgagggcctagccatgcgagacatgatggctaccggtccaacaatgagcagcaagctgtgagttaaagatgaactcacctgtcctggagagcaacatccataggagtgaggcaaaatggcgggtaccaccacaacatggacccgttcctgaagatgtccaaggaggtggtagccgacaccataatgtcttgcgcgtcattgtgtcaccggccggcaacacgctgcgctggtaccggcgggtgttatgtttcttaggcgtatgtttctgtgctttgagctgtgctatagactggttgtgccaactactgattttaaaagaaaaaggtgagctgaaaatcattgttgaaaacaaacatgtaacggttcgttctcatcagttgtgccaactaccaatcatttcattgatcagaatctgtcgttgctcatgagaaccaaaagtaagacacttcttaataacattggatgcaaa

SEQ ID NO: 11102 - DNA, 2253 bp, Zea Mays
tgaaactgtcgcagcccacgatgcactccacccccggccgatgcttccccgcccagccgcctgcgcccgcggctacatcatccagcctgccgcgttcgctaccgacgatgcactccacccacctccgccgcccgccatggcctccacccaactcacgtgcagcaggttccaactcccaagatctaggtcggacaccggcgcacaccacgtcagcgacgccaagcaccactcgttcgacctcggcaagcacctgcctctccgtcatcgcccccccccccccctccgctctctatcgcttgctctagccgatctatgtgcatggggctcaacgactggaacaaatcctcgtcgatgctcagggatggttttagggtagatggagcatcccctacatgtgtcttccatgggatggcccaactgcagatctgttcctgggatactacacaatgactacattgcatactcggagctgctcgacaggagcgtcgtcggcggtgctgtaaacatctcctagagtcctcgggcacaagaaggtcaggcggtgatgccaatgcagatcatccaatcagatccagaatgcctgccactgtatacttggagctgctcgacaggagcgccgttggcggcattgcaaacatctcctatagtcctcgggcacaacaaggtcagccaatgacgccaacgcagatcatcccatcggatccggtattcttgacgaaaatccctgaagatgggaaacccacgctgctggtgcaaacaccgccggtgatgccagtgtaggccccattgcccttggacgggatgtcactgactacaatggactcctgacatgcagttgtagcttggctcgaggcgggcatcagcgacgacaaacatcctgctcaatttgttgtatgataaatactgcgaaacaatgctggtgtttcataagatgaccgtgcagctcatgaaaatccagagggtggagtcgagcgagacgacgtggccggcgcggcgccaggtcgtggcgtgcgccgctgtttgctggtcgtggcgtgaggtcaccaaggaggtggtgaagacgctcaaggagtgcggcaggatcaccttccccatgtcccttaagcaggttggcactctctgccttttctctactttgatgatcaatcacatgtcttcacctttgcagaggcttatgattttgaagatctagaatctatggttgaagaaatagccaaagcattcaagacaaagataatgtttatatatgttgacactgctgaagaaaaccttgcaaaaaccattcctcactctttatggcattgaatcagaaaaggcctactggtccagttcttgaaagggtgggaatgtgtccaagaagacaaaggcatcgacccgccaattcttcgctacaaattaaaacagcactagggtgagatcagtgggcttgagagtagcatcatccttcaaacatgatgatgggtttctagctgatggtgtctctatagctcactggtatccttcaaaaagaaactaatcttcacatctttcaaagcatttgctagggccccttcggtgagcaatagaatacgacttgcgctaccaaagcgtccataggttgaggacctccatgacacctatgttggtgtgggttgtgccgccccatcgtgaccgtcatcgattgggcctccgagtccaggagaagacctccgatgaagaaagagacatgctgcacatgcacgagggtacttgcagatagatgtcggctctatggacgaacactcgaccaagtcagatgaggagtatgagggcctagccatgcgagacatgatggctaccggtccaacaatgagcagcaagctgtgagttaaagatgaactcacctgtcctggagagcaacatccataggagtgaggcaaaatggcgggtaccaccacaacatggacccgttcctgaagatgtccaaggaggtggtagccgacaccataatgtcttgcgcgtcattgtgtcaccggccggcaacacgctgcgctggtaccggcgggtgttatgtttcttaggcgtatgtttctgtgctttgagctgtgctatagactggttgtgccaactactgattttaaaagaaaaaggtgagctgaaaatcattgttgaaaacaaacatgtaacggttcgttctcatcagttgtgccaactaccaatcatttcattgatcagaatctgtcgttgctcatgagaaccaaaagtaagacacttcttaataacattggatgcaaa

SEQ ID NO: 11103 - DNA, 2175 bp, Zea Mays
tgaaactgtcgcagcccacgatgcactccacccccggccgatgcttccccgcccagccgcctgcgcccgcggctacatcatccagcctgccgcgttcgctaccgacgatgcactccacccacctccgccgcccgccatggcctccacccaactcacgtgcagcaggttccaactcccaagatctaggtcggacaccggcgcacaccacgtcagcgacgccaagcaccactcgttcgacctcggcaagcacctgcctctccgtcatcgcccccccccccccctccgctctctatcgcttgctctagccgatctatgtgcatggggctcaacgactggaacaaatcctcgtcgatgctcagggatggttttagggtagatggagcatcccctacatgtgtcttccatgggatggcccaactgcagatctgttcctgggatactacacaatgactacattgcatactcggagctgctcgacaggagcgtcgtcggcggtgctgtaaacatctcctagagtcctcgggcacaagaaggtcaggcggtgatgccaatgcagatcatccaatcagatccagaatgcctgccactgtatacttggagctgctcgacaggagcgccgttggcggcattgcaaacatctcctatagtcctcgggcacaacaaggtcagccaatgacgccaacgcagatcatcccatcggatccggtattcttgacgaaaatccctgaagatgggaaacccacgctgctggtgcaaacaccgccggtgatgccagtgtaggccccattgcccttggacgggatgtcactgactacaatggactcctgacatgcagttgtagcttggctcgaggcgggcatcagcgacgacaaacatcctgctcaatttgttgtatgataaatactgcgaaacaatgctggtgtttcataagatgaccgtgcagctcatgaaaatccagagggtggagtcgagcgagacgacgtggccggcgcggcgccaggtcgtggcgtgcgccgctgtttgctggtcgtggcgtgaggtcaccaaggaggtggtgaagacgctcaaggagtgcggcaggatcaccttccccatgtcccttaagcagatctagaatctatggttgaagaaatagccaaagcattcaagacaaagataatgtttatatatgttgacactgctgaagaaaaccttgcaaaaaccattcctcactctttatggcattgaatcagaaaaggcctactggtccagttcttgaaagggtgggaatgtgtccaagaagacaaaggcatcgacccgccaattcttcgctacaaattaaaacagcactagggtgagatcagtgggcttgagagtagcatcatccttcaaacatgatgatgggtttctagctgatggtgtctctatagctcactggtatccttcaaaaagaaactaatcttcacatctttcaaagcatttgctagggccccttcggtgagcaatagaatacgacttgcgctaccaaagcgtccataggttgaggacctccatgacacctatgttggtgtgggttgtgccgccccatcgtgaccgtcatcgattgggcctccgagtccaggagaagacctccgatgaagaaagagacatgctgcacatgcacgagggtacttgcagatagatgtcggctctatggacgaacactcgaccaagtcagatgaggagtatgagggcctagccatgcgagacatgatggctaccggtccaacaatgagcagcaagctgtgagttaaagatgaactcacctgtcctggagagcaacatccataggagtgaggcaaaatggcgggtaccaccacaacatggacccgttcctgaagatgtccaaggaggtggtagccgacaccataatgtcttgcgcgtcattgtgtcaccggccggcaacacgctgcgctggtaccggcgggtgttatgtttcttaggcgtatgtttctgtgctttgagctgtgctatagactggttgtgccaactactgattttaaaagaaaaaggtgagctgaaaatcattgttgaaaacaaacatgtaacggttcgttctcatcagttgtgccaactaccaatcatttcattgatcagaatctgtcgttgctcatgagaaccaaaagtaagacacttcttaataacattggatgcaaa

SEQ ID NO: 11104 - DNA, 2253 bp, Zea Mays
tgaaactgtcgcagcccacgatgcactccacccccggccgatgcttccccgcccagccgcctgcgcccgcggctacatcatccagcctgccgcgttcgctaccgacgatgcactccacccacctccgccgcccgccatggcctccacccaactcacgtgcagcaggttccaactcccaagatctaggtcggacaccggcgcacaccacgtcagcgacgccaagcaccactcgttcgacctcggcaagcacctgcctctccgtcatcgcccccccccccccctccgctctctatcgcttgctctagccgatctatgtgcatggggctcaacgactggaacaaatcctcgtcgatgctcagggatggttttagggtagatggagcatcccctacatgtgtcttccatgggatggcccaactgcagatctgttcctgggatactacacaatgactacattgcatactcggagctgctcgacaggagcgtcgtcggcggtgctgtaaacatctcctagagtcctcgggcacaagaaggtcaggcggtgatgccaatgcagatcatccaatcagatccagaatgcctgccactgtatacttggagctgctcgacaggagcgccgttggcggcattgcaaacatctcctatagtcctcgggcacaacaaggtcagccaatgacgccaacgcagatcatcccatcggatccggtattcttgacgaaaatccctgaagatgggaaacccacgctgctggtgcaaacaccgccggtgatgccagtctcctgacatgcagttgtagcttggctcgaggcgggcatcagcgacgacaaacatcctgctcaatttgttgtatgataaatactgcgaaacaatgctggtgtttcataagatgaccgtgcagctcatgaaaatccagagggtggagtcgagcgagacgacgtggccggcgcggcgccaggtcgtggcgtgcgccgctgtttgctggtcgtggcgtgaggtcaccaaggaggtggtgaagacgctcaaggagtgcggcaggatcaccttccccatgtcccttaagcaggttggcactctctgccttttctctactttgatgatcaatcacatgtcttcacctttgcagaggcttatgattttgaagatctagaatctatggttgaagaaatagccaaagcattcaagacaaagataatgtttatatatgttgacactgctgaagaaaaccttgcaaaaaccattcctcactctttatggcattgaatcagaaaaggcctactggtccagttcttgaaagggtgggaatgtgtccaagaagacaaaggcatcgacccgccaattcttcgctacaaattaaaacagcactagggtgagatcagtgggcttgagagtagcatcatccttcaaacatgatgatgggtttctagctgatggtgtctctatagctcactggtatccttcaaaaagaaacttcctggaaaaaatgtcttttgaagctaatcttgctccatacagctaatcttcacatctttcaaagcatttgctagggccccttcggtgagcaatagaatacgacttgcgctaccaaagcgtccataggttgaggacctccatgacacctatgttggtgtgggttgtgccgccccatcgtgaccgtcatcgattgggcctccgagtccaggagaagacctccgatgaagaaagagacatgctgcacatgcacgagggtacttgcagatagatgtcggctctatggacgaacactcgaccaagtcagatgaggagtatgagggcctagccatgcgagacatgatggctaccggtccaacaatgagcagcaagctgtgagttaaagatgaactcacctgtcctggagagcaacatccataggagtgaggcaaaatggcgggtaccaccacaacatggacccgttcctgaagatgtccaaggaggtggtagccgacaccataatgtcttgcgcgtcattgtgtcaccggccggcaacacgctgcgctggtaccggcgggtgttatgtttcttaggcgtatgtttctgtgctttgagctgtgctatagactggttgtgccaactactgattttaaaagaaaaaggtgagctgaaaatcattgttgaaaacaaacatgtaacggttcgttctcatcagttgtgccaactaccaatcatttcattgatcagaatctgtcgttgctcatgagaaccaaaagtaagacacttcttaataacattggatgcaaa

SEQ ID NO: 11105 - DNA, 1215 bp, Zea Mays
cttccctcgtgctcgtgcctctgcctctgcctggccgcggtccgtttgcttcgccgcgcgcgcgggaccacagcaaccagtccaccgctgtcccgaaaggaaagcgacgcgaatagcatctgatcgatcggggggtgcaccgcccaagatctctgctgtcgcgtccggctctcggcgtccgcttcttcctctttctcctttccccgtcgctgggtatatctatcagttgcgctcggtgcttgtgcttacacggggctccttcctcttccatccggatccgtcgatcgagtcggtagcttcatgtctgtcgaggggaatgacgtccggtccgaacgagccacggctgctgctgcgccgccgcgggcttcggaccaggcttcattccccgtgactcatggagacggcagtgatccgccgagcttcccgtgttgcagggcaggcgtgaggcgtccatgttctcatcagcaaggccggcaggaaggttcgcttcgcacttcagagcagggttctaatctgaacccgtgcaagataccatgcacacgaacatcgcagtggcatcacgaggaaccaagacactcagaaacaaatgttctctctaatattccatgatccagtgttcatctgtagtctgcaatgaacactaacgccgctgctgaagcgctactctgctacgtgctacctaagataagatgggataatcatgctaagccagccatatatccttgctagctacacttcatttcgaggagcagatgctacttgcagccgctcagcatagaagaaacaaccttgctagtaacaatgtaacatcaatacaatgtagacattaatggtttggcaagaacagtagatgtcctgctcagagcagtgaagatgttgattctgttggtagtgtgttcttgttgtgttggtattgtatgcattgaagtaattggaccctgaaatgtgtgtggttgtaagaaaacctctatgtgtagtacaataacaatcttaactatgtccttcttgtttgtgataagtttgagtcgattaaatggtgagaaaaatgtgtccataatcgaagaagtcataaaaacatgtccataactgattactcctttaaactacttatttcatcactctttggacttactcattataatttctagctactgctttcccttgggatcaaataaatattgataccttgggatacttacttgtaggtgaagtgct

SEQ ID NO: 11106 - DNA, 1276 bp, Zea Mays
ggaatcctgagtagcatgtggacgtggtgacgactgacgacgacgggattgcctggttcgatcggcttccctcgtgctcgtgcctctgcctctgcctggccgcggtccgtttgcttcgccgcgcgcgcgggaccacagcaaccagtccaccgctgtcccgaaaggaaagcgacgcgaatagcatctgatcgatcggggggtgcaccgcccaagatctctgctgtcgcgtccggctctcggcgtccgcttcttcctctttctcctttccccgtcgctgggtatatctatcagttgcgctcggtgcttgtgcttacacggggctccttcctcttccatccggatccgtcgatcgagtcggtagcttcatgtctgtcgaggggaatgacgtccggtccgaacgagccacggctgctgctgcgccgccgcgggcttcggaccaggcttcattccccgtgactcatggagacggcagtgatccgccgagcttcccgtgttgcagggcaggcgtgaggcgtccatgttctcatcagcaaggccggcaggttcgcttcgcacttcagagcagggttctaatctgaacccgtgcaagataccatgcacacgaacatcgcagtggcatcacgaggaaccaagacactcagaaacaaatgttctctctaatattccatgatccagtgttcatctgtagtctgcaatgaacactaacgccgctgctgaagcgctactctgctacgtgctacctaagataagatgggataatcatgctaagccagccatatatccttgctagctacacttcatttcgaggagcagatgctacttgcagccgctcagcatagaagaaacaaccttgctagtaacaatgtaacatcaatacaatgtagacattaatggtttggcaagaacagtagatgtcctgctcagagcagtgaagatgttgattctgttggtagtgtgttcttgttgtgttggtattgtatgcattgaagtaattggaccctgaaatgtgtgtggttgtaagaaaacctctatgtgtagtacaataacaatcttaactatgtccttcttgtttgtgataagtttgagtcgattaaatggtgagaaaaatgtgtccataatcgaagaagtcataaaaacatgtccataactgattactcctttaaactacttatttcatcactctttggacttactcattataatttctagctactgctttcccttgggatcaaataaatattgataccttgggatacttacttgtaggtgaagtgct

SEQ ID NO: 11107 - DNA, 493 bp, Zea Mays
cgcgtacctgcgtttggcgtctccattcgtcggcgaggaagaagctcacgtcgagaaaaccctcggccaagggcgagggtgacatctccctgtctgcaacgattgggtccgccgccatatgggtgtcgaggccttagtcgatctcttccccagcgaagagcggcctccagagaactattttacctggaaaccctttcgtatttacccatcttcgtcatttgaagttagaactaattctgcctggcaagaaaaagataaagactgatgtcctcgactatgttatctcttggaggttgctcctttcatcgaaaaactggagctgctagttattctgaaattttgtcagcactgaggatacatgtcatgaatagaccccctatgttgtttatgatgcatgcatagcttcatttgtacgtttgtttttgtggggtttttctgaagaagtatgtgaatcataatgtaactctgctatatgttgcatagatgatgctga

SEQ ID NO: 11108 - DNA, 1576 bp, Zea Mays
cggctcccaggttccatcatcaacgccgctgcagcctgcagtttgtcgggagtgcattttggagaaaataaatgatgaggaaattgactgttgcccagtatgcaacattgatcttggctgcgatcctgaagagaaactcaggcctgaccacaaccttcaagatatcagaaataaggtatttccaattaaaaagataaatgttgattctccaaaggctctaacaacattgccagcaaagagaaaacagaggtctatttcttccttggtggttgacactccaagcgtagtaaagcagactggtttgactggaaagagaaccaaagctaaaagaagggcagcagcttctcttgcaacttctcccgttaataatggaactatgaaattaccaagtaaatctgaaaatggggatcagaagactgataaaagctgtccatcacaatctaccaaggcggcaacaagtgcaaacaaaactgaaaatcaagaccaaaagaagaccaagaaaatttcggcaaaacagtcgaccagagcagcaacaccagcaaagaaaaaacagcgaaatacagatgcacaagtttcaagtaagccatcttccgaaaaaagaaagaacagcaagacagctgacaaagatgggctccgtaaatcttcaaaagtacctaggtcaactcccaaaatccatgccgtcaatgaagagcaaataaaagagaaagagggtgaaccccctacaaggaaaggagaagcagacaacaaagtggttattcctgggacaagtgtgagagaacattcaaataactcaaatcttaaagagaaaaatgatggcacttctccagaaccttcgccattaaaagataaaacagcaacagaagattcataccgaggatcgctgggtagtgcaaaaggtttgcatggtccagtaactactccggtgtggttctcattaatttctttgcctaaccagaaagaagatccacaactgcctcagttaccaaagacttacatgagaatcaaagacggcagtttgcagatttcctcgatacagaggtacatcatgaagaaactggatctagctaatgaaaatgaggtggagatcatctgccatggcgaaccgatctgcccctcgagcacgctgcgtgggctgatggagctgtggcatcgtagacagccgacggagcccgtggaggcgtcggtgggtgcgccagccgaggagttcgtcatggtgctgggctaccgctgccaccgccggcacccttatttggcgcccggcaccaccgtcgccgtgcctccagagctgccctcctgatcaggtcggcaaggttgactgcaccgccgtggagcctcaactgcactgcactgctccgctcgctgtcgtccaatccccagtcagtctagccgtttaggatggaacagaggaaagaaattactcctacagttttttttacacatttcttagactttcttttggatcgtactcgtttcttaaacttttgtaaagatagatagagagggaggagagaagttagtgtaccagaagtctgtggcaaatgattaagcaccttaaaccatcgtgtttactctaacg

SEQ ID NO: 11109 - DNA, 1984 bp, Zea Mays
ataaaacaggcgcagcgcaggagtaccctgccttcagcggctcagccccttctcctctcccaccccgcgcctcgcctcgccggagctcggccgccgcctccgccgccgctgtccggttccgcagcagcagacaccgacgcgtccgcacatccgtggaatgccctcagatacgccgccccgcgctgcgtcttcctgagggctgaggccgagaggctccgacgccgccgaaggccgaacccgtgcgtcccacgggtccggaggagggagagggaggagcggctgctcggcggccgccgaggaggagactagggggatgggggccgcgagagggttggcccgcgtgcggcgggaggcgctcgccgcgtgcatgacgtgcccgctttgccggggacttctcagggaggccaccgccataaccgtgtgcctccacacattttgtcgggagtgcattttggagaaaataaatgatgaggaaattgactgttgcccagtatgcaacattgatcttggctgcgatcctgaagagaaactcaggcctgaccacaaccttcaagatatcagaaataaggtatttccaattaaaaagataaatgttgattctccaaaggctctaacaacattgccagcaaagagaaaacagaggtctatttcttccttggtggttgacactccaagcgtagtaaagcagactggtttgactggaaagagaaccaaagctaaaagaagggcagcagcttctcttgcaacttctcccgttaataatggaactatgaaattaccaagtaaatctgaaaatggggatcagaagactgataaaagctgtccatcacaatctaccaaggcggcaacaagtgcaaacaaaactgaaaatcaagaccaaaagaagaccaagaaaatttcggcaaaacagtcgaccagagcagcaacaccagcaaagaaaaaacagcgaaatacagatgcacaagtttcaagtaagccatcttccgaaaaaagaaagaacagcaagacagctgacaaagatgggctccgtaaatcttcaaaagtacctaggtcaactcccaaaatccatgccgtcaatgaagagcaaataaaagagaaagagggtgaaccccctacaaggaaaggagaagcagacaacaaagtggttattcctgggacaagtgtgagagaacattcaaataactcaaatcttaaagagaaaaatgatggcacttctccagaaccttcgccattaaaagataaaacagcaacagaagattcataccgaggatcgctgggtagtgcaaaaggtttgcatggtccagtaactactccggtgtggttctcattaatttctttgcctaaccagaaagaagatccacaactgcctcagttaccaaagacttacatgagaatcaaagacggcagtttgcagatttcctcgatacagaggtacatcatgaagaaactggatctagctaatgaaaatgaggtgatttactcagatgtggagatcatctgccatggcgaaccgatctgcccctcgagcacgctgcgtgggctgatggagctgtggcatcgtagacagccgacggagcccgtggaggcgtcggtgggtgcgccagccgaggagttcgtcatggtgctgggctaccgctgccaccgccggcacccttatttggcgcccggcaccaccgtcgccgtgcctccagagctgccctcctgatcaggtcggcaaggttgactgcaccgccgtggagcctcaactgcactgcactgctccgctcgctgtcgtccaatccccagtcagtctagccgtttaggatggaacagaggaaagaaattactcctacagttttttttacacatttcttagactttcttttggatcgtactcgtttcttaaacttttgtaaagatagatagagagggaggagagaagttagtgtaccagaagtctgtggcaaatgattaagcaccttaaaccatcgtgtttactctaacg

SEQ ID NO: 11110 - DNA, 1960 bp, Zea Mays
ataaaacaggcgcagcgcaggagtaccctgccttcagcggctcagccccttctcctctcccaccccgcgcctcgcctcgccggagctcggccgccgcctccgccgccgctgtccggttccgcagcagcagacaccgacgcgtccgcacatccgtggaatgccctcagatacgccgccccgcgctgcgtcttcctgagggctgaggccgagaggctccgacgccgccgaaggccgaacccgtgcgtcccacgggtccggaggagggagagggaggagcggctgctcggcggccgccgaggaggagactagggggatgggggccgcgagagggttggcccgcgtgcggcgggaggcgctcgccgcgtgcatgacgtgcccgctttgccggggacttctcagggaggccaccgccataaccgtgtgcctccacacattttgtcgggagtgcattttggagaaaataaatgatgaggaaattgactgttgcccagtatgcaacattgatcttggctgcgatcctgaagagaaactcaggcctgaccacaaccttcaagatatcagaaataaggtatttccaattaaaaagataaatgttgattctccaaaggctctaacaacattgccagcaaagagaaaacagaggtctatttcttccttggtggttgacactccaagcgtagtaaagcagactggtttgactggaaagagaaccaaagctaaaagaagggcagcagcttctcttgcaacttctcccgttaataatggaactatgaaattaccaagtaaatctgaaaatggggatcagaagactgataaaagctgtccatcacaatctaccaaggcggcaacaagtgcaaacaaaactgaaaatcaagaccaaaagaagaccaagaaaatttcggcaaaacagtcgaccagagcagcaacaccagcaaagaaaaaacagcgaaatacagatgcacaagtttcaagtaagccatcttccgaaaaaagaaagaacagcaagacagctgacaaagatgggctccgtaaatcttcaaaagtacctaggtcaactcccaaaatccatgccgtcaatgaagagcaaataaaagagaaagagggtgaaccccctacaaggaaaggagaagcagacaacaaagtggttattcctgggacaagtgtgagagaacattcaaataactcaaatcttaaagagaaaaatgatggcacttctccagaaccttcgccattaaaagataaaacagcaacagaagattcataccgaggatcgctgggtagtgcaaaaggtttgcatggtccagtaactactccggtgtggttctcattaatttctttgcctaaccagaaagaagatccacaactgcctcagttaccaaagacttacatgagaatcaatttgcagatttcctcgatacagaggtacatcatgaagaaactggatctagctaatgaaaatgaggtggagatcatctgccatggcgaaccgatctgcccctcgagcacgctgcgtgggctgatggagctgtggcatcgtagacagccgacggagcccgtggaggcgtcggtgggtgcgccagccgaggagttcgtcatggtgctgggctaccgctgccaccgccggcacccttatttggcgcccggcaccaccgtcgccgtgcctccagagctgccctcctgatcaggtcggcaaggttgactgcaccgccgtggagcctcaactgcactgcactgctccgctcgctgtcgtccaatccccagtcagtctagccgtttaggatggaacagaggaaagaaattactcctacagttttttttacacatttcttagactttcttttggatcgtactcgtttcttaaacttttgtaaagatagatagagagggaggagagaagttagtgtaccagaagtctgtggcaaatgattaagcaccttaaaccatcgtgtttactctaacg

SEQ ID NO: 11111 - DNA, 832 bp, Zea Mays
tcctgtttgtcatacctcttttggtgagagatgagcttgaacaattattggatgacgacgatgacatggctgatctttatttgtctagaaagttggctggggcatcttcccctgtcagtggttctggtggaccaaattggttccctgcctccccaactattggttcaaaaatatcaagagcaagcagagccagtgcagctactgtgcatggaaatgagaatgatgttgaagagctagagatgttgctggaggcatatttcatgcaagttgatggcacattaaacaaattgacaacgttgagagagtacatcgatgacacggaagattacatcaatatccagcttgataaccaccgtaatcagttgattcagctagagttattcttgagttctggtaccgtctgtctgtcgctgtactcattagttgctggagtctttggtatgaatattccgtatacctggaatgacggccacggatacatcttcaaatggggcttttttgtgcctttatatttgtctccattgttgcttacgcacgacacaaggggctcgtcggatcctgaatagctgaaataaccgcgtacttgcttccctcaactgtaaatttgagccagtgagcatcgactttgcggggtgattcatctgttgtaccaaattcggtagtatcaaattggggatgttgaataggaactgtaataggaaaaagttaatgcaaaagaaatatgttatgattgcccccggttttataaagtttgcaccgaaagattcaaacaaatatgttattaaccaggtgcctctttctgaaatgattttcatagctatgcacaagtcca

SEQ ID NO: 11112 - DNA, 1729 bp, Zea Mays
aacagactgattgctcctgctcgtattcgtagatccacccacccatcgctcgaacacacagaaccctacagtacagcaagagatcgagcagccacgcccacgcttctctcctctcctctgaaactatcctactatcgtactttcctttttttgttcccttctctttctctctctcccgtcgtcgccatttatcactccttcctcgtcgaaaatcttctgtcgtaataaaggggtcatccgtccaccgtccacgtgggcggcggttgcggctacggcggcggcggcggcggcgtcagcgggcgccggagatgtgagagcctccgtgccgttggagatggctgcggcgggggcagggaccgggagcgaggggaagaagcggggcgcgtcgcggagctggatcctgctcgacgcggccggggaggagcagctgctggacgccgataagtacgccatcatgcgccgcgtcgacatcaacgcgcgcgacctccgcatcctcgacccgctgctatcctacccctccacaatcctcgggcgcgagcgtgccatcgtcctcaatctcgagcatataaaggcgatcatcacttccaacgaggttctgcttagggatccttctgatgagaatgtaatccctgtagtagaggagctccataggcggttagcaccatcgagtgctactcagcatgatggaaaagagaacttaagtggccagcatgatgtagaaggggcagaagaagatgaatctccttttgagttccgtgcattggaggttactctggaagcaatctgcagtttccttgatgcacgcactactgagcttgagaccgatgcttacccagctttggatgagttgacatccaagatcagcagccgcaacttggatagggtacgtaagttaaaaagcgggatgacaagattgaccgcaagggttcagaaggtgagagatgagcttgaacaattattggatgacgacgatgacatggctgatctttatttgtctagaaagttggctggggcatcttcccctgtcagtggttctggtggaccaaattggttccctgcctccccaactattggttcaaaaatatcaagagcaagcagagccagtgcagctactgtgcatggaaatgagaatgatgttgaagagctagagatgttgctggaggcatatttcatgcaagttgatggcacattaaacaaattgacaacgttgagagagtacatcgatgacacggaagattacatcaatatccagctagagttattcttgagttctggtaccgtctgtctgtcgctgtactcattagttgctggagtctttggtatgaatattccgtatacctggaatgacggccacggatacatcttcaaatgggtggttcttgtatcagggcttttttgtgcctttatatttgtctccattgttgcttacgcacgacacaaggggctcgtcggatcctgaatagctgaaataaccgcgtacttgcttccctcaactgtaaatttgagccagtgagcatcgactttgcggggtgattcatctgttgtaccaaattcggtagtatcaaattggggatgttgaataggaactgtaataggaaaaagttaatgcaaaagaaatatgttatgattgcccccggttttataaagtttgcaccgaaagattcaaacaaatatgttattaaccaggtgcctctttctgaaatgattttcatagctatgcacaagtcca

SEQ ID NO: 11113 - DNA, 1501 bp, Zea Mays
aaaagataaataatacacataacacatgctatgctaacaagttggcctctgcccatgaatagaggaatccaaacggaggaaacatggaaacaaaaactattggctgcaacctccaacgagggggcctcactgatggtctaactaactgctatcgtaagttgcaaccccagttccatctccctccctctctctctctcctcctgccatcaccctagaatacgagtatttacctccactttctctctccctcccatctcctcctactcctccctctatataaatatacgcatctccaccctgttcctgggtcctctcttcttccaccaccacctcctactccgctgcaaccccaaatctctccttcctcgcatacgcgcgcagcagaggagctgagaccaacgaagaagaagaacaaccgagcaagcacaagcttagctagcgtggaggtgcccaaggctgccaagaggggcttcgaggacaccatcgacctcaagctgaagctgcccaccgccggcatggaggaagctgccgctgccgccgccgccaagccggagccggccgccgagaaggccaagaggcccgccgaggcgccggccgctgatgccgagaagccacccgcacccaaggcacaagctgtgggttggccaccagtccggtcataccgcaggaacgtcatgaccgtccagtctgtgaagagcaagaaggaagaggagcctgagaagcagcagtccgctgccaacgccggcggcaacggctccgccttcgtgaaggtcagcatggacggcgcgccctacctgcgcaaggtggacctgaagatgtacaacagctacacggagctctccgttgctctgaagaagatgttcagcaccttcaccacatccgggaacaacatgaatgagggaaaactagttgatccggtcagcggtgctgatgtggtcactacttacgaagacaaggatggcgactggatgctcgttggcgacgtcccgtgggagatgtttgtcgagtcatgcaggcgtctgaggatcatgaagagctctgaagccataggtcttgcaccaagaacgaaggacaagtgcaagaacaggagctgaagaagatacagcgttaaagacgctgcccgttgtgtcaaaagaatggtgcccttgcagtgtgctgcggtttttctagaaatataatgcgttttaattactagttggagggagacctgtcttgttcaatttgttcatggaccagaagcaataatctatctgtgtgtagctggattggtgttatgcgatgtcccctaccgtgtgtcccagaatctacttggtgattttatcccagtgttgttaatcaagcttgtgtgattgttaagtaaagggcatcaatgagactattattattatggtaccttgtaagttaacctgtttgttaattgtcattataatatttggcaacctgtatgtggtcaagcggggggaacaggccatgtgccgggtgatggggaatccattagtat

SEQ ID NO: 11114 - DNA, 3818 bp, Zea Mays
tttattgaggtacctccctcctgagattggttccctcaagaagctccaagaacttgacctctctttcaacaaattgaaaaactttcctaactgtataattgagttgagtgcattgaagtttctcaaagtgaccaataataagttggtggatgtaccctcgggaatctcctctttgagatgtcttgaaagccttgacttatcaaacaacagattgacttctcttggttcagttaaacttatttctatgcttacgctgcagtatttaaaccttcagtttaataggctctcccattcctatgtaattccttcatggatatgctgtgacatgaggggaaatgttgaaaatactatgaagggttgcaagttaaagtacacaggtgtagcaaccatgaacagtttagcagaacctagtacatcgagtcatgcttgtgacagcgcccttttatgcgtgcaatcagaatcttcgccaaatttgaaacaccatgctccacataaaattaagaagggctggaggagacgggattgcttgcaacaacgagctcgtcaggaacgtctggagtcgagcaggagcaagctgaatgaaaaatacatagatgaaatggctgtgaacatggctgaagatgaatgcccttctagtttgcatgatatggaaaataagctaggcatcagaacaattgatgaagaaacttcagtacaggattcgttgaaagaaacaagttctatatctgaagatctattttcaatagttgacgatgacttggatgggcttacgaaggattgtggcacgatggtacaggatcactatgatgaggagaaacctggattcaatatgagaggttacaatgatgacaattcttgtatcagtggggagcctgcttgtttcagcagaagcagggtttgcagtgttgaaaaggaactagatgatactgcttcatccgtccatgatgttggtgagattgctcgagacaattcttcagtgacacccaagtttgctttaaaatctaaaaggcaccctgatatggacagcaatcctaaaccaagcaaatgccctcgaccaattgatgaacgctcaaaactttcatataaatacagtgtggaatcattttgcagcatagatgaccatctaccagatggtttttatgatgcaggccgagatatgccattcatgtcattagaggagtatgaaaggagtcttgggctgtatgcacgggaggttattctcttggacagagaacaagatgaagaattggatacaattgcttcttcagcacaattactgctatctagtttgacaaggccaagctcttgtgaaatggaggaagatgcaggccatgatttactgagggcatcagtgctcgctttgtttgtttctgactgctttggtggttgtgaccgaagcgcttctcttgggagaacacgtagagctattgttagcttgaggaaggagcagccttttgtttgtacttgttctgctgggaacttgggcgacaacaatgaagctaagcagaccaatattctttctgggcactttgattttgctggtttgtgtaatagatcaatacatctcatcaaggaaagaagaaattcgggtattgtacctataggttcactgcaattaggtgtttgtaggcaccgagctgtcctaatgaagtatttgtgtgaccgggcggatcctccaattccttgtgagcttgtgaggggccatcttgactatacacctcatgcttggaacattgttcctgttaaaaagaggaatggctgggtaaggatgattgttgatgcttgttaccccaccaacataaaggaagagacagatccagagtacttttgcaggtatataccactcagtcgacttcaaattgtgctcgatgatgagggctatactcctcggtgctctttcccatctgtgtcatcatgcaaagaaattgaagttacaccttctagttctgtctatcactgtaaaattggtgctgttgatgctgctgcaaagatacgatatctggatactcgtagggtctcaaatgatgaagttaaactttttgaatacaagcttctgggggaagtaaggatgctgggtgcgctaaggaagcacagatccatagtggacatatatggacaccaactttcatctaaatgggttcaagtcgatggtgataaagaatataggatattgcagtctataattttaatggaatatgtaaatggaggttctcttaagggatatttgacaaagctactgaaggagggcaagaagtgtgtccccattgatctgtcagtttacattgctcgggaagttgcttgtgcattgttggagatgcacaagaagctagttattcacagggacataaaaagtgagaatgttttgattgatttggaccccaagaggaatgctggtgcacccattgtcaaactatctgattttgacagatccgttcctttgtattctttgtcccatacatgctgtatatctcagcttggtacacacccacctgatgtttgtgttggaacaccttgttggatggctccagaggttgttaaggccatgcatgaaaaacaccactatggactggaaatagatatctggtcatttggatgttttttattggagatgcttacgcttcagatgccttaccagggactttctgacactgaaatatatgatctgatactgaggaagaaacagaggccaaggctaactcaggaactagaagcattctggacaatggatgagccagctacgagactcaagttagggatcacatctgatgctcatgcagataaattgagacacctgatagatctcttctaccagtgtaccagaggacatgcatccaggcggcccaaagctgtgcaaatttacaactcactgtgctccttgcccacatgttacgacatgaggtgaacgttctgatactgtatgaacgcgaaacttgatgcagaagtgcaggggaaggtcaaggcaggacatctagccagcctcagagggtttggtgctctaacccgaacatttcaccgtgagttggccttcaggtgctgccaggcagaacatgagaagtgggaccaaggctagcggctgtggtcgccagagctcctcctgagttggtcagttttgtagcggcacggcatctgcgtccacttgtagtcatcatcagttggtcagttttgtagtggcacggcatctgcgtccacctgtagtcatcatcatgtatgtgttatcacatccattgtttccccttttcatggttgctgccatcacaatggggtttaagttatcaaattaggtcattggtgccccaggggcatttgtctgctagaccgctgcatttacttctctatgtgtattgtattgtttatatctgtttagaaaaaaatgactgttgtccatgtaacaattgatgacatctgctatgtgttattgcgaggttatttgtttatgctgattttaccagccattttcgggcatgagctcttgggaaacctgtatcgtgtacagtctcgacagacaagaatatactgatgaatcttgatttatgtgtcagtcttttcaccatttattatatatatgctcgcctacatttaaaacttagtttgttactttcttttttattaaggtcgacacaaattgattaaattcgttaagatgcgcttgaatacatataacttccggcatacgaatagtataagacgttatttgagacagagcttattagtaagactcttggtcatatataacttcttttttttccacaattttaccgcagactttatattcattacttcacgcaaaacatcaaaagataaacggatctgtaatgtgg

SEQ ID NO: 11115 - DNA, 4325 bp, Zea Mays
gccgtatcacgcgttcctctcctttttcttttccttattacagacaaagacttttcccactcccgttctctgtctctctcctgctcgttccccctttgtctagcccgtacgaaaccctaggctccgccgcccaaaacctcgccgccgcgccgccgtacggcggcgccccatggccccggccttctccgtccctgacgcagaagacctcccagcccgcagatccgacgcctccgacgtcgcaggcaacgtctgggacctcgccaccctccccacgccccccgccggcggcggccgcgaaatatacatctaccgcaacacgtttaacctcgtcccgcgctccatcggcggcagagcccgcggtctcaggtcgcttaagttcttcggcaacgatgtggaggtgctacccgcggattccggggacgagctggacgggctcgaaagcctccaggtcaaggtgtccgcgcccagggtctcaggggcgccgctccgtcggatgcaggctctcaaggagctcgagctctcaatggtgccgcccaggccatcctcgtgctccatactggcggaggttgcccggctcaagtgcctcaccaagctcaccatttgccacttctcgattaggtacctccctcctgagattggttccctcaagaagctccaagaacttgacctctctttcaacaaattgaaaaactttcctaactgtataattgagttgagtgcattgaagtttctcaaagtgaccaataataagttggtggatgtaccctcgggaatctcctctttgagatgtcttgaaagccttgacttatcaaacaacagattgacttctcttggttcagttaaacttatttctatgcttacgctgcagtatttaaaccttcagtttaataggctctcccattcctatgtaattccttcatggatatgctgtgacatgaggggaaatgttgaaaatactatgaagggttgcaagttaaagtacacaggtgtagcaaccatgaacagtttagcagaacctagtacatcgagtcatgcttgtgacagcgcccttttatgcgtgcaatcagaatcttcgccaaatttgaaacaccatgctccacataaaattaagaagggctggaggagacgggattgcttgcaacaacgagctcgtcaggaacgtctggagtcgagcaggagcaagctgaatgaaaaatacatagatgaaatggctgtgaacatggctgaagatgaatgcccttctagtttgcatgatatggaaaataagctaggcatcagaacaattgatgaagaaacttcagtacaggattcgttgaaagaaacaagttctatatctgaagatctattttcaatagttgacgatgacttggatgggcttacgaaggattgtggcacgatggtacaggatcactatgatgaggagaaacctggattcaatatgagaggttacaatgatgacaattcttgtatcagtggggagcctgcttgtttcagcagaagcagggtttgcagtgttgaaaaggaactagatgatactgcttcatccgtccatgatgttggtgagattgctcgagacaattcttcagtgacacccaagtttgctttaaaatctaaaaggcaccctgatatggacagcaatcctaaaccaagcaaatgccctcgaccaattgatgaacgctcaaaactttcatataaatacagtgtggaatcattttgcagcatagatgaccatctaccagatggtttttatgatgcaggccgagatatgccattcatgtcattagaggagtatgaaaggagtcttgggctgtatgcacgggaggttattctcttggacagagaacaagatgaagaattggatacaattgcttcttcagcacaattactgctatctagtttgacaaggccaagctcttgtgaaatggaggaagatgcaggccatgatttactgagggcatcagtgctcgctttgtttgtttctgactgctttggtggttgtgaccgaagcgcttctcttgggagaacacgtagagctattgttagcttgaggaaggagcagccttttgtttgtacttgttctgctgggaacttgggcgacaacaatgaagctaagcagaccaatattctttctgggcactttgattttgctggtttgtgtaatagatcaatacatctcatcaaggaaagaagaaattcgggtattgtacctataggttcactgcaattaggtgtttgtaggcaccgagctgtcctaatgaagtatttgtgtgaccgggcggatcctccaattccttgtgagcttgtgaggggccatcttgactatacacctcatgcttggaacattgttcctgttaaaaagaggaatggctgggtaaggatgattgttgatgcttgttaccccaccaacataaaggaagagacagatccagagtacttttgcaggtatataccactcagtcgacttcaaattgtgctcgatgatgagggctatactcctcggtgctctttcccatctgtgtcatcatgcaaagaaattgaagttacaccttctagttctgtctatcactgtaaaattggtgctgttgatgctgctgcaaagatacgatatctggatactcgtagggtctcaaatgatgaagttaaactttttgaatacaagcttctgggggaagtaaggatgctgggtgcgctaaggaagcacagatccatagtggacatatatggacaccaactttcatctaaatgggttcaagtcgatggtgataaagaatataggatattgcagtctataattttaatggaatatgtaaatggaggttctcttaagggatatttgacaaagctactgaaggagggcaagaagtgtgtccccattgatctgtcagtttacattgctcgggaagttgcttgtgcattgttggagatgcacaagaagctagttattcacagggacataaaaagtgagaatgttttgattgatttggaccccaagaggaatgctggtgcacccattgtcaaactatctgattttgacagatccgttcctttgtattctttgtcccatacatgctgtatatctcagcttggtacacacccacctgatgtttgtgttggaacaccttgttggatggctccagaggttgttaaggccatgcatgaaaaacaccactatggactgaggaagaaacagaggccaaggctaactcaggaactagaagcattctggacaatggatgagccagctacgagactcaagttagggatcacatctgatgctcatgcagataaattgagacacctgatagatctcttctaccagtgtaccagaggacatgcatccaggcggcccaaagctgtgcaaatttacaactcactgtgctccttgcccacatgttacgacatgaggtgaacgttctgatactgtatgaacgcgaaacttgatgcagaagtgcaggggaaggtcaaggcaggacatctagccagcctcagagggtttggtgctctaacccgaacatttcaccgtgagttggccttcaggtgctgccaggcagaacatgagaagtgggaccaaggctagcggctgtggtcgccagagctcctcctgagttggtcagttttgtagcggcacggcatctgcgtccacttgtagtcatcatcagttggtcagttttgtagtggcacggcatctgcgtccacctgtagtcatcatcatgtatgtgttatcacatccattgtttccccttttcatggttgctgccatcacaatggggtttaagttatcaaattaggtcattggtgccccaggggcatttgtctgctagaccgctgcatttacttctctatgtgtattgtattgtttatatctgtttagaaaaaaatgactgttgtccatgtaacaattgatgacatctgctatgtgttattgcgaggttatttgtttatgctgattttaccagccattttcgggcatgagctcttgggaaacctgtatcgtgtacagtctcgacagacaagaatatactgatgaatcttgatttatgtgtcagtcttttcaccatttattatatatatgctcgcctacatttaaaacttagtttgttactttcttttttattaaggtcgacacaaattgattaaattcgttaagatgcgcttgaatacatataacttccggcatacgaatagtataagacgttatttgagacagagcttattagtaagactcttggtcatatataacttcttttttttccacaattttaccgcagactttatattcattacttcacgcaaaacatcaaaagataaacggatctgtaatgtgg

SEQ ID NO: 11116 - DNA, 4476 bp, Zea Mays
tcggcttggagtttcgtcttccctttctcggactccgagtcccatctggccatcacgccgtatcacgcgttcctctcctttttcttttccttattacagacaaagacttttcccactcccgttctctgtctctctcctgctcgttccccctttgtctagcccgtacgaaaccctaggctccgccgcccaaaacctcgccgccgcgccgccgtacggcggcgccccatggccccggccttctccgtccctgacgcagaagacctcccagcccgcagatccgacgcctccgacgtcgcaggcaacgtctgggacctcgccaccctccccacgccccccgccggcggcggccgcgaaatatacatctaccgcaacacgtttaacctcgtcccgcgctccatcggcggcagagcccgcggtctcaggtcgcttaagttcttcggcaacgatgtggaggtgctacccgcggattccggggacgagctggacgggctcgaaagcctccaggtcaaggtgtccgcgcccagggtctcaggggcgccgctccgtcggatgcaggctctcaaggagctcgagctctcaatggtgccgcccaggccatcctcgtgctccatactggcggaggttgcccggctcaagtgcctcaccaagctcaccatttgccacttctcgattaggtacctccctcctgagattggttccctcaagaagctccaagaacttgacctctctttcaacaaattgaaaaactttcctaactgtataattgagttgagtgcattgaagtttctcaaagtgaccaataataagttggtggatgtaccctcgggaatctcctctttgagatgtcttgaaagccttgacttatcaaacaacagattgacttctcttggttcagttaaacttatttctatgcttacgctgcagtatttaaaccttcagtttaataggctctcccattcctatgtaattccttcatggatatgctgtgacatgaggggaaatgttgaaaatactatgaagggttgcaagttaaagtacacaggtgtagcaaccatgaacagtttagcagaacctagtacatcgagtcatgcttgtgacagcgcccttttatgcgtgcaatcagaatcttcgccaaatttgaaacaccatgctccacataaaattaagaagggctggaggagacgggattgcttgcaacaacgagctcgtcaggaacgtctggagtcgagcaggagcaagctgaatgaaaaatacatagatgaaatggctgtgaacatggctgaagatgaatgcccttctagtttgcatgatatggaaaataagctaggcatcagaacaattgatgaagaaacttcagtacaggattcgttgaaagaaacaagttctatatctgaagatctattttcaatagttgacgatgacttggatgggcttacgaaggattgtggcacgatggtacaggatcactatgatgaggagaaacctggattcaatatgagaggttacaatgatgacaattcttgtatcagtggggagcctgcttgtttcagcagaagcagggtttgcagtgttgaaaaggaactagatgatactgcttcatccgtccatgatgttggtgagattgctcgagacaattcttcagtgacacccaagtttgctttaaaatctaaaaggcaccctgatatggacagcaatcctaaaccaagcaaatgccctcgaccaattgatgaacgctcaaaactttcatataaatacagtgtggaatcattttgcagcatagatgaccatctaccagatggtttttatgatgcaggccgagatatgccattcatgtcattagaggagtatgaaaggagtcttgggctgtatgcacgggaggttattctcttggacagagaacaagatgaagaattggatacaattgcttcttcagcacaattactgctatctagtttgacaaggccaagctcttgtgaaatggaggaagatgcaggccatgatttactgagggcatcagtgctcgctttgtttgtttctgactgctttggtggttgtgaccgaagcgcttctcttgggagaacacgtagagctattgttagcttgaggaaggagcagccttttgtttgtacttgttctgctgggaacttgggcgacaacaatgaagctaagcagaccaatattctttctgggcactttgattttgctggtttgtgtaatagatcaatacatctcatcaaggaaagaagaaattcgggtattgtacctataggttcactgcaattaggtgtttgtaggcaccgagctgtcctaatgaagtatttgtgtgaccgggcggatcctccaattccttgtgagcttgtgaggggccatcttgactatacacctcatgcttggaacattgttcctgttaaaaagaggaatggctgggtaaggatgattgttgatgcttgttaccccaccaacataaaggaagagacagatccagagtacttttgcaggtatataccactcagtcgacttcaaattgtgctcgatgatgagggctatactcctcggtgctctttcccatctgtgtcatcatgcaaagaaattgaagttacaccttctagttctgtctatcactgtaaaattggtgctgttgatgctgctgcaaagatacgatatctggatactcgtagggtctcaaatgatgaagttaaactttttgaatacaagcttctgggggaagtaaggatgctgggtgcgctaaggaagcacagatccatagtggacatatatggacaccaactttcatctaaatgggttcaagtcgatggtgataaagaatataggatattgcagtctataattttaatggaatatgtaaatggaggttctcttaagggatatttgacaaagctactgaaggagggcaagaagtgtgtccccattgatctgtcagtttacattgctcgggaagttgcttgtgcattgttggagatgcacaagaagctagttattcacagggacataaaaagtgagaatgttttgattgatttggaccccaagaggaatgctggtgcacccattgtcaaactatctgattttgacagatccgttcctttgtattctttgtcccatacatgctgtatatctcagcttggtacacacccacctgatgtttgtgttggaacaccttgttggatggctccagaggttgttaaggccatgcatgaaaaacaccactatggactgatatctggtcatttggatgttttttattggagatgcttacgcttcagatgccttaccagggactttctgacactgaaatatatgatctgatactgaggaagaaacagaggccaaggctaactcaggaactagaagcattctggacaatggatgagccagctacgagactcaagttagggatcacatctgatgctcatgcagataaattgagacacctgatagatctcttctaccagtgtaccagaggacatgcatccaggcggcccaaagctgtgcaaatttacaactcactgtgctccttgcccacatgttacgacatgaggtgaacgttctgatactgtatgaacgcgaaacttgatgcagaagtgcaggggaaggtcaaggcaggacatctagccagcctcagagggtttggtgctctaacccgaacatttcaccgtgagttggccttcaggtgctgccaggcagaacatgagaagtgggaccaaggctagcggctgtggtcgccagagctcctcctgagttggtcagttttgtagcggcacggcatctgcgtccacttgtagtcatcatcagttggtcagttttgtagtggcacggcatctgcgtccacctgtagtcatcatcatgtatgtgttatcacatccattgtttccccttttcatggttgctgccatcacaatggggtttaagttatcaaattaggtcattggtgccccaggggcatttgtctgctagaccgctgcatttacttctctatgtgtattgtattgtttatatctgtttagaaaaaaatgactgttgtccatgtaacaattgatgacatctgctatgtgttattgcgaggttatttgtttatgctgattttaccagccattttcgggcatgagctcttgggaaacctgtatcgtgtacagtctcgacagacaagaatatactgatgaatcttgatttatgtgtcagtcttttcaccatttattatatatatgctcgcctacatttaaaacttagtttgttactttcttttttattaaggtcgacacaaattgattaaattcgttaagatgcgcttgaatacatataacttccggcatacgaatagtataagacgttatttgagacagagcttattagtaagactcttggtcatatataacttcttttttttccacaattttaccgcagactttatattcattacttcacgcaaaacatcaaaagataaacggatctgtaatgtgg

SEQ ID NO: 11117 - DNA, 4562 bp, Zea Mays
caaggctcggcttggagtttcgtcttccctttctcggactccgagtcccatctggccatcacgccgtatcacgcgttcctctcctttttcttttccttattacagacaaagacttttcccactcccgttctctgtctctctcctgctcgttccccctttgtctagcccgtacgaaaccctaggctccgccgcccaaaacctcgccgccgcgccgccgtacggcggcgccccatggccccggccttctccgtccctgacgcagaagacctcccagcccgcagatccgacgcctccgacgtcgcaggcaacgtctgggacctcgccaccctccccacgccccccgccggcggcggccgcgaaatatacatctaccgcaacacgtttaacctcgtcccgcgctccatcggcggcagagcccgcggtctcaggtcgcttaagttcttcggcaacgatgtggaggtgctacccgcggattccggggacgagctggacgggctcgaaagcctccaggtcaaggtgtccgcgcccagggtctcaggggcgccgctccgtcggatgcaggctctcaaggagctcgagctctcaatggtgccgcccaggccatcctcgtgctccatactggcggaggttgcccggctcaagtgcctcaccaagctcaccatttgccacttctcgattaggtacctccctcctgagattggttccctcaagaagctccaagaacttgacctctctttcaacaaattgaaaaactttcctaactgtataattgagttgagtgcattgaagtttctcaaagtgaccaataataagttggtggatgtaccctcgggaatctcctctttgagatgtcttgaaagccttgacttatcaaacaacagattgacttctcttggttcagttaaacttatttctatgcttacgctgcagtatttaaaccttcagtttaataggctctcccattcctatgtaattccttcatggatatgctgtgacatgaggggaaatgttgaaaatactatgaagggttgcaagttaaagtacacaggtgtagcaaccatgaacagtttagcagaacctagtacatcgagtcatgcttgtgacagcgcccttttatgcgtgcaatcagaatcttcgccaaatttgaaacaccatgctccacataaaattaagaagggctggaggagacgggattgcttgcaacaacgagctcgtcaggaacgtctggagtcgagcaggagcaagctgaatgaaaaatacatagatgaaatggctgtgaacatggctgaagatgaatgcccttctagtttgcatgatatggaaaataagctaggcatcagaacaattgatgaagaaacttcagtacaggattcgttgaaagaaacaagttctatatctgaagatctattttcaatagttgacgatgacttggatgggcttacgaaggattgtggcacgatggtacaggatcactatgatgaggagaaacctggattcaatatgagaggttacaatgatgacaattcttgtatcagtggggagcctgcttgtttcagcagaagcagggtttgcagtgttgaaaaggaactagatgatactgcttcatccgtccatgatgttggtgagattgctcgagacaattcttcagtgacacccaagtttgctttaaaatctaaaaggcaccctgatatggacagcaatcctaaaccaagcaaatgccctcgaccaattgatgaacgctcaaaactttcatataaatacagtgtggaatcattttgcagcatagatgaccatctaccagatggtttttatgatgcaggccgagatatgccattcatgtcattagaggagtatgaaaggagtcttgggctgtatgcacgggaggttattctcttggacagagaacaagatgaagaattggatacaattgcttcttcagcacaattactgctatctagtttgacaaggccaagctcttgtgaaatggaggaagatgcaggccatgatttactgagggcatcagtgctcgctttgtttgtttctgactgctttggtggttgtgaccgaagcgcttctcttgggagaacacgtagagctattgttagcttgaggaaggagcagccttttgtttgtacttgttctgctgggaacttgggcgacaacaatgaagctaagcagaccaatattctttctgggcactttgattttgctggtttgtgtaatagatcaatacatctcatcaaggaaagaagaaattcgggtattgtacctataggttcactgcaattaggtgtttgtaggcaccgagctgtcctaatgaagtatttgtgtgaccgggcggatcctccaattccttgtgagcttgtgaggggccatcttgactatacacctcatgcttggaacattgttcctgttaaaaagaggaatggctgggtaaggatgattgttgatgcttgttaccccaccaacataaaggaagagacagatccagagtacttttgcagcttatggtaggggtctgatgatctagtgttgcatgcacattagtcttgctgtttcagggaggcgcggacacaagtatataccactcagtcgacttcaaattgtgctcgatgatgagggctatactcctcggtgctctttcccatctgtgtcatcatgcaaagaaattgaagttacaccttctagttctgtctatcactgtaaaattggtgctgttgatgctgctgcaaagatacgatatctggatactcgtagggtctcaaatgatgaagttaaactttttgaatacaagcttctgggggaagtaaggatgctgggtgcgctaaggaagcacagatccatagtggacatatatggacaccaactttcatctaaatgggttcaagtcgatggtgataaagaatataggatattgcagtctataattttaatggaatatgtaaatggaggttctcttaagggatatttgacaaagctactgaaggagggcaagaagtgtgtccccattgatctgtcagtttacattgctcgggaagttgcttgtgcattgttggagatgcacaagaagctagttattcacagggacataaaaagtgagaatgttttgattgatttggaccccaagaggaatgctggtgcacccattgtcaaactatctgattttgacagatccgttcctttgtattctttgtcccatacatgctgtatatctcagcttggtacacacccacctgatgtttgtgttggaacaccttgttggatggctccagaggttgttaaggccatgcatgaaaaacaccactatggactggaaatagatatctggtcatttggatgttttttattggagatgcttacgcttcagatgccttaccagggactttctgacactgaaatatatgatctgatactgaggaagaaacagaggccaaggctaactcaggaactagaagcattctggacaatggatgagccagctacgagactcaagttagggatcacatctgatgctcatgcagataaattgagacacctgatagatctcttctaccagtgtaccagaggacatgcatccaggcggcccaaagctgtgcaaatttacaactcactgtgctccttgcccacatgttacgacatgaggtgaacgttctgatactgtatgaacgcgaaacttgatgcagaagtgcaggggaaggtcaaggcaggacatctagccagcctcagagggtttggtgctctaacccgaacatttcaccgtgagttggccttcaggtgctgccaggcagaacatgagaagtgggaccaaggctagcggctgtggtcgccagagctcctcctgagttggtcagttttgtagcggcacggcatctgcgtccacttgtagtcatcatcagttggtcagttttgtagtggcacggcatctgcgtccacctgtagtcatcatcatgtatgtgttatcacatccattgtttccccttttcatggttgctgccatcacaatggggtttaagttatcaaattaggtcattggtgccccaggggcatttgtctgctagaccgctgcatttacttctctatgtgtattgtattgtttatatctgtttagaaaaaaatgactgttgtccatgtaacaattgatgacatctgctatgtgttattgcgaggttatttgtttatgctgattttaccagccattttcgggcatgagctcttgggaaacctgtatcgtgtacagtctcgacagacaagaatatactgatgaatcttgatttatgtgtcagtcttttcaccatttattatatatatgctcgcctacatttaaaacttagtttgttactttcttttttattaaggtcgacacaaattgattaaattcgttaagatgcgcttgaatacatataacttccggcatacgaatagtataagacgttatttgagacagagcttattagtaagactcttggtcatatataacttcttttttttccacaattttaccgcagactttatattcattacttcacgcaaaacatcaaaagataaacggatctgtaatgtgg

SEQ ID NO: 11118 - DNA, 4634 bp, Zea Mays
gcagcctaccgtgaaggcaaggctcggcttggagtttcgtcttccctttctcggactccgagtcccatctggccatcacgccgtatcacgcgttcctctcctttttcttttccttattacagacaaagacttttcccactcccgttctctgtctctctcctgctcgttccccctttgtctagcccgtacgaaaccctaggctccgccgcccaaaacctcgccgccgcgccgccgtacggcggcgccccatggccccggccttctccgtccctgacgcagaagacctcccagcccgcagatccgacgcctccgacgtcgcaggcaacgtctgggacctcgccaccctccccacgccccccgccggcggcggccgcgaaatatacatctaccgcaacacgtttaacctcgtcccgcgctccatcggcggcagagcccgcggtctcaggtcgcttaagttcttcggcaacgatgtggaggtgctacccgcggattccggggacgagctggacgggctcgaaagcctccaggtcaaggtgtccgcgcccagggtctcaggggcgccgctccgtcggatgcaggctctcaaggagctcgagctctcaatggtgccgcccaggccatcctcgtgctccatactggcggaggttgcccggctcaagtgcctcaccaagctcaccatttgccacttctcgattaggtacctccctcctgagattggttccctcaagaagctccaagaacttgacctctctttcaacaaattgaaaaactttcctaactgtataattgagttgagtgcattgaagtttctcaaagtgaccaataataagttggtggatgtaccctcgggaatctcctctttgagatgtcttgaaagccttgacttatcaaacaacagattgacttctcttggttcagttaaacttatttctatgcttacgctgcagtatttaaaccttcagtttaataggctctcccattcctatgtaattccttcatggatatgctgtgacatgaggggaaatgttgaaaatactatgaagggttgcaagttaaagtacacaggtgtagcaaccatgaacagtttagcagaacctagtacatcgagtcatgcttgtgacagcgcccttttatgcgtgcaatcagaatcttcgccaaatttgaaacaccatgctccacataaaattaagaagggctggaggagacgggattgcttgcaacaacgagctcgtcaggaacgtctggagtcgagcaggagcaagctgaatgaaaaatacatagatgaaatggctgtgaacatggctgaagatgaatgcccttctagtttgcatgatatggaaaataagctaggcatcagaacaattgatgaagaaacttcagtacaggattcgttgaaagaaacaagttctatatctgaagatctattttcaatagttgacgatgacttggatgggcttacgaaggattgtggcacgatggtacaggatcactatgatgaggagaaacctggattcaatatgagaggttacaatgatgacaattcttgtatcagtggggagcctgcttgtttcagcagaagcagggtttgcagtgttgaaaaggaactagatgatactgcttcatccgtccatgatgttggtgagattgctcgagacaattcttcagtgacacccaagtttgctttaaaatctaaaaggcaccctgatatggacagcaatcctaaaccaagcaaatgccctcgaccaattgatgaacgctcaaaactttcatataaatacagtgtggaatcattttgcagcatagatgaccatctaccagatggtttttatgatgcaggccgagatatgccattcatgtcattagaggagtatgaaaggagtcttgggctgtatgcacgggaggttattctcttggacagagaacaagatgaagaattggatacaattgcttcttcagcacaattactgctatctagtttgacaaggccaagctcttgtgaaatggaggaagatgcaggccatgatttactgagggcatcagtgctcgctttgtttgtttctgactgctttggtggttgtgaccgaagcgcttctcttgggagaacacgtagagctattgttagcttgaggaaggagcagccttttgtttgtacttgttctgctgggaacttgggcgacaacaatgaagctaagcagaccaatattctttctgggcactttgattttgctggtttgtgtaatagatcaatacatctcatcaaggaaagaagaaattcgggtattgtacctataggttcactgcaattaggtgtttgtaggcaccgagctgtcctaatgaagtatttgtgtgaccgggcggatcctccaattccttgtgagcttgtgaggggccatcttgactatacacctcatgcttggaacattgttcctgttaaaaagaggaatggctgggtaaggatgattgttgatgcttgttaccccaccaacataaaggaagagacagatccagagtacttttgcaggaactgatggttattgctggtagatactcttttaatcctttattattttggtcagcttatggtaggggtctgatgatctagtgttgcatgcacattagtcttgctgtttcagggaggcgcggacacaagtatataccactcagtcgacttcaaattgtgctcgatgatgagggctatactcctcggtgctctttcccatctgtgtcatcatgcaaagaaattgaagttacaccttctagttctgtctatcactgtaaaattggtgctgttgatgctgctgcaaagatacgatatctggatactcgtagggtctcaaatgatgaagttaaactttttgaatacaagcttctgggggaagtaaggatgctgggtgcgctaaggaagcacagatccatagtggacatatatggacaccaactttcatctaaatgggttcaagtcgatggtgataaagaatataggatattgcagtctataattttaatggaatatgtaaatggaggttctcttaagggatatttgacaaagctactgaaggagggcaagaagtgtgtccccattgatctgtcagtttacattgctcgggaagttgcttgtgcattgttggagatgcacaagaagctagttattcacagggacataaaaagtgagaatgttttgattgatttggaccccaagaggaatgctggtgcacccattgtcaaactatctgattttgacagatccgttcctttgtattctttgtcccatacatgctgtatatctcagcttggtacacacccacctgatgtttgtgttggaacaccttgttggatggctccagaggttgttaaggccatgcatgaaaaacaccactatggactggaaatagatatctggtcatttggatgttttttattggagatgcttacgcttcagatgccttaccagggactttctgacactgaaatatatgatctgatactgaggaagaaacagaggccaaggctaactcaggaactagaagcattctggacaatggatgagccagctacgagactcaagttagggatcacatctgatgctcatgcagataaattgagacacctgatagatctcttctaccagtgtaccagaggacatgcatccaggcggcccaaagctgtgcaaatttacaactcactgtgctccttgcccacatgttacgacatgaggtgaacgttctgatactgtatgaacgcgaaacttgatgcagaagtgcaggggaaggtcaaggcaggacatctagccagcctcagagggtttggtgctctaacccgaacatttcaccgtgagttggccttcaggtgctgccaggcagaacatgagaagtgggaccaaggctagcggctgtggtcgccagagctcctcctgagttggtcagttttgtagcggcacggcatctgcgtccacttgtagtcatcatcagttggtcagttttgtagtggcacggcatctgcgtccacctgtagtcatcatcatgtatgtgttatcacatccattgtttccccttttcatggttgctgccatcacaatggggtttaagttatcaaattaggtcattggtgccccaggggcatttgtctgctagaccgctgcatttacttctctatgtgtattgtattgtttatatctgtttagaaaaaaatgactgttgtccatgtaacaattgatgacatctgctatgtgttattgcgaggttatttgtttatgctgattttaccagccattttcgggcatgagctcttgggaaacctgtatcgtgtacagtctcgacagacaagaatatactgatgaatcttgatttatgtgtcagtcttttcaccatttattatatatatgctcgcctacatttaaaacttagtttgttactttcttttttattaaggtcgacacaaattgattaaattcgttaagatgcgcttgaatacatataacttccggcatacgaatagtataagacgttatttgagacagagcttattagtaagactcttggtcatatataacttcttttttttccacaattttaccgcagactttatattcattacttcacgcaaaacatcaaaagataaacggatctgtaatgtgg

SEQ ID NO: 11119 - DNA, 3172 bp, Zea Mays
ctcctctattatcttagatttaggattttactgttagagcagctccaacaatatctcaaactattgcctcaaattgaaatatatgactctacacaggaaaaactatatcaacggtgcctcattttgtaaaattttgtcgaaaacatatagggcacactctcaagtgcctcaaatatactacaccctagtgggttgtcctataatctagaattaatgtcacacctgggttttagggaccaaaacctgggcgcgaaataatcaccaagtgtgctaggaacaagtctcacacatatgatgattcatggtacaaaaaagaatgtcacatctataatatataacggagttctatacaaaatagttaaataattacatcatacgaagacaatgatccagcaaccaaagttgactgggagacgacggcctagaccactcacgaactcatcacagcatccggcatgcgcctcctcctgcggtaccaattcttgacctggggggatgtgagtacagcaagggtgagctcacatacgtttatcgctcaacaagttgtaggggataatgtgcatgaactcaccaaatatgggagctcatgtgtagtgtaaggcttaccaaaggagatagttaaagctgatcattgcttttaaagttggtcaaaaatttattagcagttactaagtgtaagtagataccaatccaaataaataagagatcaaaattaataacaacacccacaatgcagtgcaaatggcaaattaagtttaattctataatttaatcatgtgagtgtccgagccgctcatgaccgtgagcacgactgatataccagttttacactctacagaggttgcatatctttacccacaagtcgtgttactcatttgtcatggggttgatcggacccaatacatctctacagaggaagcgaggcagggtagcactatgaagcctttctgaaagtcgcctagaggggggtggataggcggaaactgaaattcacaaacttaaacacactacaagccagggttagcgttagaataaaatccaagtccgggagaggggaaaacaaatcaaccaagaaaataaagaggatgacacggtgatttgttttaccgaggttcggttctaaagaacctaatccccgttgaggtggtcacaaagaccgggtctctttcaaccttttccctctctcaaacggtcacttagaccgagtgaggcttcttctttaatctcatgggtcacttagaccccacaaggatcaccacacaattggtgtctcttgcctcgcttacaaagcactcgagagtaagaagtgagaaagaaaagaaagccaagccaagcaaacaagagcaacaaagaaacacaaatgatcatctcacaagtctaaatgtgctagagttgaattggagactttgagcggatcgatcacttgaattgtgtctttggagtggagtctattgctcttgtattgaatgagaagtagtgaatgcttggatggttggagtcgaggtggttcgggggatttatagccctcaaccaccaattcaatcgttggggtaggctgctgtcgatgggcgcaccggacagtccggtgccacaccggacatgcactgttcattgtccggtgcgcctctgacttctgccgcaaactgtagcgttatcagggcactgtgcagtcgaccgttgcgctagagagccgttgctccgctggtgcaccggacagtccagtgaattatagcggagcggcgtctgagaaacccgaagctgaagagtttggagttgtacggcctagtgcaccgagcacagtccggtgcgccagaccagagcacactttgatttcttttgctcctttcttttgaaccctaactttgatcttttattggtttgtgttgaacctttatgcacctgtagaatatataatctagagcaaactagttagtccaattatttgtgttgggcattcaaccaccaaaatcatttataggaaaaggttaaatctcatttccctttcactttccaaagttccactagttcaagaaaacctgctatggattcaagacgaaggaagcataggaatccctcgtccaaaaaactttatagacagttcaatccgaggacctccctatactctagcagtgatgcctctccgcttgcccctttcgggtaaggtaatctctccctagttttcctaattacttggccaagggcgtcccattccacctttgtggtagcactgtttttccgggtggttctccatattccaattaacatgatgatcttatcatgaacaataattaaaacaacaacataattaaaacatgattataataaaacattagtttcccaaaaccaagtatagcaataacaaatctacccaatagttcatttgtttgcaatatgggggataaacaatgctagggaaacctattaggtcccatcaatttaacctgagcatgtcacagtgattaatggaaacattattaggtagaaaaaatgatcaaatgcataacttgccttagactcgaggttcccaggtaccaacttggtcttctataggcaaaattaacatcacaccaaacataagaacaaactgcataataatgttctacgcatcgtaacaagatcctaggttcgagaaccactgagttcggatttacagctaaagaattatgatttaccaaagatttaggtgttagatataaaacaaattaattgtataattctaacctatatttcataacaatataaggttactacatgataaacaatattaatatgaatctaatgcaactggaatggataaaaaggagttaaaatgaattaaatatgaattaaacaagtttctgaaattatttttatactagaaatcattttatatattaatttactcaatttatttcatccctggatcgcacgcaggaatcccaaaaagctcgggttcagttcatgaatttcaggactcggttgcaattacttcctaacgaatatggacgacgggtttattttataaaaactcagggtctcttttataattctgactggtcgaaggggtacggggctggctgagccgtccaatttgaatctacgacctagattagacgttggtcaagctgaaatggtgtcggttcatctcagccatccgcttaaaaccgacggacccgattctattaacccctat

SEQ ID NO: 11120 - DNA, 1184 bp, Zea Mays
gttttttcacctcatcctgagttatttagtcctagctacggattcaagttccaggtccaatcgtctcatcaggcatataggattgttatccagcataaagagacctcccattattttgtggagacaggcatgggttgtttggtgctgtgaatgacatcttctgcttgttccaagggcatattgagaacattgccaacctgaagcagcattatggcctgagcaagactgcaaatgaggtgactatcctcatagaggcctacaggaccctgagggacaggggccctgtcccagccagccaggttgtgagagaccttagtgggaagttcgcgttcatcctgtatgacaccctgtcgaagtctacctttgttgctgctgacgctgatggtagcatccctttcttctggggcgttgactacgaaaaccaccttgtgttctctgacgatgttgggatcctcaagacaggctgcggcaactcgtacgctccatttcctaaaggttgcttctacaccacctccggtgggctgcagagcttcgagcacccgttgcacgaggtcaaggcggtgccacgcgtggacagccaaggccagatgtgcggctccatcttcaaggtcgacagcgagagcaagaagaagcaggacgctagcatcccccgcgtcggcagtgctgccgactggtccaaccagttctgaccatcttcttgccatccattgtcccggctagtacgaggtgcagagctgtgtatctgatgaatccatgagacgatttctgctacgtttcttgcacgcttgtcgaacactgtgagactcacatcgcgctcatctacgctacgtgtaactgatactaatgatacggagtgttccaggtggtggtagatgtactgcagaatctatctcccatgtttcaataaacctgaataaggtgctcggtttggatctatgcatttatgattctagtacttctgaatcgaattttatcgcatcctttcctttttcttcttgttctcctgttctgcatttcagttctgtctggcggacggttacccgttaccgtggtagttgggcaactgggcatacggttgttaggaccagctcggtccgtgacaaccattgaacaatactgcatgggttctacttagctagggtgtattagactcgtcttattaattaaactattgttacggtttc

SEQ ID NO: 11121 - DNA, 1096 bp, Zea Mays
ccacgccgatttgaggagatatttcttgcgttttgtgtacagaaggttgtttggtgctgtgaatgacatcttctgcttgttccaagggcatattgagaacattgccaacctgaagcagcattatggcctgagcaagactgcaaatgaggtgactatcctcatagaggcctacaggaccctgagggacaggggccctgtcccagccagccaggttgtgagagaccttagtgggaagttcgcgttcatcctgtatgacaccctgtcgaagtctacctttgttgctgctgacgctgatggtagcatccctttcttctggggcgttgactacgaaaaccaccttgtgttctctgacgatgttgggatcctcaagacaggctgcggcaactcgtacgctccatttcctaaaggttgcttctacaccacctccggtgggctgcagagcttcgagcacccgttgcacgaggtcaaggcggtgccacgcgtggacagccaaggccagatgtgcggctccatcttcaaggtcgacagcgagagcaagaagaagcaggacgctagcatcccccgcgtcggcagtgctgccgactggtccaaccagttctgaccatcttcttgccatccattgtcccggctagtacgaggtgcagagctgtgtatctgatgaatccatgagacgatttctgctacgtttcttgcacgcttgtcgaacactgtgagactcacatcgcgctcatctacgctacgtgtaactgatactaatgatacggagtgttccaggtggtggtagatgtactgcagaatctatctcccatgtttcaataaacctgaataaggtgctcggtttggatctatgcatttatgattctagtacttctgaatcgaattttatcgcatcctttcctttttcttcttgttctcctgttctgcatttcagttctgtctggcggacggttacccgttaccgtggtagttgggcaactgggcatacggttgttaggaccagctcggtccgtgacaaccattgaacaatactgcatgggttctacttagctagggtgtattagactcgtcttattaattaaactattgttacggtttc

SEQ ID NO: 11122 - DNA, 1076 bp, Zea Mays
tcggtgatgtgatcacttactggaggttgtttggtgctgtgaatgacatcttctgcttgttccaagggcatattgagaacattgccaacctgaagcagcattatggcctgagcaagactgcaaatgaggtgactatcctcatagaggcctacaggaccctgagggacaggggccctgtcccagccagccaggttgtgagagaccttagtgggaagttcgcgttcatcctgtatgacaccctgtcgaagtctacctttgttgctgctgacgctgatggtagcatccctttcttctggggcgttgactacgaaaaccaccttgtgttctctgacgatgttgggatcctcaagacaggctgcggcaactcgtacgctccatttcctaaaggttgcttctacaccacctccggtgggctgcagagcttcgagcacccgttgcacgaggtcaaggcggtgccacgcgtggacagccaaggccagatgtgcggctccatcttcaaggtcgacagcgagagcaagaagaagcaggacgctagcatcccccgcgtcggcagtgctgccgactggtccaaccagttctgaccatcttcttgccatccattgtcccggctagtacgaggtgcagagctgtgtatctgatgaatccatgagacgatttctgctacgtttcttgcacgcttgtcgaacactgtgagactcacatcgcgctcatctacgctacgtgtaactgatactaatgatacggagtgttccaggtggtggtagatgtactgcagaatctatctcccatgtttcaataaacctgaataaggtgctcggtttggatctatgcatttatgattctagtacttctgaatcgaattttatcgcatcctttcctttttcttcttgttctcctgttctgcatttcagttctgtctggcggacggttacccgttaccgtggtagttgggcaactgggcatacggttgttaggaccagctcggtccgtgacaaccattgaacaatactgcatgggttctacttagctagggtgtattagactcgtcttattaattaaactattgttacggtttc

SEQ ID NO: 11123 - DNA, 1092 bp, Zea Mays
aaaatggtttggttcgtgttcgttcgtgtgcttcggctgaggttgtttggtgctgtgaatgacatcttctgcttgttccaagggcatattgagaacattgccaacctgaagcagcattatggcctgagcaagactgcaaatgaggtgactatcctcatagaggcctacaggaccctgagggacaggggccctgtcccagccagccaggttgtgagagaccttagtgggaagttcgcgttcatcctgtatgacaccctgtcgaagtctacctttgttgctgctgacgctgatggtagcatccctttcttctggggcgttgactacgaaaaccaccttgtgttctctgacgatgttgggatcctcaagacaggctgcggcaactcgtacgctccatttcctaaaggttgcttctacaccacctccggtgggctgcagagcttcgagcacccgttgcacgaggtcaaggcggtgccacgcgtggacagccaaggccagatgtgcggctccatcttcaaggtcgacagcgagagcaagaagaagcaggacgctagcatcccccgcgtcggcagtgctgccgactggtccaaccagttctgaccatcttcttgccatccattgtcccggctagtacgaggtgcagagctgtgtatctgatgaatccatgagacgatttctgctacgtttcttgcacgcttgtcgaacactgtgagactcacatcgcgctcatctacgctacgtgtaactgatactaatgatacggagtgttccaggtggtggtagatgtactgcagaatctatctcccatgtttcaataaacctgaataaggtgctcggtttggatctatgcatttatgattctagtacttctgaatcgaattttatcgcatcctttcctttttcttcttgttctcctgttctgcatttcagttctgtctggcggacggttacccgttaccgtggtagttgggcaactgggcatacggttgttaggaccagctcggtccgtgacaaccattgaacaatactgcatgggttctacttagctagggtgtattagactcgtcttattaattaaactattgttacggtttc

SEQ ID NO: 11124 - DNA, 8638 bp, Zea Mays
caaggctcaagcctcaagccaacaaccgaatagagagagcagaggacgcactacaaggccgcacagacggagcagagcagctagaggagagaggcggcgtcgcggcgaggtggaagagagagagagagagagagtggtgaaggtgcgtgggttaaaaagaggaaacaaaaaagaaaacgagcgaggcagaaaacacaagcaaagagacgacagcaaaaataggaggccggaggcgggcgaggaacgtgaataaaatatcattcggagaaacaagagaggccggggaatcgcgtcggaattccggcgaatcggcgggatccggccgggatctgcgcgccggatgaggggtcggcaccatgaaatggtccacattactcagtaaggtcgtcttcgccggcggccagcagcagcagccgccacctccgccgtcgccgccgccggagtctccgttccacggccagcaggcggtccaggacctcgccaccccgaggctcagctccgcctccaccggcggggacgagggcggcttcgacgcggcggccgggagctcgccctctgccgctgcgtcctctgccagggggagaaatgaattggagtcggactttaggagattatgggaagaatttcgctcttccagctctgaaaaggagaaagaaagggccttaaatttggctgtagatgtcttctgtaggctagtgaagcagtattctagtgtagctcaattagttacaaagttagtagaaggacatattttttcttttgttattggaagagcttttgttactgatgtggagaaactaagaatccacagcaaaggaagaccgctgcgtgtggctgatgttattggcttcttttcggataccacagagcttggtatatgtccaggatcaaatttgttgtacgcagtcgaagtgcttgtgactgagacaaatgataggcaacctctgttggactctggtattttgtgctgccttatatatatcctcaattctctattgagccccaatgagaactccacagataccttgcctgttcaccaagaaggatccagaaatgagaaaaacaaaaatttggatcctatgcaatcacgacggcttgagttcagggatggtattgttccccttcacacaattcagctccatcgccatgcaatgcaggtccttggtcttcttcttgcaaatgacaatgggacttctgcaaaatacatcaggaagcaccagctgattaaagtacttcttatggctgtgaaagatttcaatcctcaaagcggtgatgctgcttacactatgggcattgtggatttattactggaatgtgttgagctgtcttacaggcctgagtctggggccataaggctcagggaagacatacataatgctcatggttaccagttccttgttcagtttgctcttacactttgtagcttacacaaaaatcagactctccaatcctcatccaagttagcatccgaagcggatgcatctgttccttctcacagattagaacaagatatattctcatgtgacctttcacctcagttgtctaggttgcttgatgttcttgtaaatttgtcacaaattggcccctcagaaaatggtggtgttagtagccctaaggccttgaggggttatcatcttcttgcactttttcttcataggagaatgtcactatttgatatgcaatctcttgatatcttctttcgtattgctgcctgtgaggcttcctttcctgagccacagaaatcaaagataaatcgaacagcaggctatgcgtctggaatgtccccagaggccagccttgatgatctcaccttacccaggtttgccgatgatatgtcttctgggggatcacatggggatctagatgacttttcagctcaaaaggattcatttagccacttgtctgagctggagaatgctgacttagctggtgagacttctgaattcatagtcttgtcaaatgctgatatggttgaacacattcttttggactggactatatgggttgctgctcctatatcagtgcaaataactcttcttgggtttcttgagaggatggtgtccatgcattggttcagaaatcacaaccttacaatgctgcggcgaattaatcttgttcaacatcttcttgttacgttacaacgtggtgatgttgaaattcccgtgttggagaagctagttgtgcttctaggtgtcatcctggaggatggttttctagcttctgagctggagcttgttgtaagattcataataatgacatttgatcctccagagcttacaccgaaccgccagattgtgcgggaggctatgggaaagcatgttattgtgaggaacatgttattggaaatgcttattgatctacaagtaaccataaatgctgaagagttgctggagcaatggcataaagttgtttcatccagattggtcacatatttccttgatgaagcggtacatccaactagtatgagatggatcacgactcttttaggagtttgccttacgtcatcaactacatttgcattgaagttccgtacaagtggaggttttcaaggattgaatcatgtgcttccaagctttcacgattctccagaaatatactatatattgttctgtttggtgtttgggaagcctgtttatcctcgagtgccagaggtccgcatgcttgatttccatgctctcatgcctagcgatggaaactatggagaattgaagtttgtggatctcttggatactataattgcaatggcaaaagctacatttgattccttgattatgaaatctatgcttgcacatgagaataacaatctttcacatcttaatggcaccttggtcgcggatcttgttgaggcgacatcggacatgggaggtgatcttcaaggagaagctctgatgcataagacatacgcagcaaggttaatgggtggtgaagcagcagcacctgctgttgctacttcaatattgaggttcatggttgatctggcaaagatgtgcccaccattctctgccgtttgcaggcggcatgatttcctagagagctgcattgatctctatttctcttgtgtgagatccgattttgccctgaggatggcaaaagatcttacaactgttgcaactggcgagatgaatgaacatgatgatgataatggaagtttaaaggatgccctttcaagtttaccacatgatcaggatcaatctaccaaaacattgagtgccacaagttttcctcaggagcagaaaagttccagttcagaaagtactggcatgccaaacccttttgaaactgctgaagccaaagcagatgattcttcgaatcaggagttcagcaataaaattttaaatggagaagcaaatcaaatatttaataatgctcgtgatcaagggcggatcacagcttccggtgcaaatggcatttctgaattccaccatgtaactgattcacccaactcagttgctatgaataatgttggatctcctgttttatccgagaggtcaacccacagagcagctagtacccctactgcatctccaatggccccattcacatcttggcctggcagtgcaggatcgtatactgatggtagacacctgacagcttctccatccatggcttcatctatatctgggatagacctggactcgtcccctgatctgaggacaaatattcagggaccatctgccgcaaatacccttttcccaatcaattccaagcttttgcttgacatagatgatttaggttatgggggtggcccatgctctgcaggagctacagctgttctagattttgttgctcaaattcttgctgacactatctcagatcagcttaaagcagcactctttattgagaacattttggagtccgtgcctttgtttgttgatattgactctgctctagtttttcaaggcttgtgtctaagcagattgatgaacttccttgaaagaaagctcttgcttgatgatgaagaagatgggaagaaacttgacaagagccgctggtcggtcaatttggacccactttgctggatgattgttgatcgtgtgtacatgggctgctttccaaccccactcagggtactacaaacactagaattcttaatgtcaatgttacagcttgctagtaaagatggccgtgttgaagatgccgtgcctccagggaaaggtattttgtccattgctcgaggaagcaggcaacttgatccatacatccacgcgatattgaagaacacaaaccgaatgataatgtactgtttcctcccaatattccttaaaagtatgggggaagatgatctacttgcaaatcttgcattcctgacggaaactgggaggagtttagcttctaaacgttatcaggaagatttttctattgatatttgtacagttcttcagctactagttgccaacaagagattggtgctctgcccaagcaatgttgatacagatctaatgtgttgtttctgcataaatttaatgtcacttctccatgacaagagagtaactgctcaaaacttggcagttgatttacttaaatacttggtagtgcatcgtcgtcaatctcttgaggaccttctagtttgcaagcctaaccaaggacaacaactggacatcctgcatggaggacttgataaattggtcactggaagtacatcaacgttttttgaatggctgcaaagttctcagcaaacaataagtaaagtgttggaccagtgtgctttaataatgtgggttcaatatattaccggctcagcaaaatttcctggcgtgagaataaaaggaatggaggtcaggcgcaagaaagagatgggacggaaatttcgcgaatctgcaaaagtagatgccaggcactgggagcagataaatgagcggcggtataatcttgatttggttcgtgatgtgatgtctacagagctaagagcaattcgtcaagacaaatacggttggatattgcacggagaaagtgagtggcaaagccagctccaagaacttgtccatgagagaggtatttttcctatgcggcaaccatccacagaacctgagtggcagctgtgtggtgttgaaggaccatatagaatgaggaagaaacttgagcactccaaatttaagatagatactattcagaatgttctaaccagcaaccttggatcaaatggtggtaagattatcaataaagaggatggagaattgttgttgacatctgggtcagacacaatgtcaggcttgaatcttttgacctatgacactgagcagagggatcttgatgctgtcgagttttcgtcattcaaagatgatgatgacatattcaaaggaggaagcacaatttcaggtccaattggctggactgatgataaaagcagcgttaatgagcagagccttcattctgcgacggaatttggagcaaaatcaagttccctttcttttcacatgactgagagtcaccagggtaaatctgaacttagttcaccaaggagggcaccttcagtcaaaggtactgatgcaagaacctcagaggataaatcagaaaaggagttgcttgacaatggtgagtatcttatcaggccttatctggagccctatgagaaaataaggcataaatacaactgtgaacgggttgctggtcttgataagcacgatggaatatttttaattggagaactttgcttatacattattgagaacttctacattgatgattccaattgcatttgcgaaaagggcagtgaagatgagctctctgtcattgatcaagctttaggtgtgaacaaggatataatgggaggcagtgaatctcagttaaaatcacctaccacttggggtgggacagcaaaggtcttgcttggtggcagatcatgggcatataatggaggtgcttggggtaaggagaagctttgcaacagtagcaacctgcctcatccatggcatatgtggaagcttgatagtgtccatgagttgttgaaacgtgattaccagctccgccctgttgcaattgaaattttcagcatggatggttgcaatgagcttctagttttccacaaaaaggagagagaggaagttttcaaaaatttgattgccatgaatctcccacggaatagcatgttggacacaaccatatcagcatcctctaaacaggagagtggtgaggggagccgtctttttaaagtcatggcaaaatcattttctaaaagatggcaaagtggagaaattacgaacttccaatatctcatgcatctaaatacacttgctggtcgaggacatttcgcaggcttgataaacccatgggatgccaaacggaggaaggtgaagaggaattctgcaagagatatgatagctgggatgaccctgatgtaccaaagttccattatggctctcattattcaagtgctggaattgtccttttctatctcttaaggttgcctccttttagcacagaaaatcagaaattgcagggtggacaatttgaccatgcagaccggttattcaacagtgtgaaggatacatgggtaagtgctgcaggcaaaagtaacacatcagatgtgaaagaactaattcctgagttctattatttgcctgaatttttggagaaccgttttaatctggatctgggcgagaaacaatcaggagagaaggttggtgatgttgttttaccaccttgggctaaaggcagcgccagagagttcatcaggaagcatcgggaagcactggaatcggattatgtatctgagaatctgcatcattggattgatcttatttttggatataagcagagaggaaaggcagctgaagatgccgtcaatgtcttctatcactacacatatgaaggcaatgttgacatagacgcagtatcagatcctaccatgaaggcttcaatactagcacaaatcaaccattttggtcagacccccaaacagttattccagaaaccacatccacagaggcggactgacaggaaagtccctcctcatcctctacggtactgtgcctatctaacacagcaggagattcgcaagacagcatcttcggtgtcccagattgtctcctacaatgataagatcctaattgctgcagttaactgcttgctcaagccgctaacttataatgaatacatttcctggggattccctgaccgaagcttgagaatattaacatatgatcaggatagacttttgtctactcatgaaaaccttcatggtggtagtcaaattcagtgcactggagtgagccatgatggcaacattctcatcactggtggtgatgatggagttgttgcagtgtggagatttgtgaaggatggcatccgccgtctcctgagaatggagaaggctttgtgtgctcacacaggaaagataacttgcgtctctgtcagccaaccttactcattaattgtctcaggctctgatgactgttctgttatcttatgggacctgacaagcctagtctttgtgaagcagctaccaaggttcccggcatcagtatccgcgctacatgtgaacagcctcactggtgagattctgactggtgctggtgttctttttgctgtttggagcatcaatggggactgccttgctgtggtgaacacctcccagcttccttctgacctcatcttgtctgtgacaagcgcgacacactcagactggcaggacacaaactggtacgtgacaggccatcaaagcggcgcggttaaggtatggaagatgttgcactgctcgtctgatgaagcagtaaatagcaagagcaaatcacctgcggtatcgtctggtgggcttagcctgaacggccaagcaccagagtataggctacttctgcagaaggtgctcaagtcacacaaacaccctgtcactgccctttgtataccaccggacttgaagcagcttctgagtggggatggcagcggtcacttgctctcatggtcattgaaagacgacagtttcaagggttcatagctcagagaaatatagggattcagctgcacatatagagaaacactggttaaatcttaccactgatttcttcctcgtccagaactgagcattggcgtgcattgacaaaagagctcggatcagcaagcttctacatggtatatgaaatgttcccttgatgtcccatgcctgggccatacagcagtccgggcaggagagagaatacaacagacacaattggaaggatgaagtggacgtggatgcgctgctgcgctgacatcataatcttatactgtgaattatgagatggttgtaccttctcttgtttttttgaggagaaaaggattcatgtgggctgtaggtgccattgtttgtaaagtctatacagggtaattttggtggtgccggttgaggtggctgatggtgtagtgtctcgatgttttgttcggggttgtgggagcaaggaaagaggtattagtttcattttctccccccacctctggaggctagtttgggagccacaaaaccgaaagtgattggatggactaaaagcttctacatattcaaaattgaataagaacgagattttaatcacttcaatcctcttcgattttgtggcttccaaactagccccagaagtgttgattctttgactgggtgtaatttgagcacccttgtgttcagtaagtctatttgcgtatacatgcaagagttttgctgaacaaagcgacg

SEQ ID NO: 11125 - DNA, 8858 bp, Zea Mays
caaggctcaagcctcaagccaacaaccgaatagagagagcagaggacgcactacaaggccgcacagacggagcagagcagctagaggagagaggcggcgtcgcggcgaggtggaagagagagagagagagagagtggtgaaggtgcgtgggttaaaaagaggaaacaaaaaagaaaacgagcgaggcagaaaacacaagcaaagagacgacagcaaaaataggaggccggaggcgggcgaggaacgtgaataaaatatcattcggagaaacaagagaggccggggaatcgcgtcggaattccggcgaatcggcgggatccggccgggatctgcgcgccggatgaggggtcggcaccatgaaatggtccacattactcagtaaggtcgtcttcgccggcggccagcagcagcagccgccacctccgccgtcgccgccgccggagtctccgttccacggccagcaggcggtccaggacctcgccaccccgaggctcagctccgcctccaccggcggggacgagggcggcttcgacgcggcggccgggagctcgccctctgccgctgcgtcctctgccagggggagaaatgaattggagtcggactttaggagattatgggaagaatttcgctcttccagctctgaaaaggagaaagaaagggccttaaatttggctgtagatgtcttctgtaggctagtgaagcagtattctagtgtagctcaattagttacaaagttagtagaaggacatattttttcttttgttattggaagagcttttgttactgatgtggagaaactaagaatccacagcaaaggaagaccgctgcgtgtggctgatgttattggcttcttttcggataccacagagcttggtatatgtccaggatcaaatttgttgtacgcagtcgaagtgcttgtgactgagacaaatgataggcaacctctgttggactctggtattttgtgctgccttatatatatcctcaattctctattgagccccaatgagaactccacagataccttgcctgttcaccaagaaggatccagaaatgagaaaaacaaaaatttggatcctatgcaatcacgacggcttgagattgagggaagtgtaatacatattatgaaagcactggcgagccatcaatctgctgcaccaagtttaattgaagatgatgccttacaagttcttttccacatggttgcaaatggttcactatctgtgttgtcacagttcagggatggtattgttccccttcacacaattcagctccatcgccatgcaatgcaggtccttggtcttcttcttgcaaatgacaatgggacttctgcaaaatacatcaggaagcaccagctgattaaagtacttcttatggctgtgaaagatttcaatcctcaaagcggtgatgctgcttacactatgggcattgtggatttattactggaatgtgttgagctgtcttacaggcctgagtctggggccataaggctcagggaagacatacataatgctcatggttaccagttccttgttcagtttgctcttacactttgtagcttacacaaaaatcagactctccaatcctcatccaagttagcatccgaagcggatgcatctgttccttctcacagattagaacaagatatattctcatgtgacctttcacctcagttgtctaggttgcttgatgttcttgtaaatttgtcacaaattggcccctcagaaaatggtggtgttagtagccctaaggccttgaggggttatcatcttcttgcactttttcttcataggagaatgtcactatttgatatgcaatctcttgatatcttctttcgtattgctgcctgtgaggcttcctttcctgagccacagaaatcaaagataaatcgaacagcaggctatgcgtctggaatgtccccagaggccagccttgatgatctcaccttacccaggtttgccgatgatatgtcttctgggggatcacatggggatctagatgacttttcagctcaaaaggattcatttagccacttgtctgagctggagaatgctgacttagctggtgagacttctgaattcatagtcttgtcaaatgctgatatggttgaacacattcttttggactggactatatgggttgctgctcctatatcagtgcaaataactcttcttgggtttcttgagaggatggtgtccatgcattggttcagaaatcacaaccttacaatgctgcggcgaattaatcttgttcaacatcttcttgttacgttacaacgtggtgatgttgaaattcccgtgttggagaagctagttgtgcttctaggtgtcatcctggaggatggttttctagcttctgagctggagcttgttgtaagattcataataatgacatttgatcctccagagcttacaccgaaccgccagattgtgcgggaggctatgggaaagcatgttattgtgaggaacatgttattggaaatgcttattgatctacaagtaaccataaatgctgaagagttgctggagcaatggcataaagttgtttcatccagattggtcacatatttccttgatgaagcggtacatccaactagtatgagatggatcacgactcttttaggagtttgccttacgtcatcaactacatttgcattgaagttccgtacaagtggaggttttcaaggattgaatcatgtgcttccaagctttcacgattctccagaaatatactatatattgttctgtttggtgtttgggaagcctgtttatcctcgagtgccagaggtccgcatgcttgatttccatgctctcatgcctagcgatggaaactatggagaattgaagtttgtggatctcttggatactataattgcaatggcaaaagctacatttgattccttgattatgaaatctatgcttgcacatgagaataacaatctttcacatcttaatggcaccttggtcgcggatcttgttgaggcgacatcggacatgggaggtgatcttcaaggagaagctctgatgcataagacatacgcagcaaggttaatgggtggtgaagcagcagcacctgctgttgctacttcaatattgaggttcatggttgatctggcaaagatgtgcccaccattctctgccgtttgcaggcggcatgatttcctagagagctgcattgatctctatttctcttgtgtgagatccgattttgccctgaggatggcaaaagatcttacaactgttgcaactggcgagatgaatgaacatgatgatgataatggaagtttaaaggatgccctttcaagtttaccacatgatcaggatcaatctaccaaaacattgagtgccacaagttttcctcaggagcagaaaagttccagttcagaaagtactggcatgccaaacccttttgaaactgctgaagccaaagcagatgattcttcgaatcaggagttcagcaataaaattttaaatggagaagcaaatcaaatatttaataatgctcgtgatcaagggcggatcacagcttccggtgcaaatggcatttctgaattccaccatgtaactgattcacccaactcagttgctatgaataatgttggatctcctgttttatccgagaggtcaacccacagagcagctagtacccctactgcatctccaatggccccattcacatcttggcctggcagtgcaggatcgtatactgatggtagacacctgacagcttctccatccatggcttcatctatatctgggatagacctggactcgtcccctgatctgaggacaaatattcagggaccatctgccgcaaatacccttttcccaatcaattccaagcttttgcttgacatagatgatttaggttatgggggtggcccatgctctgcaggagctacagctgttctagattttgttgctcaaattcttgctgacactatctcagatcagcttaaagcagcactctttattgagaacattttggagtccgtgcctttgtttgttgatattgactctgctctagtttttcaaggcttgtgtctaagcagattgatgaacttccttgaaagaaagctcttgcttgatgatgaagaagatgggaagaaacttgacaagagccgctggtcggtcaatttggacccactttgctggatgattgttgatcgtgtgtacatgggctgctttccaaccccactcagggtactacaaacactagaattcttaatgtcaatgttacagcttgctagtaaagatggccgtgttgaagatgccgtgcctccagggaaaggtattttgtccattgctcgaggaagcaggcaacttgatccatacatccacgcgatattgaagaacacaaaccgaatgataatgtactgtttcctcccaatattccttaaaagtatgggggaagatgatctacttgcaaatcttgcattcctgacggaaactgggaggagtttagcttctaaacgttatcaggaagatttttctattgatatttgtacagttcttcagctactagttgccaacaagagattggtgctctgcccaagcaatgttgatacagatctaatgtgttgtttctgcataaatttaatgtcacttctccatgacaagagagtaactgctcaaaacttggcagttgatttacttaaatacttggtagtgcatcgtcgtcaatctcttgaggaccttctagtttgcaagcctaaccaaggacaacaactggacatcctgcatggaggacttgataaattggtcactggaagtacatcaacgttttttgaatggctgcaaagttctcagcaaacaataagtaaagtgttggaccagtgtgctttaataatgtgggttcaatatattaccggctcagcaaaatttcctggcgtgagaataaaaggaatggaggtcaggcgcaagaaagagatgggacggaaatttcgcgaatctgcaaaagtagatgccaggcactgggagcagataaatgagcggcggtataatcttgatttggttcgtgatgtgatgtctacagagctaagagcaattcgtcaagacaaatacggttggatattgcacggagaaagtgagtggcaaagccagctccaagaacttgtccatgagagaggtatttttcctatgcggcaaccatccacagaacctgagtggcagctgtgtggtgttgaaggaccatatagaatgaggaagaaacttgagcactccaaatttaagatagatactattcagaatgttctaaccagcaaccttggatcaaatggtggtaagattatcaataaagaggatggagaattgttgttgacatctgggtcagacacaatgtcaggcttgaatcttttgacctatgacactgagcagagggatcttgatgctgtcgagttttcgtcattcaaagatgatgatgacatattcaaaggaggaagcacaatttcaggtccaattggctggactgatgataaaagcagcgttaatgagcagagccttcattctgcgacggaatttggagcaaaatcaagttccctttcttttcacatgactgagagtcaccagggtaaatctgaacttagttcaccaaggagggcaccttcagtcaaaggtactgatgcaagaacctcagaggataaatcagaaaaggagttgcttgacaatggtgagtatcttatcaggccttatctggagccctatgagaaaataaggcataaatacaactgtgaacgggttgctggtcttgataagcacgatggaatatttttaattggagaactttgcttatacattattgagaacttctacattgatgattccaattgcatttgcgaaaagggcagtgaagatgagctctctgtcattgatcaagctttaggtgtgaacaaggatataatgggaggcagtgaatctcagttaaaatcacctaccacttggggtgggacagcaaaggtcttgcttggtggcagatcatgggcatataatggaggtgcttggggtaaggagaagctttgcaacagtagcaacctgcctcatccatggcatatgtggaagcttgatagtgtccatgagttgttgaaacgtgattaccagctccgccctgttgcaattgaaattttcagcatggatggttgcaatgagcttctagttttccacaaaaaggagagagaggaagttttcaaaaatttgattgccatgaatctcccacggaatagcatgttggacacaaccatatcagcatcctctaaacaggagagtggtgaggggagccgtctttttaaagtcatggcaaaatcattttctaaaagatggcaaagtggagaaattacgaacttccaatatctcatgcatctaaatacacttgctggtcgagggtatagtgatctcacacagtacccagtatttccatgggttctcgcagattatgagagcgatgttttagatctgaggaatccacagacatttcgcaggcttgataaacccatgggatgccaaacggaggaaggtgaagaggaattctgcaagagatatgatagctgggatgaccctgatgtaccaaagttccattatggctctcattattcaagtgctggaattgtccttttctatctcttaaggttgcctccttttagcacagaaaatcagaaattgcagggtggacaatttgaccatgcagaccggttattcaacagtgtgaaggatacatgggtaagtgctgcaggcaaaagtaacacatcagatgtgaaagaactaattcctgagttctattatttgcctgaatttttggagaaccgttttaatctggatctgggcgagaaacaatcaggagagaaggttggtgatgttgttttaccaccttgggctaaaggcagcgccagagagttcatcaggaagcatcgggaagcactggaatcggattatgtatctgagaatctgcatcattggattgatcttatttttggatataagcagagaggaaaggcagctgaagatgccgtcaatgtcttctatcactacacatatgaaggcaatgttgacatagacgcagtatcagatcctaccatgaaggcttcaatactagcacaaatcaaccattttggtcagacccccaaacagttattccagaaaccacatccacagaggcggactgacaggaaagtccctcctcatcctctacggtactgtgcctatctaacacagcaggagattcgcaagacagcatcttcggtgtcccagattgtctcctacaatgataagatcctaattgctgcagttaactgcttgctcaagccgctaacttataatgaatacatttcctggggattccctgaccgaagcttgagaatattaacatatgatcaggatagacttttgtctactcatgaaaaccttcatggtggtagtcaaattcagtgcactggagtgagccatgatggcaacattctcatcactggtggtgatgatggagttgttgcagtgtggagatttgtgaaggatggcatccgccgtctcctgagaatggagaaggctttgtgtgctcacacaggaaagataacttgcgtctctgtcagccaaccttactcattaattgtctcaggctctgatgactgttctgttatcttatgggacctgacaagcctagtctttgtgaagcagctaccaaggttcccggcatcagtatccgcgctacatgtgaacagcctcactggtgagattctgactggtgctggtgttctttttgctgtttggagcatcaatggggactgccttgctgtggtgaacacctcccagcttccttctgacctcatcttgtctgtgacaagcgcgacacactcagactggcaggacacaaactggtacgtgacaggccatcaaagcggcgcggttaaggtatggaagatgttgcactgctcgtctgatgaagcagtaaatagcaagagcaaatcacctgcggtatcgtctggtgggcttagcctgaacggccaagcaccagagtataggctacttctgcagaaggtgctcaagtcacacaaacaccctgtcactgccctttgtataccaccggacttgaagcagcttctgagtggggatggcagcggtcacttgctctcatggtcattgaaagacgacagtttcaagggttcatagctcagagaaatatagggattcagctgcacatatagagaaacactggttaaatcttaccactgatttcttcctcgtccagaactgagcattggcgtgcattgacaaaagagctcggatcagcaagcttctacatggtatatgaaatgttcccttgatgtcccatgcctgggccatacagcagtccgggcaggagagagaatacaacagacacaattggaaggatgaagtggacgtggatgcgctgctgcgctgacatcataatcttatactgtgaattatgagatggttgtaccttctcttgtttttttgaggagaaaaggattcatgtgggctgtaggtgccattgtttgtaaagtctatacagggtaattttggtggtgccggttgaggtggctgatggtgtagtgtctcgatgttttgttcggggttgtgggagcaaggaaagaggtattagtttcattttctccccccacctctggaggctagtttgggagccacaaaaccgaaagtgattggatggactaaaagcttctacatattcaaaattgaataagaacgagattttaatcacttcaatcctcttcgattttgtggcttccaaactagccccagaagtgttgattctttgactgggtgtaatttgagcacccttgtgttcagtaagtctatttgcgtatacatgcaagagttttgctgaacaaagcgacg

SEQ ID NO: 11126 - DNA, 8597 bp, Zea Mays
caaggctcaagcctcaagccaacaaccgaatagagagagcagaggacgcactacaaggccgcacagacggagcagagcagctagaggagagaggcggcgtcgcggcgaggtggaagagagagagagagagagagtggtgaaggtgcgtgggttaaaaagaggaaacaaaaaagaaaacgagcgaggcagaaaacacaagcaaagagacgacagcaaaaataggaggccggaggcgggcgaggaacgtgaataaaatatcattcggagaaacaagagaggccggggaatcgcgtcggaattccggcgaatcggcgggatccggccgggatctgcgcgccggatgaggggtcggcaccatgaaatggtccacattactcagtaaggtcgtcttcgccggcggccagcagcagcagccgccacctccgccgtcgccgccgccggagtctccgttccacggccagcaggcggtccaggacctcgccaccccgaggctcagctccgcctccaccggcggggacgagggcggcttcgacgcggcggccgggagctcgccctctgccgctgcgtcctctgccagggggagaaatgaattggagtcggactttaggagattatgggaagaatttcgctcttccagctctgaaaaggagaaagaaagggccttaaatttggctgtagatgtcttctgtaggctagtgaagcagtattctagtgtagctcaattagttacaaagttagtagaaggacatattttttcttttgttattggaagagcttttgttactgatgtggagaaactaagaatccacagcaaaggaagaccgctgcgtgtggctgatgttattggcttcttttcggataccacagagcttggtatatgtccaggatcaaatttgttgtacgcagtcgaagtgcttgtgactgagacaaatgataggcaacctctgttggactctggtattttgtgctgccttatatatatcctcaattctctattgagccccaatgagaactccacagataccttgcctgttcaccaagaaggatccagaaatgagaaaaacaaaaatttggatcctatgcaatcacgacggcttgagttcagggatggtattgttccccttcacacaattcagctccatcgccatgcaatgcaggtccttggtcttcttcttgcaaatgacaatgggacttctgcaaaatacatcaggaagcaccagctgattaaagtacttcttatggctgtgaaagatttcaatcctcaaagcggtgatgctgcttacactatgggcattgtggatttattactggaatgtgttgagctgtcttacaggcctgagtctggggccataaggctcagggaagacatacataatgctcatggttaccagttccttgttcagtttgctcttacactttgtagcttacacaaaaatcagactctccaatcctcatccaagttagcatccgaagcggatgcatctgttccttctcacagattagaacaagatatattctcatgtgacctttcacctcagttgtctaggttgcttgatgttcttgtaaatttgtcacaaattggcccctcagaaaatggtggtgttagtagccctaaggccttgaggggttatcatcttcttgcactttttcttcataggagaatgtcactatttgatatgcaatctcttgatatcttctttcgtattgctgcctgtgaggcttcctttcctgagccacagaaatcaaagataaatcgaacagcaggctatgcgtctggaatgtccccagaggccagccttgatgatctcaccttacccaggtttgccgatgatatgtcttctgggggatcacatggggatctagatgacttttcagctcaaaaggattcatttagccacttgtctgagctggagaatgctgacttagctggtgagacttctgaattcatagtcttgtcaaatgctgatatggttgaacacattcttttggactggactatatgggttgctgctcctatatcagtgcaaataactcttcttgggtttcttgagaggatggtgtccatgcattggttcagaaatcacaaccttacaatgctgcggcgaattaatcttgttcaacatcttcttgttacgttacaacgtggtgatgttgaaattcccgtgttggagaagctagttgtgcttctaggtgtcatcctggaggatggttttctagcttctgagctggagcttgttgtaagattcataataatgacatttgatcctccagagcttacaccgaaccgccagattgtgcgggaggctatgggaaagcatgttattgtgaggaacatgttattggaaatgcttattgatctacaagtaaccataaatgctgaagagttgctggagcaatggcataaagttgtttcatccagattggtcacatatttccttgatgaagcggtacatccaactagtatgagatggatcacgactcttttaggagtttgccttacgtcatcaactacatttgcattgaagttccgtacaagtggaggttttcaaggattgaatcatgtgcttccaagctttcacgattctccagaaatatactatatattgttctgtttggtgtttgggaagcctgtttatcctcgagtgccagaggtccgcatgcttgatttccatgctctcatgcctagcgatggaaactatggagaattgaagtttgtggatctcttggatactataattgcaatggcaaaagctacatttgattccttgattatgaaatctatgcttgcacatgagaataacaatctttcacatcttaatggcaccttggtcgcggatcttgttgaggcgacatcggacatgggaggtgatcttcaaggagaagctctgatgcataagacatacgcagcaaggttaatgggtggtgaagcagcagcacctgctgttgctacttcaatattgaggttcatggttgatctggcaaagatgtgcccaccattctctgccgtttgcaggcggcatgatttcctagagagctgcattgatctctatttctcttgtgtgagatccgattttgccctgaggatggcaaaagatcttacaactgttgcaactggcgagatgaatgaacatgatgatgataatggaagtttaaaggatgccctttcaagtttaccacatgatcaggatcaatctaccaaaacattgagtgccacaagttttcctcaggagcagaaaagttccagttcagaaagtactggcatgccaaacccttttgaaactgctgaagccaaagcagatgattcttcgaatcaggagttcagcaataaaattttaaatggagaagcaaatcaaatatttaataatgctcgtgatcaagggcggatcacagcttccggtgcaaatggcatttctgaattccaccatgtaactgattcacccaactcagttgctatgaataatgttggatctcctgttttatccgagaggtcaacccacagagcagctagtacccctactgcatctccaatggccccattcacatcttggcctggcagtgcaggatcgtatactgatggtagacacctgacagcttctccatccatggcttcatctatatctgggatagacctggactcgtcccctgatctgaggacaaatattcagggaccatctgccgcaaatacccttttcccaatcaattccaagcttttgcttgacatagatgatttaggttatgggggtggcccatgctctgcaggagctacagctgttctagattttgttgctcaaattcttgctgacactatctcagatcagcttaaagcagcactctttattgagaacattttggagtccgtgcctttgtttgttgatattgactctgctctagtttttcaaggcttgtgtctaagcagattgatgaacttccttgaaagaaagctcttgcttgatgatgaagaagatgggaagaaacttgacaagagccgctggtcggtcaatttggacccactttgctggatgattgttgatcgtgtgtacatgggctgctttccaaccccactcagggtactacaaacactagaattcttaatgtcaatgttacagcttgctagtaaagatggccgtgttgaagatgccgtgcctccagggaaaggtattttgtccattgctcgaggaagcaggcaacttgatccatacatccacgcgatattgaagaacacaaaccgaatgataatgtactgtttcctcccaatattccttaaaagtatgggggaagatgatctacttgcaaatcttgcattcctgacggaaactgggaggagtttagcttctaaacgttatcaggaagatttttctattgatatttgtacagttcttcagctactagttgccaacaagagattggtgctctgcccaagcaatgttgatacagatctaatgtgttgtttctgcataaatttaatgtcacttctccatgacaagagagtaactgctcaaaacttggcagttgatttacttaaatacttggtagtgcatcgtcgtcaatctcttgaggaccttctagtttgcaagcctaaccaaggacaacaactggacatcctgcatggaggacttgataaattggtcactggaagtacatcaacgttttttgaatggctgcaaagttctcagcaaacaataagtaaagtgttggaccagtgtgctttaataatgtgggttcaatatattaccggctcagcaaaatttcctggcgtgagaataaaaggaatggaggtcaggcgcaagaaagagatgggacggaaatttcgcgaatctgcaaaagtagatgccaggcactgggagcagataaatgagcggcggtataatcttgatttggttcgtgatgtgatgtctacagagctaagagcaattcgtcaagacaaatacggttggatattgcacggagaaagtgagtggcaaagccagctccaagaacttgtccatgagagaggtatttttcctatgcggcaaccatccacagaacctgagtggcagctgtgtggtgttgaaggaccatatagaatgaggaagaaacttgagcactccaaatttaagatagatactattcagaatgttctaaccagcaaccttggatcaaatggtggtaagattatcaataaagaggatggagaattgttgttgacatctgggtcagacacaatgtcaggcttgaatcttttgacctatgacactgagcagagggatcttgatgctgtcgagttttcgtcattcaaagatgatgatgacatattcaaaggaggaagcacaatttcaggtccaattggctggactgatgataaaagcagcgttaatgagcagagccttcattctgcgacggaatttggagcaaaatcaagttccctttcttttcacatgactgagagtcaccagggtaaatctgaacttagttcaccaaggagggcaccttcagtcaaaggtactgatgcaagaacctcagaggataaatcagaaaaggagttgcttgacaatggtgagtatcttatcaggccttatctggagccctatgagaaaataaggcataaatacaactgtgaacgggttgctggtcttgataagcacgatggaatatttttaattggagaactttgcttatacattattgagaacttctacattgatgattccaattgcatttgcgaaaagggcagtgaagatgagctctctgtcattgatcaagctttaggtgtgaacaaggatataatgggaggcagtgaatctcagttaaaatcacctaccacttggggtgggacagcaaaggtcttgcttggtggcagatcatgggcatataatggaggtgcttggggtaaggagaagctttgcaacagtagcaacctgcctcatccatggcatatgtggaagcttgatagtgtccatgagttgttgaaacgtgattaccagctccgccctgttgcaattgaaattttcagcatggatggttgcaatgagcttctagttttccacaaaaaggagagagaggaagttttcaaaaatttgattgccatgaatctcccacggaatagcatgttggacacaaccatatcagcatcctctaaacaggagagtggtgaggggagccgtctttttaaagtcatggcaaaatcattttctaaaagatggcaaagtggagaaattacgaacttccaatatctcatgcatctaaatacacttgctggtcgagggtatagtgatctcacacagtacccagtatttccatgggttctcgcagattatgagagcgatgttttagatctgaggaatccacagacatttcgcaggcttgataaacccatgggatgccaaacggaggaaggtgaagaggaattctgcaagagatatgatagctgggatgaccctgatgtaccaaagttccattatggctctcattattcaagtgctggaattgtccttttctatctcttaaggttgcctccttttagcacagaaaatcagaaattgcagggtggacaatttgaccatgcagaccggttattcaacagtgtgaaggatacatgggttggtgatgttgttttaccaccttgggctaaaggcagcgccagagagttcatcaggaagcatcgggaagcactggaatcggattatgtatctgagaatctgcatcattggattgatcttatttttggatataagcagagaggaaaggcagctgaagatgccgtcaatgtcttctatcactacacatatgaaggcaatgttgacatagacgcagtatcagatcctaccatgaaggcttcaatactagcacaaatcaaccattttggtcagacccccaaacagttattccagaaaccacatccacagaggcggactgacaggaaagtccctcctcatcctctacggtactgtgcctatctaacacagcaggagattcgcaagacagcatcttcggtgtcccagattgtctcctacaatgataagatcctaattgctgcagttaactgcttgctcaagccgctaacttataatgaatacatttcctggggattccctgaccgaagcttgagaatattaacatatgatcaggatagacttttgtctactcatgaaaaccttcatggtggtagtcaaattcagtgcactggagtgagccatgatggcaacattctcatcactggtggtgatgatggagttgttgcagtgtggagatttgtgaaggatggcatccgccgtctcctgagaatggagaaggctttgtgtgctcacacaggaaagataacttgcgtctctgtcagccaaccttactcattaattgtctcaggctctgatgactgttctgttatcttatgggacctgacaagcctagtctttgtgaagcagctaccaaggttcccggcatcagtatccgcgctacatgtgaacagcctcactggtgagattctgactggtgctggtgttctttttgctgtttggagcatcaatggggactgccttgctgtggtgaacacctcccagcttccttctgacctcatcttgtctgtgacaagcgcgacacactcagactggcaggacacaaactggtacgtgacaggccatcaaagcggcgcggttaaggtatggaagatgttgcactgctcgtctgatgaagcagtaaatagcaagagcaaatcacctgcggtatcgtctggtgggcttagcctgaacggccaagcaccagagtataggctacttctgcagaaggtgctcaagtcacacaaacaccctgtcactgccctttgtataccaccggacttgaagcagcttctgagtggggatggcagcggtcacttgctctcatggtcattgaaagacgacagtttcaagggttcatagctcagagaaatatagggattcagctgcacatatagagaaacactggttaaatcttaccactgatttcttcctcgtccagaactgagcattggcgtgcattgacaaaagagctcggatcagcaagcttctacatggtatatgaaatgttcccttgatgtcccatgcctgggccatacagcagtccgggcaggagagagaatacaacagacacaattggaaggatgaagtggacgtggatgcgctgctgcgctgacatcataatcttatactgtgaattatgagatggttgtaccttctcttgtttttttgaggagaaaaggattcatgtgggctgtaggtgccattgtttgtaaagtctatacagggtaattttggtggtgccggttgaggtggctgatggtgtagtgtctcgatgttttgttcggggttgtgggagcaaggaaagaggtattagtttcattttctccccccacctctggaggctagtttgggagccacaaaaccgaaagtgattggatggactaaaagcttctacatattcaaaattgaataagaacgagattttaatcacttcaatcctcttcgattttgtggcttccaaactagccccagaagtgttgattctttgactgggtgtaatttgagcacccttgtgttcagtaagtctatttgcgtatacatgcaagagttttgctgaacaaagcgacg

SEQ ID NO: 11127 - DNA, 8854 bp, Zea Mays
caaggctcaagcctcaagccaacaaccgaatagagagagcagaggacgcactacaaggccgcacagacggagcagagcagctagaggagagaggcggcgtcgcggcgaggtggaagagagagagagagagagagtggtgaaggtgcgtgggttaaaaagaggaaacaaaaaagaaaacgagcgaggcagaaaacacaagcaaagagacgacagcaaaaataggaggccggaggcgggcgaggaacgtgaataaaatatcattcggagaaacaagagaggccggggaatcgcgtcggaattccggcgaatcggcgggatccggccgggatctgcgcgccggatgaggggtcggcaccatgaaatggtccacattactcagtaaggtcgtcttcgccggcggccagcagcagcagccgccacctccgccgtcgccgccgccggagtctccgttccacggccagcaggcggtccaggacctcgccaccccgaggctcagctccgcctccaccggcggggacgagggcggcttcgacgcggcggccgggagctcgccctctgccgctgcgtcctctgccagggggagaaatgaattggagtcggactttaggagattatgggaagaatttcgctcttccagctctgaaaaggagaaagaaagggccttaaatttggctgtagatgtcttctgtaggctagtgaagcagtattctagtgtagctcaattagttacaaagttagtagaaggacatattttttcttttgttattggaagagcttttgttactgatgtggagaaactaagaatccacagcaaaggaagaccgctgcgtgtggctgatgttattggcttcttttcggataccacagagcttggtatatgtccaggatcaaatttgttgtacgcagtcgaagtgcttgtgactgagacaaatgataggcaacctctgttggactctggtattttgtgctgccttatatatatcctcaattctctattgagccccaatgagaactccacagataccttgcctgttcaccaagaaggatccagaaatgagaaaaacaaaaatttggatcctatgcaatcacgacggcttgagattgagggaagtgtaatacatattatgaaagcactggcgagccatcaatctgctgcaccaagtttaattgaagatgatgccttacaagttcttttccacatggttgcaaatggttcactatctgtgttgtcacagttcagggatggtattgttccccttcacacaattcagctccatcgccatgcaatgcaggtccttggtcttcttcttgcaaatgacaatgggacttctgcaaaatacatcaggaagcaccagctgattaaagtacttcttatggctgtgaaagatttcaatcctcaaagcggtgatgctgcttacactatgggcattgtggatttattactggaatgtgttgagctgtcttacaggcctgagtctggggccataaggctcagggaagacatacataatgctcatggttaccagttccttgttcagtttgctcttacactttgtagcttacacaaaaatcagactctccaatcctcatccaagttagcatccgaagcggatgcatctgttccttctcacagattagaacaagatatattctcatgtgacctttcacctcagttgtctaggttgcttgatgttcttgtaaatttgtcacaaattggcccctcagaaaatggtggtgttagtagccctaaggccttgaggggttatcatcttcttgcactttttcttcataggagaatgtcactatttgatatgcaatctcttgatatcttctttcgtattgctgcctgtgaggcttcctttcctgagccacagaaatcaaagataaatcgaacagcaggctatgcgtctggaatgtccccagaggccagccttgatgatctcaccttacccaggtttgccgatgatatgtcttctgggggatcacatggggatctagatgacttttcagctcaaaaggattcatttagccacttgtctgagctggagaatgctgacttagctggtgagacttctgaattcatagtcttgtcaaatgctgatatggttgaacacattcttttggactggactatatgggttgctgctcctatatcagtgcaaataactcttcttgggtttcttgagaggatggtgtccatgcattggttcagaaatcacaaccttacaatgctgcggcgaattaatcttgttcaacatcttcttgttacgttacaacgtggtgatgttgaaattcccgtgttggagaagctagttgtgcttctaggtgtcatcctggaggatggttttctagcttctgagctggagcttgttgtaagattcataataatgacatttgatcctccagagcttacaccgaaccgccagattgtgcgggaggctatgggaaagcatgttattgtgaggaacatgttattggaaatgcttattgatctacaagtaaccataaatgctgaagagttgctggagcaatggcataaagttgtttcatccagattggtcacatatttccttgatgaagcggtacatccaactagtatgagatggatcacgactcttttaggagtttgccttacgtcatcaactacatttgcattgaagttccgtacaagtggaggttttcaaggattgaatcatgtgcttccaagctttcacgattctccagaaatatactatatattgttctgtttggtgtttgggaagcctgtttatcctcgagtgccagaggtccgcatgcttgatttccatgctctcatgcctagcgatggaaactatggagaattgaagtttgtggatctcttggatactataattgcaatggcaaaagctacatttgattccttgattatgaaatctatgcttgcacatgagaataacaatctttcacatcttaatggcaccttggtcgcggatcttgttgaggcgacatcggacatgggaggtgatcttcaaggagaagctctgatgcataagacatacgcagcaaggttaatgggtggtgaagcagcagcacctgctgttgctacttcaatattgaggttcatggttgatctggcaaagatgtgcccaccattctctgccgtttgcaggcggcatgatttcctagagagctgcattgatctctatttctcttgtgtgagatccgattttgccctgaggatggcaaaagatcttacaactgttgcaactggcgagatgaatgaacatgatgatgataatggaagtttaaaggatgccctttcaagtttaccacatgatcaggatcaatctaccaaaacattgagtgccacaagttttcctcaggagcagaaaagttccagttcagaaagtactggcatgccaaacccttttgaaactgctgaagccaaagcagatgattcttcgaatcaggagttcagcaataaaattttaaatggagaagcaaatcaaatatttaataatgctcgtgatcaagggcggatcacagcttccggtgcaaatggcatttctgaattccaccatgtaactgattcacccaactcagttgctatgaataatgttggatctcctgttttatccgagaggtcaacccacagagcagctagtacccctactgcatctccaatggccccattcacatcttggcctggcagtgcaggatcgtatactgatggtagacacctgacagcttctccatccatggcttcatctatatctgggatagacctggactcgtcccctgatctgaggacaaatattcagggaccatctgccgcaaatacccttttcccaatcaattccaagcttttgcttgacatagatgatttaggttatgggggtggcccatgctctgcaggagctacagctgttctagattttgttgctcaaattcttgctgacactatctcagatcagcttaaagcagcactctttattgagaacattttggagtccgtgcctttgtttgttgatattgactctgctctagtttttcaaggcttgtgtctaagcagattgatgaacttccttgaaagaaagctcttgcttgatgatgaagaagatgggaagaaacttgacaagagccgctggtcggtcaatttggacccactttgctggatgattgttgatcgtgtgtacatgggctgctttccaaccccactcagggtactacaaacactagaattcttaatgtcaatgttacagcttgctagtaaagatggccgtgttgaagatgccgtgcctccagggaaaggtattttgtccattgctcgaggaagcaggcaacttgatccatacatccacgcgatattgaagaacacaaaccgaatgataatgtactgtttcctcccaatattccttaaaagtatgggggaagatgatctacttgcaaatcttgcattcctgacggaaactgggaggagtttagcttctaaacgttatcaggaagatttttctattgatatttgtacagttcttcagctactagttgccaacaagagattggtgctctgcccaagcaatgttgatacagatctaatgtgttgtttctgcataaatttaatgtcacttctccatgacaagagagtaactgctcaaaacttggcagttgatttacttaaatacttggtagtgcatcgtcgtcaatctcttgaggaccttctagtttgcaagcctaaccaaggacaacaactggacatcctgcatggaggacttgataaattggtcactggaagtacatcaacgttttttgaatggctgcaaagttctcagcaaacaataagtaaagtgttggaccagtgtgctttaataatgtgggttcaatatattaccggctcagcaaaatttcctggcgtgagaataaaaggaatggaggtcaggcgcaagaaagagatgggacggaaatttcgcgaatctgcaaaagtagatgccaggcactgggagcagataaatgagcggcggtataatcttgatttggttcgtgatgtgatgtctacagagctaagagcaattcgtcaagacaaatacggttggatattgcacggagaaagtgagtggcaaagccagctccaagaacttgtccatgagagaggtatttttcctatgcggcaaccatccacagaacctgagtggcagctgtgtggtgttgaaggaccatatagaatgaggaagaaacttgagcactccaaatttaagatagatactattcagaatgttctaaccagcaaccttggatcaaatggtggtaagattatcaataaagaggatggagaattgttgttgacatctgggtcagacacaatgtcaggcttgaatcttttgacctatgacactgagcagagggatcttgatgctgtcgagttttcgtcattcaaagatgatgatgacatattcaaaggaggaagcacaatttcaggtccaattggctggactgatgataaaagcagcgttaatgagcagagccttcattctgcgacggaatttggagcaaaatcaagttccctttcttttcacatgactgagagtcaccagggtaaatctgaacttagttcaccaaggagggcaccttcagtcaaaggtactgatgcaagaacctcagaggataaatcagaaaaggagttgcttgacaatggtgagtatcttatcaggccttatctggagccctatgagaaaataaggcataaatacaactgtgaacgggttgctggtcttgataagcacgatggaatatttttaattggagaactttgcttatacattattgagaacttctacattgatgattccaattgcatttgcgaaaagggcagtgaagatgagctctctgtcattgatcaagctttaggtgtgaacaaggatataatgggaggcagtgaatctcagttaaaatcacctaccacttggggtgggacagcaaaggtcttgcttggtggcagatcatgggcatataatggaggtgcttggggtaaggagaagctttgcaacagtagcaacctgcctcatccatggcatatgtggaagcttgatagtgtccatgagttgttgaaacgtgattaccagctccgccctgttgcaattgaaattttcagcatggatggttgcaatgagcttctagttttccacaaaaaggagagagaggaagttttcaaaaatttgattgccatgaatctcccacggaatagcatgttggacacaaccatatcagcatcctctaaacaggagagtggtgaggggagccgtctttttaaagtcatggcaaaatcattttctaaaagatggcaaagtggagaaattacgaacttccaatatctcatgcatctaaatacacttgctggtcgagggtatagtgatctcacacagtacccagtatttccatgggttctcgcagattatgagagcgatgttttagatctgaggaatccacagacatttcgcaggcttgataaacccatgggatgccaaacggaggaaggtgaagaggaattctgcaagagatatgatagctgggatgaccctgatgtaccaaagttccattatggctctcattattcaagtgctggaattgtccttttctatctcttaaggttgcctccttttagcacagaaaatcagaaattgcagggtggacaatttgaccatgcagaccggttattcaacagtgtgaaggatacatgggtaagtgctgcaggcaaaagtaacacatcagatgtgaaagaactaattcctgagttctattatttgcctgaatttttggagaaccgttttaatctggatctgggcgagaaacaatcaggagagaaggttggtgatgttgttttaccaccttgggctaaaggcagcgccagagagttcatcaggaagcatcgggaagcactggaatcggattatgtatctgagaatctgcatcattggattgatcttatttttggatataagcagagaggaaagctgaagatgccgtcaatgtcttctatcactacacatatgaaggcaatgttgacatagacgcagtatcagatcctaccatgaaggcttcaatactagcacaaatcaaccattttggtcagacccccaaacagttattccagaaaccacatccacagaggcggactgacaggaaagtccctcctcatcctctacggtactgtgcctatctaacacagcaggagattcgcaagacagcatcttcggtgtcccagattgtctcctacaatgataagatcctaattgctgcagttaactgcttgctcaagccgctaacttataatgaatacatttcctggggattccctgaccgaagcttgagaatattaacatatgatcaggatagacttttgtctactcatgaaaaccttcatggtggtagtcaaattcagtgcactggagtgagccatgatggcaacattctcatcactggtggtgatgatggagttgttgcagtgtggagatttgtgaaggatggcatccgccgtctcctgagaatggagaaggctttgtgtgctcacacaggaaagataacttgcgtctctgtcagccaaccttactcattaattgtctcaggctctgatgactgttctgttatcttatgggacctgacaagcctagtctttgtgaagcagctaccaaggttcccggcatcagtatccgcgctacatgtgaacagcctcactggtgagattctgactggtgctggtgttctttttgctgtttggagcatcaatggggactgccttgctgtggtgaacacctcccagcttccttctgacctcatcttgtctgtgacaagcgcgacacactcagactggcaggacacaaactggtacgtgacaggccatcaaagcggcgcggttaaggtatggaagatgttgcactgctcgtctgatgaagcagtaaatagcaagagcaaatcacctgcggtatcgtctggtgggcttagcctgaacggccaagcaccagagtataggctacttctgcagaaggtgctcaagtcacacaaacaccctgtcactgccctttgtataccaccggacttgaagcagcttctgagtggggatggcagcggtcacttgctctcatggtcattgaaagacgacagtttcaagggttcatagctcagagaaatatagggattcagctgcacatatagagaaacactggttaaatcttaccactgatttcttcctcgtccagaactgagcattggcgtgcattgacaaaagagctcggatcagcaagcttctacatggtatatgaaatgttcccttgatgtcccatgcctgggccatacagcagtccgggcaggagagagaatacaacagacacaattggaaggatgaagtggacgtggatgcgctgctgcgctgacatcataatcttatactgtgaattatgagatggttgtaccttctcttgtttttttgaggagaaaaggattcatgtgggctgtaggtgccattgtttgtaaagtctatacagggtaattttggtggtgccggttgaggtggctgatggtgtagtgtctcgatgttttgttcggggttgtgggagcaaggaaagaggtattagtttcattttctccccccacctctggaggctagtttgggagccacaaaaccgaaagtgattggatggactaaaagcttctacatattcaaaattgaataagaacgagattttaatcacttcaatcctcttcgattttgtggcttccaaactagccccagaagtgttgattctttgactgggtgtaatttgagcacccttgtgttcagtaagtctatttgcgtatacatgcaagagttttgctgaacaaagcgacg

SEQ ID NO: 11128 - DNA, 8471 bp, Zea Mays
caaggctcaagcctcaagccaacaaccgaatagagagagcagaggacgcactacaaggccgcacagacggagcagagcagctagaggagagaggcggcgtcgcggcgaggtggaagagagagagagagagagagtggtgaaggtgcgtgggttaaaaagaggaaacaaaaaagaaaacgagcgaggcagaaaacacaagcaaagagacgacagcaaaaataggaggccggaggcgggcgaggaacgtgaataaaatatcattcggagaaacaagagaggccggggaatcgcgtcggaattccggcgaatcggcgggatccggccgggatctgcgcgccggatgaggggtcggcaccatgaaatggtccacattactcagtaaggtcgtcttcgccggcggccagcagcagcagccgccacctccgccgtcgccgccgccggagtctccgttccacggccagcaggcggtccaggacctcgccaccccgaggctcagctccgcctccaccggcggggacgagggcggcttcgacgcggcggccgggagctcgccctctgccgctgcgtcctctgccagggggagaaatgaattggagtcggactttaggagattatgggaagaatttcgctcttccagctctgaaaaggagaaagaaagggccttaaatttggctgtagatgtcttctgtaggctagtgaagcagtattctagtgtagctcaattagttacaaagttagtagaaggacatattttttcttttgttattggaagagcttttgttactgatgtggagaaactaagaatccacagcaaaggaagaccgctgcgtgtggctgatgttattggcttcttttcggataccacagagcttggtatatgtccaggatcaaatttgttgtacgcagtcgaagtgcttgtgactgagacaaatgataggcaacctctgttggactctggtattttgtgctgccttatatatatcctcaattctctattgagccccaatgagaactccacagataccttgcctgttcaccaagaaggatccagaaatgagaaaaacaaaaatttggatcctatgcaatcacgacggcttgagttcagggatggtattgttccccttcacacaattcagctccatcgccatgcaatgcaggtccttggtcttcttcttgcaaatgacaatgggacttctgcaaaatacatcaggaagcaccagctgattaaagtacttcttatggctgtgaaagatttcaatcctcaaagcggtgatgctgcttacactatgggcattgtggatttattactggaatgtgttgagctgtcttacaggcctgagtctggggccataaggctcagggaagacatacataatgctcatggttaccagttccttgttcagtttgctcttacactttgtagcttacacaaaaatcagactctccaatcctcatccaagttagcatccgaagcggatgcatctgttccttctcacagattagaacaagatatattctcatgtgacctttcacctcagttgtctaggttgcttgatgttcttgtaaatttgtcacaaattggcccctcagaaaatggtggtgttagtagccctaaggccttgaggggttatcatcttcttgcactttttcttcataggagaatgtcactatttgatatgcaatctcttgatatcttctttcgtattgctgcctgtgaggcttcctttcctgagccacagaaatcaaagataaatcgaacagcaggctatgcgtctggaatgtccccagaggccagccttgatgatctcaccttacccaggtttgccgatgatatgtcttctgggggatcacatggggatctagatgacttttcagctcaaaaggattcatttagccacttgtctgagctggagaatgctgacttagctggtgagacttctgaattcatagtcttgtcaaatgctgatatggttgaacacattcttttggactggactatatgggttgctgctcctatatcagtgcaaataactcttcttgggtttcttgagaggatggtgtccatgcattggttcagaaatcacaaccttacaatgctgcggcgaattaatcttgttcaacatcttcttgttacgttacaacgtggtgatgttgaaattcccgtgttggagaagctagttgtgcttctaggtgtcatcctggaggatggttttctagcttctgagctggagcttgttgtaagattcataataatgacatttgatcctccagagcttacaccgaaccgccagattgtgcgggaggctatgggaaagcatgttattgtgaggaacatgttattggaaatgcttattgatctacaagtaaccataaatgctgaagagttgctggagcaatggcataaagttgtttcatccagattggtcacatatttccttgatgaagcggtacatccaactagtatgagatggatcacgactcttttaggagtttgccttacgtcatcaactacatttgcattgaagttccgtacaagtggaggttttcaaggattgaatcatgtgcttccaagctttcacgattctccagaaatatactatatattgttctgtttggtgtttgggaagcctgtttatcctcgagtgccagaggtccgcatgcttgatttccatgctctcatgcctagcgatggaaactatggagaattgaagtttgtggatctcttggatactataattgcaatggcaaaagctacatttgattccttgattatgaaatctatgcttgcacatgagaataacaatctttcacatcttaatggcaccttggtcgcggatcttgttgaggcgacatcggacatgggaggtgatcttcaaggagaagctctgatgcataagacatacgcagcaaggttaatgggtggtgaagcagcagcacctgctgttgctacttcaatattgaggttcatggttgatctggcaaagatgtgcccaccattctctgccgtttgcaggcggcatgatttcctagagagctgcattgatctctatttctcttgtgtgagatccgattttgccctgaggatggcaaaagatcttacaactgttgcaactggcgagatgaatgaacatgatgatgataatggaagtttaaaggatgccctttcaagtttaccacatgatcaggatcaatctaccaaaacattgagtgccacaagttttcctcaggagcagaaaagttccagttcagaaagtactggcatgccaaacccttttgaaactgctgaagccaaagcagatgattcttcgaatcaggagttcagcaataaaattttaaatggagaagcaaatcaaatatttaataatgctcgtgatcaagggcggatcacagcttccggtgcaaatggcatttctgaattccaccatgtaactgattcacccaactcagttgctatgaataatgttggatctcctgttttatccgagaggtcaacccacagagcagctagtacccctactgcatctccaatggccccattcacatcttggcctggcagtgcaggatcgtatactgatggtagacacctgacagcttctccatccatggcttcatctatatctgggatagacctggactcgtcccctgatctgaggacaaatattcagggaccatctgccgcaaatacccttttcccaatcaattccaagcttttgcttgacatagatgatttaggttatgggggtggcccatgctctgcaggagctacagctgttctagattttgttgctcaaattcttgctgacactatctcagatcagcttaaagcagcactctttattgagaacattttggagtccgtgcctttgtttgttgatattgactctgctctagtttttcaaggcttgtgtctaagcagattgatgaacttccttgaaagaaagctcttgcttgatgatgaagaagatgggaagaaacttgacaagagccgctggtcggtcaatttggacccactttgctggatgattgttgatcgtgtgtacatgggctgctttccaaccccactcagggtactacaaacactagaattcttaatgtcaatgttacagcttgctagtaaagatggccgtgttgaagatgccgtgcctccagggaaaggtattttgtccattgctcgaggaagcaggcaacttgatccatacatccacgcgatattgaagaacacaaaccgaatgataatgtactgtttcctcccaatattccttaaaagtatgggggaagatgatctacttgcaaatcttgcattcctgacggaaactgggaggagtttagcttctaaacgttatcaggaagatttttctattgatatttgtacagttcttcagctactagttgccaacaagagattggtgctctgcccaagcaatgttgatacagatctaatgtgttgtttctgcataaatttaatgtcacttctccatgacaagagagtaactgctcaaaacttggcagttgatttacttaaatacttggtagtgcatcgtcgtcaatctcttgaggaccttctagtttgcaagcctaaccaaggacaacaactggacatcctgcatggaggacttgataaattggtcactggaagtacatcaacgttttttgaatggctgcaaagttctcagcaaacaataagtaaagtgttggaccagtgtgctttaataatgtgggttcaatatattaccggctcagcaaaatttcctggcgtgagaataaaaggaatggaggtcaggcgcaagaaagagatgggacggaaatttcgcgaatctgcaaaagtagatgccaggcactgggagcagataaatgagcggcggtataatcttgatttggttcgtgatgtgatgtctacagagctaagagcaattcgtcaagacaaatacggttggatattgcacggagaaagtgagtggcaaagccagctccaagaacttgtccatgagagaggtatttttcctatgcggcaaccatccacagaacctgagtggcagctgtgtggtgttgaaggaccatatagaatgaggaagaaacttgagcactccaaatttaagatagatactattcagaatgttctaaccagcaaccttggatcaaatggtggtaagattatcaataaagaggatggagaattgttgttgacatctgggtcagacacaatgtcaggcttgaatcttttgacctatgacactgagcagagggatcttgatgctgtcgagttttcgtcattcaaagatgatgatgacatattcaaaggaggaagcacaatttcaggtccaattggctggactgatgataaaagcagcgttaatgagcagagccttcattctgcgacggaatttggagcaaaatcaagttccctttcttttcacatgactgagagtcaccagggtaaatctgaacttagttcaccaaggagggcaccttcagtcaaaggtactgatgcaagaacctcagaggataaatcagaaaaggagttgcttgacaatggtgagtatcttatcaggccttatctggagccctatgagaaaataaggcataaatacaactgtgaacgggttgctggtcttgataagcacgatggaatatttttaattggagaactttgcttatacattattgagaacttctacattgatgattccaattgcatttgcgaaaagggcagtgaagatgagctctctgtcattgatcaagctttaggtgtgaacaaggatataatgggaggcagtgaatctcagttaaaatcacctaccacttggggtgggacagcaaaggtcttgcttggtggcagatcatgggcatataatggaggtgcttggggtaaggagaagctttgcaacagtagcaacctgcctcatccatggcatatgtggaagcttgatagtgtccatgagttgttgaaacgtgattaccagctccgccctgttgcaattgaaattttcagcatggatggttgcaatgagcttctagttttccacaaaaaggagagagaggaagttttcaaaaatttgattgccatgaatctcccacggaatagcatgcttgataaacccatgggatgccaaacggaggaaggtgaagaggaattctgcaagagatatgatagctgggatgaccctgatgtaccaaagttccattatggctctcattattcaagtgctggaattgtccttttctatctcttaaggttgcctccttttagcacagaaaatcagaaattgcagggtggacaatttgaccatgcagaccggttattcaacagtgtgaaggatacatgggtaagtgctgcaggcaaaagtaacacatcagatgtgaaagaactaattcctgagttctattatttgcctgaatttttggagaaccgttttaatctggatctgggcgagaaacaatcaggagagaaggttggtgatgttgttttaccaccttgggctaaaggcagcgccagagagttcatcaggaagcatcgggaagcactggaatcggattatgtatctgagaatctgcatcattggattgatcttatttttggatataagcagagaggaaaggcagctgaagatgccgtcaatgtcttctatcactacacatatgaaggcaatgttgacatagacgcagtatcagatcctaccatgaaggcttcaatactagcacaaatcaaccattttggtcagacccccaaacagttattccagaaaccacatccacagaggcggactgacaggaaagtccctcctcatcctctacggtactgtgcctatctaacacagcaggagattcgcaagacagcatcttcggtgtcccagattgtctcctacaatgataagatcctaattgctgcagttaactgcttgctcaagccgctaacttataatgaatacatttcctggggattccctgaccgaagcttgagaatattaacatatgatcaggatagacttttgtctactcatgaaaaccttcatggtggtagtcaaattcagtgcactggagtgagccatgatggcaacattctcatcactggtggtgatgatggagttgttgcagtgtggagatttgtgaaggatggcatccgccgtctcctgagaatggagaaggctttgtgtgctcacacaggaaagataacttgcgtctctgtcagccaaccttactcattaattgtctcaggctctgatgactgttctgttatcttatgggacctgacaagcctagtctttgtgaagcagctaccaaggttcccggcatcagtatccgcgctacatgtgaacagcctcactggtgagattctgactggtgctggtgttctttttgctgtttggagcatcaatggggactgccttgctgtggtgaacacctcccagcttccttctgacctcatcttgtctgtgacaagcgcgacacactcagactggcaggacacaaactggtacgtgacaggccatcaaagcggcgcggttaaggtatggaagatgttgcactgctcgtctgatgaagcagtaaatagcaagagcaaatcacctgcggtatcgtctggtgggcttagcctgaacggccaagcaccagagtataggctacttctgcagaaggtgctcaagtcacacaaacaccctgtcactgccctttgtataccaccggacttgaagcagcttctgagtggggatggcagcggtcacttgctctcatggtcattgaaagacgacagtttcaagggttcatagctcagagaaatatagggattcagctgcacatatagagaaacactggttaaatcttaccactgatttcttcctcgtccagaactgagcattggcgtgcattgacaaaagagctcggatcagcaagcttctacatggtatatgaaatgttcccttgatgtcccatgcctgggccatacagcagtccgggcaggagagagaatacaacagacacaattggaaggatgaagtggacgtggatgcgctgctgcgctgacatcataatcttatactgtgaattatgagatggttgtaccttctcttgtttttttgaggagaaaaggattcatgtgggctgtaggtgccattgtttgtaaagtctatacagggtaattttggtggtgccggttgaggtggctgatggtgtagtgtctcgatgttttgttcggggttgtgggagcaaggaaagaggtattagtttcattttctccccccacctctggaggctagtttgggagccacaaaaccgaaagtgattggatggactaaaagcttctacatattcaaaattgaataagaacgagattttaatcacttcaatcctcttcgattttgtggcttccaaactagccccagaagtgttgattctttgactgggtgtaatttgagcacccttgtgttcagtaagtctatttgcgtatacatgcaagagttttgctgaacaaagcgacg

SEQ ID NO: 11129 - DNA, 8545 bp, Zea Mays
caaggctcaagcctcaagccaacaaccgaatagagagagcagaggacgcactacaaggccgcacagacggagcagagcagctagaggagagaggcggcgtcgcggcgaggtggaagagagagagagagagagagtggtgaaggtgcgtgggttaaaaagaggaaacaaaaaagaaaacgagcgaggcagaaaacacaagcaaagagacgacagcaaaaataggaggccggaggcgggcgaggaacgtgaataaaatatcattcggagaaacaagagaggccggggaatcgcgtcggaattccggcgaatcggcgggatccggccgggatctgcgcgccggatgaggggtcggcaccatgaaatggtccacattactcagtaaggtcgtcttcgccggcggccagcagcagcagccgccacctccgccgtcgccgccgccggagtctccgttccacggccagcaggcggtccaggacctcgccaccccgaggctcagctccgcctccaccggcggggacgagggcggcttcgacgcggcggccgggagctcgccctctgccgctgcgtcctctgccagggggagaaatgaattggagtcggactttaggagattatgggaagaatttcgctcttccagctctgaaaaggagaaagaaagggccttaaatttggctgtagatgtcttctgtaggctagtgaagcagtattctagtgtagctcaattagttacaaagttagtagaaggacatattttttcttttgttattggaagagcttttgttactgatgtggagaaactaagaatccacagcaaaggaagaccgctgcgtgtggctgatgttattggcttcttttcggataccacagagcttggtatatgtccaggatcaaatttgttgtacgcagtcgaagtgcttgtgactgagacaaatgataggcaacctctgttggactctggtattttgtgctgccttatatatatcctcaattctctattgagccccaatgagaactccacagataccttgcctgttcaccaagaaggatccagaaatgagaaaaacaaaaatttggatcctatgcaatcacgacggcttgagttcagggatggtattgttccccttcacacaattcagctccatcgccatgcaatgcaggtccttggtcttcttcttgcaaatgacaatgggacttctgcaaaatacatcaggaagcaccagctgattaaagtacttcttatggctgtgaaagatttcaatcctcaaagcggtgatgctgcttacactatgggcattgtggatttattactggaatgtgttgagctgtcttacaggcctgagtctggggccataaggctcagggaagacatacataatgctcatggttaccagttccttgttcagtttgctcttacactttgtagcttacacaaaaatcagactctccaatcctcatccaagttagcatccgaagcggatgcatctgttccttctcacagattagaacaagatatattctcatgtgacctttcacctcagttgtctaggttgcttgatgttcttgtaaatttgtcacaaattggcccctcagaaaatggtggtgttagtagccctaaggccttgaggggttatcatcttcttgcactttttcttcataggagaatgtcactatttgatatgcaatctcttgatatcttctttcgtattgctgcctgtgaggcttcctttcctgagccacagaaatcaaagataaatcgaacagcaggctatgcgtctggaatgtccccagaggccagccttgatgatctcaccttacccaggtttgccgatgatatgtcttctgggggatcacatggggatctagatgacttttcagctcaaaaggattcatttagccacttgtctgagctggagaatgctgacttagctggtgagacttctgaattcatagtcttgtcaaatgctgatatggttgaacacattcttttggactggactatatgggttgctgctcctatatcagtgcaaataactcttcttgggtttcttgagaggatggtgtccatgcattggttcagaaatcacaaccttacaatgctgcggcgaattaatcttgttcaacatcttcttgttacgttacaacgtggtgatgttgaaattcccgtgttggagaagctagttgtgcttctaggtgtcatcctggaggatggttttctagcttctgagctggagcttgttgtaagattcataataatgacatttgatcctccagagcttacaccgaaccgccagattgtgcgggaggctatgggaaagcatgttattgtgaggaacatgttattggaaatgcttattgatctacaagtaaccataaatgctgaagagttgctggagcaatggcataaagttgtttcatccagattggtcacatatttccttgatgaagcggtacatccaactagtatgagatggatcacgactcttttaggagtttgccttacgtcatcaactacatttgcattgaagttccgtacaagtggaggttttcaaggattgaatcatgtgcttccaagctttcacgattctccagaaatatactatatattgttctgtttggtgtttgggaagcctgtttatcctcgagtgccagaggtccgcatgcttgatttccatgctctcatgcctagcgatggaaactatggagaattgaagtttgtggatctcttggatactataattgcaatggcaaaagctacatttgattccttgattatgaaatctatgcttgcacatgagaataacaatctttcacatcttaatggcaccttggtcgcggatcttgttgaggcgacatcggacatgggaggtgatcttcaaggagaagctctgatgcataagacatacgcagcaaggttaatgggtggtgaagcagcagcacctgctgttgctacttcaatattgaggttcatggttgatctggcaaagatgtgcccaccattctctgccgtttgcaggcggcatgatttcctagagagctgcattgatctctatttctcttgtgtgagatccgattttgccctgaggatggcaaaagatcttacaactgttgcaactggcgagatgaatgaacatgatgatgataatggaagtttaaaggatgccctttcaagtttaccacatgatcaggatcaatctaccaaaacattgagtgccacaagttttcctcaggagcagaaaagttccagttcagaaagtactggcatgccaaacccttttgaaactgctgaagccaaagcagatgattcttcgaatcaggagttcagcaataaaattttaaatggagaagcaaatcaaatatttaataatgctcgtgatcaagggcggatcacagcttccggtgcaaatggcatttctgaattccaccatgtaactgattcacccaactcagttgctatgaataatgttggatctcctgttttatccgagaggtcaacccacagagcagctagtacccctactgcatctccaatggccccattcacatcttggcctggcagtgcaggatcgtatactgatggtagacacctgacagcttctccatccatggcttcatctatatctgggatagacctggactcgtcccctgatctgaggacaaatattcagggaccatctgccgcaaatacccttttcccaatcaattccaagcttttgcttgacatagatgatttaggttatgggggtggcccatgctctgcaggagctacagctgttctagattttgttgctcaaattcttgctgacactatctcagatcagcttaaagcagcactctttattgagaacattttggagtccgtgcctttgtttgttgatattgactctgctctagtttttcaaggcttgtgtctaagcagattgatgaacttccttgaaagaaagctcttgcttgatgatgaagaagatgggaagaaacttgacaagagccgctggtcggtcaatttggacccactttgctggatgattgttgatcgtgtgtacatgggctgctttccaaccccactcagggtactacaaacactagaattcttaatgtcaatgttacagcttgctagtaaagatggccgtgttgaagatgccgtgcctccagggaaaggtattttgtccattgctcgaggaagcaggcaacttgatccatacatccacgcgatattgaagaacacaaaccgaatgataatgtactgtttcctcccaatattccttaaaagtatgggggaagatgatctacttgcaaatcttgcattcctgacggaaactgggaggagtttagcttctaaacgttatcaggaagatttttctattgatatttgtacagttcttcagctactagttgccaacaagagattggtgctctgcccaagcaatgttgatacagatctaatgtgttgtttctgcataaatttaatgtcacttctccatgacaagagagtaactgctcaaaacttggcagttgatttacttaaatacttggtagtgcatcgtcgtcaatctcttgaggaccttctagtttgcaagcctaaccaaggacaacaactggacatcctgcatggaggacttgataaattggtcactggaagtacatcaacgttttttgaatggctgcaaagttctcagcaaacaataagtaaagtgttggaccagtgtgctttaataatgtgggttcaatatattaccggctcagcaaaatttcctggcgtgagaataaaaggaatggaggtcaggcgcaagaaagagatgggacggaaatttcgcgaatctgcaaaagtagatgccaggcactgggagcagataaatgagcggcggtataatcttgatttggttcgtgatgtgatgtctacagagctaagagcaattcgtcaagacaaatacggttggatattgcacggagaaagtgagtggcaaagccagctccaagaacttgtccatgagagaggtatttttcctatgcggcaaccatccacagaacctgagtggcagctgtgtggtgttgaaggaccatatagaatgaggaagaaacttgagcactccaaatttaagatagatactattcagaatgttctaaccagcaaccttggatcaaatggtggtaagattatcaataaagaggatggagaattgttgttgacatctgggtcagacacaatgtcaggcttgaatcttttgacctatgacactgagcagagggatcttgatgctgtcgagttttcgtcattcaaagatgatgatgacatattcaaaggaggaagcacaatttcaggtccaattggctggactgatgataaaagcagcgttaatgagcagagccttcattctgcgacggaatttggagcaaaatcaagttccctttcttttcacatgactgagagtcaccagggtaaatctgaacttagttcaccaaggagggcaccttcagtcaaaggtactgatgcaagaacctcagaggataaatcagaaaaggagttgcttgacaatggtgagtatcttatcaggccttatctggagccctatgagaaaataaggcataaatacaactgtgaacgggttgctggtcttgataagcacgatggaatatttttaattggagaactttgcttatacattattgagaacttctacattgatgattccaattgcatttgcgaaaagggcagtgaagatgagctctctgtcattgatcaagctttaggtgtgaacaaggatataatgggaggcagtgaatctcagttaaaatcacctaccacttggggtgggacagcaaaggtcttgcttggtggcagatcatgggcatataatggaggtgcttggggtaaggagaagctttgcaacagtagcaacctgcctcatccatggcatatgtggaagcttgatagtgtccatgagttgttgaaacgtgattaccagctccgccctgttgcaattgaaattttcagcatggatggttgcaatgagcttctagttttccacaaaaaggagagagaggaagttttcaaaaatttgattgccatgaatctcccacggaatagcatgttggacacaaccatatcagcatcctctaaacaggagagtggtgaggggagccgtctttttaaagtcatggcaaaatcattttctaaaagatggcaaagtggagaaattacgaacttccaatatctcatgcatctaaatacacttgctggtcgagggtatagtgatctcacacagtacccagtatttccatgggttctcgcagattatgagagcgatgttttagatctgaggaatccacagacatttcgcaggcttgataaacccatgggatgccaaacggaggaaggtgaagaggaattctgcaagagatatgatagctgggatgaccctgatgtaccaaagttccattatggctctcattattcaagtgctggaattgtccttttctatctcttaaggttgcctccttttagcacagaaaatcagaaattgcagggtggacaatttgaccatgcagaccggttattcaacagtgtgaaggatacatgggtaagtgctgcaggcaaaagtaacacatcagatgtgaaagaactaattcctgagttctattatttgcctgaatttttggagaaccgttttaatctggatctgggcgagaaacaatcaggagagaaggttggtgatgttgttttaccaccttgggctaaaggcagcgccagagagttcatcaggaagcatcgggaagcactggaatcggattatgtatctgagaatctgcatcattggattgatcttatttttggatataagcagagaggaaagtccctcctcatcctctacggtactgtgcctatctaacacagcaggagattcgcaagacagcatcttcggtgtcccagattgtctcctacaatgataagatcctaattgctgcagttaactgcttgctcaagccgctaacttataatgaatacatttcctggggattccctgaccgaagcttgagaatattaacatatgatcaggatagacttttgtctactcatgaaaaccttcatggtggtagtcaaattcagtgcactggagtgagccatgatggcaacattctcatcactggtggtgatgatggagttgttgcagtgtggagatttgtgaaggatggcatccgccgtctcctgagaatggagaaggctttgtgtgctcacacaggaaagataacttgcgtctctgtcagccaaccttactcattaattgtctcaggctctgatgactgttctgttatcttatgggacctgacaagcctagtctttgtgaagcagctaccaaggttcccggcatcagtatccgcgctacatgtgaacagcctcactggtgagattctgactggtgctggtgttctttttgctgtttggagcatcaatggggactgccttgctgtggtgaacacctcccagcttccttctgacctcatcttgtctgtgacaagcgcgacacactcagactggcaggacacaaactggtacgtgacaggccatcaaagcggcgcggttaaggtatggaagatgttgcactgctcgtctgatgaagcagtaaatagcaagagcaaatcacctgcggtatcgtctggtgggcttagcctgaacggccaagcaccagagtataggctacttctgcagaaggtgctcaagtcacacaaacaccctgtcactgccctttgtataccaccggacttgaagcagcttctgagtggggatggcagcggtcacttgctctcatggtcattgaaagacgacagtttcaagggttcatagctcagagaaatatagggattcagctgcacatatagagaaacactggttaaatcttaccactgatttcttcctcgtccagaactgagcattggcgtgcattgacaaaagagctcggatcagcaagcttctacatggtatatgaaatgttcccttgatgtcccatgcctgggccatacagcagtccgggcaggagagagaatacaacagacacaattggaaggatgaagtggacgtggatgcgctgctgcgctgacatcataatcttatactgtgaattatgagatggttgtaccttctcttgtttttttgaggagaaaaggattcatgtgggctgtaggtgccattgtttgtaaagtctatacagggtaattttggtggtgccggttgaggtggctgatggtgtagtgtctcgatgttttgttcggggttgtgggagcaaggaaagaggtattagtttcattttctccccccacctctggaggctagtttgggagccacaaaaccgaaagtgattggatggactaaaagcttctacatattcaaaattgaataagaacgagattttaatcacttcaatcctcttcgattttgtggcttccaaactagccccagaagtgttgattctttgactgggtgtaatttgagcacccttgtgttcagtaagtctatttgcgtatacatgcaagagttttgctgaacaaagcgacg

SEQ ID NO: 11130 - DNA, 1204 bp, Zea Mays
ggctaagacaaaaaatacccctcaacaccatggtgccaaaggagcaagccgcagcttgagtgcctgggacagtcgtacgtgaccgctcatgctggcgggaaagccaatggcatcaggtggtgtcacagaccaggtaacgtcaccaggtggtaacactgtgcacacattgaagggaaaatctggtgacaaatttgagtttaaagctccgaagggtggcatgtacaagttctgcttccataacccatatggagcacctgaaactgtttctttctacattcatgttgggcacatacccaatgagcacaatctggcgaaagatgagcacttggaccctatcaacgttaaaatcgcggagctgaaggaagtattagaatccgtcaccgccgagcagaagtacctaaaagcacgcgaagctcgtcatagacacactaatgagagcaccagaaagcgtgtcatgttctacacaatggcggagtacatagctttcgtggctgctagcacgttgcaagtcctctacatccgccgcatgttcagtaagaatgtgggatacaacagagtgtaggatacagctctacttcaaaggcgacagtggaagaagcaccacatggtcggaacgggaaacattctctgccaatttgacaaattgtagctctgcaccctctttctttttgttagtttacaagaaacacttttacatttatcatgtacttttagcaacacttgcgatatgttacgtgcatttgatgctgaacatagttccagaattaattttcagagaatttgtagtattgttctgcttccgatttttttgattgttaatcatgtggtgtctttaagaatgattatgcctcgatcccattgttaggagcagaagagtgttacatctgactgtaggaccatagcgacattgggaaacactgatgaacacaataatttgtttaatggaaaccatgtatatgtacttataaatcctgatcagaattccacatcacacttgcagtgcacatttcctggcatctggcacaggagggattaagtgtttttaactgtataaagaaatggcaaattggtaagcatggtcgactgttagtttctaaaaaaacgtactaatttactccctccggtttcctattagttgtcgtttaggacaacgacacggtttccaaaatataactttgaccaatgttttttattaaaatataaa

SEQ ID NO: 11131 - DNA, 2003 bp, Zea Mays
ctactggtaaaggtcccgacgacgcggtatcgccgtatacccgcctcaagtacaaagggaaagctgcgactcgctcggaagtggggtactgtacttcccgctcgctcgctctctgctctggtccttcacgctctaaccttcagttgaggttctctaatcgggcccgctaaagtcgagagacaggttttcgcgaacatttgcatctagccatctctactcaactgaattcttgtgctcttgtggcattcacaaagtccattttcagactgagctagttcagctgtcatttttttttcagccaaaggtcgcgttcttttggacctgctcttgattcgttcgttcgttcgtttggattgattgattgattgattcctttcgacttcccttcaccacccccctgctccgtcaagcgtgcctctgttcttctgccattgctggatcgcgtttgtctgtttgttgggttgctggcgctgcggccatggatcccttccacggcattgtgaaggaggagttcgacttggacttcgacttcacctgcgcgtctgcggcggcggcggcggcggcctcgtgggccgtcgccttgccggagatgccccggccgatggaaggactcggcgaggtgggacccactccgttcctgaccaagacatacgacgtcgtggacgaccccaacaccgacaccatcgtctcttgggggttcgccggaaccagcttcgtcgtctgggacgccaacgccttcgccttggtgatcctcccacgctacttcaagcacagcaacttctccagcttcgtccgccagctcaacacctacgactcgttcgttgcaggggttcaggaaggttgacccggacaggtgggagttcgcgaacgaggggttccagcgtggccagagggagctcctcaggacgatcaagcgccggcgcccgccgtcgagcccgtcggcgcagcaggggcaggcgccgtcggcctgcctggaggtggggcagttcgggctcgacggcgaggtgcaccggctgcagcgcgacagggggatcctgctcgcggaggtggtgaagctgcggcaggagcagcaggcgacgcgcgcgcagatgcaggccatggagaagcgcatcaccacggcggagcagaagcagcagcagatgacggtgttcctcgcgcgtgccatgaagaacccgagcttcatccggatgctggtcgaccgggagggccttggcggctgccgcagggagctcgaggacgcgctctccagaaagcgccgccgccccatcgagtacctcccgcgcgacggcgagagaagcggcactgccacggagtcggcggtgagcgactacatttccggacttccggtcggcgtcaacggcgtggcggaggcggacgacgacgagagacggtgggagagaaggggcggcggcggcggcggcgaggacacggagagcttctgggcgaagttgctcaacctcggcctggaggagaagcacagggagggcagatgcgatggcgaggaggggaacggagctgacgtggacaacgacgtggacgacgacgtggatgtgctggtgcagagcatctaccacttgaacccgaacccgggtagccccggtggcaagtgaaagttccagaacgttccacattccagaacccactatggtctatggaagtggaagctcccagtgggcatcgcaattagtcgtaggcgatagttttttatccggcgcctgacttcttgtcgcggggctatgcaagttgcaaaagtgcttgcgtttggccggttgccaaggaatgttcgggatgctcgtcgaactacgaagcttctagaagatggagcagcgaggctgcagcctactcgtatattactatcagggagcaggcgagcagcaaggctgcagcctactcgtatatttactatcaatggcgcgggcttcttcgctgcggtttagtccgactacggggtttacagctacggctacaatcaggatgaaacaaaggcacttctcaaatgtgta

SEQ ID NO: 11132 - DNA, 1943 bp, Zea Mays
cttgcctactggtaaaggtcccgacgacgcggtatcgccgtatacccgcctcaagtacaaagggaaagctgcgactcgctcggaagtgggaaccttcagttgaggttctctaatcgggcccgctaaagtcgagagacaggttttcgcgaacatttgcatctagccatctctactcaactgaattcttgtgctcttgtggcattcacaaagtccattttcagactgagctagttcagctgtcatttttttttcagccaaaggtcgcgttcttttggacctgctcttgattcgttcgttcgttcgtttggattgattgattgattgattcctttcgacttcccttcaccacccccctgctccgtcaagcgtgcctctgttcttctgccattgctggatcgcgtttgtctgtttgttgggttgctggcgctgcggccatggatcccttccacggcattgtgaaggaggagttcgacttggacttcgacttcacctgcgcgtctgcggcggcggcggcggcggcctcgtgggccgtcgccttgccggagatgccccggccgatggaaggactcggcgaggtgggacccactccgttcctgaccaagacatacgacgtcgtggacgaccccaacaccgacaccatcgtctcttgggggttcgccggaaccagcttcgtcgtctgggacgccaacgccttcgccttggtgatcctcccacgctacttcaagcacagcaacttctccagcttcgtccgccagctcaacacctacgggttcaggaaggttgacccggacaggtgggagttcgcgaacgaggggttccagcgtggccagagggagctcctcaggacgatcaagcgccggcgcccgccgtcgagcccgtcggcgcagcaggggcaggcgccgtcggcctgcctggaggtggggcagttcgggctcgacggcgaggtgcaccggctgcagcgcgacagggggatcctgctcgcggaggtggtgaagctgcggcaggagcagcaggcgacgcgcgcgcagatgcaggccatggagaagcgcatcaccacggcggagcagaagcagcagcagatgacggtgttcctcgcgcgtgccatgaagaacccgagcttcatccggatgctggtcgaccgggagggccttggcggctgccgcagggagctcgaggacgcgctctccagaaagcgccgccgccccatcgagtacctcccgcgcgacggcgagagaagcggcactgccacggagtcggcggtgagcgactacatttccggacttccggtcggcgtcaacggcgtggcggaggcggacgacgacgagagacggtgggagagaaggggcggcggcggcggcggcgaggacacggagagcttctgggcgaagttgctcaacctcggcctggaggagaagcacagggagggcagatgcgatggcgaggaggggaacggagctgacgtggacaacgacgtggacgacgacgtggatgtgctggtgcagagcatctaccacttgaacccgaacccgggtagccccggtggcaagtgaaagttccagaacgttccacattccagaacccactatggtctatggaagtggaagctcccagtgggcatcgcaattagtcgtaggcgatagttttttatccggcgcctgacttcttgtcgcggggctatgcaagttgcaaaagtgcttgcgtttggccggttgccaaggaatgttcgggatgctcgtcgaactacgaagcttctagaagatggagcagcgaggctgcagcctactcgtatattactatcagggagcaggcgagcagcaaggctgcagcctactcgtatatttactatcaatggcgcgggcttcttcgctgcggtttagtccgactacggggtttacagctacggctacaatcaggatgaaacaaaggcacttctcaaatgtgta

SEQ ID NO: 11133 - DNA, 1809 bp, Zea Mays
cctgccccagcaccagctattcttggaagctctgcatgcatctgggtgggaggacaggcgccgcgccgagacccgaaagtaaggggatccacaaagaacaacgctcgccgtagcccgtagcctttccgcccgtgtcgtgctcgcgcttcagagcgtcctgcagtctccatggccgccgcagtcgacaccgcggccgtggcgggcgcgaccgggaggctcagggtgttcttcctgccctccttcatccggggacacctcatcccgcagaccgacatggcgtgccgcgtcgccgcggcaaggcccgcggaggtggaggcgaccgtggtcgtgacgccggccaacgcggccctcatcgcgccgaccgtggcgcgcgccgcggccgccggccacgccgtgcgcgtgctctgctacccgttcccggacgtcggcctcggggagggcgtggagtgcctcgccaccgccaccgcgcgcgacgcgtggcgcgtctaccgcgccatggaggtggtgcagccgtcccacgagtcgctgctccgggaccaccgccccgacgccatcgtcgccgacgtgccgttctggtggaccaccggtgtcgccgccgagctcggggtgccgcgcctcacgttccaccctgtcggaatcttcgctctgctcgccatgaacagcctgttcaccatacggcccgacatcatcggccgggccagctccgacgccgctgggacggtgctgtccgtgccgggcttgcccgggaaggagatcacgatcccggtgtccgagctcccgaccttcttggtccaggacgaccacctctccaaggcgtggcagcggatgagggcgtgccagctcactggcttcggcgtcatcgtcaacaccttcgccgacctggagcagccctactgcgaggaattcagccgcgtggaggcgcgccgcgcctacttcgtcgggcccctgggaaagccatcgcgctccaccatgcaccgcggcggcagcggcaacgcggactgcctgagctggttgtccaccaaaccgagccggtcggtagtgttcgtctgcttcgggagctgggccgagttctcagcgactcagacaagagagctcgccctggggctcgaggcgtcgaaccagccattcctgtgggttgtccgctccaatgactccagcgatgaccagtgggcaccggagggctgggagcagcgcgtcgccaaccgtggcctggtcgtccacggatgggccccgcagctggccgttctggcccacccgtcggtgggcgcgttcgtgacgcactgcggttggaactcggtcctcgaagccgcgtccgccggcgtgccggtgctcacgtggccgttagtgttcgagcagttcatcaacgagcggctggccaccgaggtggccgccttcggcgtgcgcctgtgggacggcggcaggcgcagcgagagggccgaggatgcggagatcgtgccggcggaggcgatcgcgcgggccgtggccggtttcatggaaggcggagagcagcgcgacaagttgaacgccagggccggggaactagcggagcgcgcgcgcgccgctgtcagtgaggacgggtcgtcgtggcgtgacataaaccgcctgatcgatgatctcctgcaggcgagagcgtcagggctgccacaaatgaattccgtccagcttgagtgatttaaattattctacacagacattgtacgcaaatgcaaggctagaaaataaagagtgaagttaaggtggtgtttggttcatctaaatgtaacgtaaatagtttacatgggtaatggataccgctaattttatttaaaa

SEQ ID NO: 11134 - DNA, 2223 bp, Zea Mays
caaaaccaagcgcgcctactgcagacattaccgaacagtggtgctgtatatactagtggccttttttccaattccgatctacactcaaaggtgaattctactagtttgagattttggaggacctaccataattctgggaagtttgatttgactgatctgacgcatcctcatatgtggtacccgaaagctcgagaaaagaagcgtaatgtgtttttacatgttggccctacaaatagtgggaaaacttatagtgctctcaagaggctagaagcaagctcttcaggtgtgtactgtggacctctgagattgttagcaagagaggtagcccaaaggttaaacaaagttaacgtcccttgtaacctgattactggacaagaaaggaatgaaattgaaggtgcaaaacatagctcagtgacagttgagatggctgatatgacaactaactatcaatgtgctgttattgatgaaattcagatggttggctgtaaatcaaggggttattcgttcacacgtgcacttctgggactttgttcagatgaacttcatgtctgcggtgacccagctgctgttccccttatccagcgaattcttgaagctactggtgatgtagttacggttcaatattatgagagactatctcctttggttcctctgaaatctccacttgggtctttctctaacatcaaggcaggagattgtttagtatcattctcaagacgtggaatttataaactcaagaaaagaattgaaagggagggaaaacatctttgctctgtggtctatggttcattgccaccagaaactcgaacaaagcaggcgacaatgttcaatgatgataccagtgaccttaatgtgctagtagctagtgatgctattggaatgggtcttaacctgaacatttccagaattattttctctactatgatgaagtttgatggtttctgcaacagggaactaactgtggccgaaatcaaacagattgctggtagggctggaagatatggatctaagttccctgttggagaagtgacctgtctaaatcctcaagatctcccattgctgcactcgtctctgaaatcagcttcctccattatagagcgtgctggactttttcccacatttgatttattatctttgtattcacgattacatggaactgacttttttcaccctatactggaacgtttcttggagaaggctaaactatcaccagactatttcattactgattgtgaagatatgttgaaggttgctgctattgttgatgatttacctcttgggttgtatgataaatacctcttctgtatgagtccggtggactttgcagaaaattatgcaaggaaaggaattgttcgacttaaagaaatattcacacctggaacattacaggttcctaaaacagacaatcaactcaaggagcttgaatctgttcacaaggtcctagagttatatgtgtggttaagcttcagaatggatgattcctttccagaccgtgaagtagctgcctctcaaaagtcaatctgtagcatgttgatcgaagaatatctggagaggtttggatggcagccacaagaccgaagaaaggttttgggtggagcacaaaagctgctccaagaatacgatgtatcacaaatgaacaaatattttcaagaagtcaacccaggaccgaagtagaaggactatacaggaaatgagcctcaccacttccagtccagatttgaggaaccaataccatccagagcatttgcgttctgcctcactggttatggatcaccggcacaaagtggaactacacttcggacgaccgaagatatacgtggacgcatctcaaaccgtgatcatctagattgatttggcagcacgcatttccatcagccagatcgtgatcgactagtaggacttttttccccaaaaatgaaactacactccagtcttaagtcataatgaatacagagccatgagcccatgatagggccgcttctgagacggagattgtgtattaacgggtacacagacggtacttgcattctagtctgagttcgatgagttgcagcaatagcggctgtaatcctgtatataaagagggaaaataatgttgcttgtgctgttatttattgcaagatctgaatgtttgtgtccaatgacaatttagtagacattttacatgcactaactaatagctaatggcccgtgtgtacctttgtatatatcctttcagatttt

SEQ ID NO: 11135 - DNA, 2283 bp, Zea Mays
ggtgccatgtgttcggtagaatgccaaaaccaagcgcgcctactgcagacattaccgaacagtggtgctgtatatactagtggccttttttccaattccgatctacactcaaaggtgaattctactagtttgagattttggaggacctaccataattctgggaagtttgatttgactgatctgacgcatcctcatatgtggtacccgaaagctcgagaaaagaagcgtaatgtgtttttacatgttggccctacaaatagtgggaaaacttatagtgctctcaagaggctagaagcaagctcttcaggtgtgtactgtggacctctgagattgttagcaagagaggtagcccaaaggttaaacaaagttaacgtcccttgtaacctgattactggacaagaaaggaatgaaattgaaggtgcaaaacatagctcagtgacagttgagatggctgatatgacaactaactatcaatgtgctgttattgatgaaattcagatggttggctgtaaatcaaggggttattcgttcacacgtgcacttctgggactttgttcagatgaacttcatgtctgcggtgacccagctgctgttccccttatccagcgaattcttgaagctactggtgatgtagttacggttcaatattatgagagactatctcctttggttcctctgaaatctccacttgggtctttctctaacatcaaggcaggagattgtttagtatcattctcaagacgtggaatttataaactcaagaaaagaattgaaagggagggaaaacatctttgctctgtggtctatggttcattgccaccagaaactcgaacaaagcaggcgacaatgttcaatgatgataccagtgaccttaatgtgctagtagctagtgatgctattggaatgggtcttaacctgaacatttccagaattattttctctactatgatgaagtttgatggtttctgcaacagggaactaactgtggccgaaatcaaacagattgctggtagggctggaagatatggatctaagttccctgttggagaagtgacctgtctaaatcctcaagatctcccattgctgcactcgtctctgaaatcagcttcctccattatagagcgtgctggactttttcccacatttgatttattatctttgtattcacgattacatggaactgacttttttcaccctatactggaacgtttcttggagaaggctaaactatcaccagactatttcattactgattgtgaagatatgttgaaggttgctgctattgttgatgatttacctcttgggttgtatgataaatacctcttctgtatgagtccggtggacgtaagtgatgatatatctgcccaaggactagttcagtttgcagaaaattatgcaaggaaaggaattgttcgacttaaagaaatattcacacctggaacattacaggttcctaaaacagacaatcaactcaaggagcttgaatctgttcacaaggtcctagagttatatgtgtggttaagcttcagaatggatgattcctttccagaccgtgaagtagctgcctctcaaaagtcaatctgtagcatgttgatcgaagaatatctggagaggtttggatggcagccacaagaccgaagaaaggttttgggtggagcacaaaagctgctccaagaatacgatgtatcacaaatgaacaaatattttcaagaagtcaacccaggaccgaagtagaaggactatacaggaaatgagcctcaccacttccagtccagatttgaggaaccaataccatccagagcatttgcgttctgcctcactggttatggatcaccggcacaaagtggaactacacttcggacgaccgaagatatacgtggacgcatctcaaaccgtgatcatctagattgatttggcagcacgcatttccatcagccagatcgtgatcgactagtaggacttttttccccaaaaatgaaactacactccagtcttaagtcataatgaatacagagccatgagcccatgatagggccgcttctgagacggagattgtgtattaacgggtacacagacggtacttgcattctagtctgagttcgatgagttgcagcaatagcggctgtaatcctgtatataaagagggaaaataatgttgcttgtgctgttatttattgcaagatctgaatgtttgtgtccaatgacaatttagtagacattttacatgcactaactaatagctaatggcccgtgtgtacctttgtatatatcctttcagatttt

SEQ ID NO: 11136 - DNA, 2491 bp, Zea Mays
tctccgcttcctccgctgcctcgctttccggcgaaagtatcggccgctgcgtcctccacacctaccccacaggcgcattgttcggctgtttccgtctccccgaacggccgaaccctgtcgtttgcccgggcgcctcgctgtcgtcgagtctgaaccgtgctgcgtcgcggagggaagtgagtgacatagagataggggaaaaggaagatcagatataatggcggttgccgtcctgttgcggcagagggcgctctcgtcgccccacgcggtctcatgccgaaatgctgtatatactagtggccttttttccaattccgatctacactcaaaggtgaattctactagtttgagattttggaggacctaccataattctgggaagtttgatttgactgatctgacgcatcctcatatgtggtacccgaaagctcgagaaaagaagcgtaatgtgtttttacatgttggccctacaaatagtgggaaaacttatagtgctctcaagaggctagaagcaagctcttcaggtgtgtactgtggacctctgagattgttagcaagagaggtagcccaaaggttaaacaaagttaacgtcccttgtaacctgattactggacaagaaaggaatgaaattgaaggtgcaaaacatagctcagtgacagttgagatggctgatatgacaactaactatcaatgtgctgttattgatgaaattcagatggttggctgtaaatcaaggggttattcgttcacacgtgcacttctgggactttgttcagatgaacttcatgtctgcggtgacccagctgctgttccccttatccagcgaattcttgaagctactggtgatgttcaatattatgagagactatctcctttggttcctctgaaatctccacttgggtctttctctaacatcaaggcaggagattgtttagtatcattctcaagacgtggaatttataaactcaagaaaagaattgaaagggagggaaaacatctttgctctgtggtctatggttcattgccaccagaaactcgaacaaagcaggcgacaatgttcaatgatgataccagtgaccttaatgtgctagtagctagtgatgctattggaatgggtcttaacctgaacatttccagaattattttctctactatgatgaagtttgatggtttctgcaacagggaactaactgtggccgaaatcaaacagattgctggtagggctggaagatatggatctaagttccctgttggagaagtgacctgtctaaatcctcaagatctcccattgctgcactcgtctctgaaatcagcttcctccattatagagcgtgctggactttttcccacatttgatttattatctttgtattcacgattacatggaactgacttttttcaccctatactggaacgtttcttggagaaggctaaactatcaccagactatttcattactgattgtgaagatatgttgaaggttgctgctattgttgatgatttacctcttgggttgtatgataaatacctcttctgtatgagtccggtggacgtaagtgatgatatatctgcccaaggactagttcagtttgcagaaaattatgcaaggaaaggaattgttcgacttaaagaaatattcacacctggaacattacaggttcctaaaacagacaatcaactcaaggagcttgaatctgttcacaaggtcctagagttatatgtgtggttaagcttcagaatggatgattcctttccagaccgtgaagtagctgcctctcaaaagtcaatctgtagcatgttgatcgaagaatatctggagaggtttggatggcagccacaagaccgaagaaaggttttgggtggagcacaaaagctgctccaagaatacgatgtatcacaaatgaacaaatattttcaagaagtcaacccaggaccgaagtagaaggactatacaggaaatgagcctcaccacttccagtccagatttgaggaaccaataccatccagagcatttgcgttctgcctcactggttatggatcaccggcacaaagtggaactacacttcggacgaccgaagatatacgtggacgcatctcaaaccgtgatcatctagattgatttggcagcacgcatttccatcagccagatcgtgatcgactagtaggacttttttccccaaaaatgaaactacactccagtcttaagtcataatgaatacagagccatgagcccatgatagggccgcttctgagacggagattgtgtattaacgggtacacagacggtacttgcattctagtctgagttcgatgagttgcagcaatagcggctgtaatcctgtatataaagagggaaaataatgttgcttgtgctgttatttattgcaagatctgaatgtttgtgtccaatgacaatttagtagacattttacatgcactaactaatagctaatggcccgtgtgtacctttgtatatatcctttcagatttt

SEQ ID NO: 11137 - DNA, 2878 bp, Zea Mays
atgttgacgggcgatctagccagttgcatgatctacctgcgtttgagggttgctctgtgctcctgcaagaaaaatacggacccggccgttcaacgaactcaatcattggatcatctgttgagcttgagcaggagaggacaagattttgctgctgggcctgccaagcactggtcgacagcaaatctacgcgccagcggacccggaatttaccgctgccgtgcatgggctccaacgccagagcatgagccgcggacggtaaggtaacacacaacgcaaggagctcaagatcgagctgcgttgcgagggcagagaaagagatgggcagtgcagtgatgatgaagataaggacctgcctgccctttgaaaacgcgcgcacacacaaaccaacactgacatcaccggtgggggctggggaggagagggagagccttctttaagatcagtagatcaccacaccctcacccctcctcattgcccccctcacacacacacacactcactctctctctctctctctctctctctctctctctctccattgtgtcactgtaactagcaattgagctcttaaaattttggttgaggtgcagtagcaaggcacactactacgatctacaaacaagatgatcagttgatgcccggtgtcttcaggatcttttcagctgtatatactagtggccttttttccaattccgatctacactcaaaggtgaattctactagtttgagattttggaggacctaccataattctgggaagtttgatttgactgatctgacgcatcctcatatgtggtacccgaaagctcgagaaaagaagcgtaatgtgtttttacatgttggccctacaaatagtgggaaaacttatagtgctctcaagaggctagaagcaagctcttcaggtgtgtactgtggacctctgagattgttagcaagagaggtagcccaaaggttaaacaaagttaacgtcccttgtaacctgattactggacaagaaaggaatgaaattgaaggtgcaaaacatagctcagtgacagttgagatggctgatatgacaactaactatcaatgtgctgttattgatgaaattcagatggttggctgtaaatcaaggggttattcgttcacacgtgcacttctgggactttgttcagatgaacttcatgtctgcggtgacccagctgctgttccccttatccagcgaattcttgaagctactggtgatgtagttacggttcaatattatgagagactatctcctttggttcctctgaaatctccacttgggtctttctctaacatcaaggcaggagattgtttagtatcattctcaagacgtggaatttataaactcaagaaaagaattgaaagggagggaaaacatctttgctctgtggtctatggttcattgccaccagaaactcgaacaaagcaggcgacaatgttcaatgatgataccagtgaccttaatgtgctagtagctagtgatgctattggaatgggtcttaacctgaacatttccagaattattttctctactatgatgaagtttgatggtttctgcaacagggaactaactgtggccgaaatcaaacagattgctggtagggctggaagatatggatctaagttccctgttggagaagtgacctgtctaaatcctcaagatctcccattgctgcactcgtctctgaaatcagcttcctccattatagagcgtgctggactttttcccacatttgatttattatctttgtattcacgattacatggaactgacttttttcaccctatactggaacgtttcttggagaaggctaaactatcaccagactatttcattactgattgtgaagatatgttgaaggttgctgctattgttgatgatttacctcttgggttgtatgataaatacctcttctgtatgagtccggtggacgtaagtgatgatatatctgcccaaggactagttcagtttgcagaaaattatgcaaggaaaggaattgttcgacttaaagaaatattcacacctggaacattacaggttcctaaaacagacaatcaactcaaggagcttgaatctgttcacaaggtcctagagttatatgtgtggttaagcttcagaatggatgattcctttccagaccgtgaagtagctgcctctcaaaagtcaatctgtagcatgttgatcgaagaatatctggagaggtttggatggcagccacaagaccgaagaaaggttttgggtggagcacaaaagctgctccaagaatacgatgtatcacaaatgaacaaatattttcaagaagtcaacccaggaccgaagtagaaggactatacaggaaatgagcctcaccacttccagtccagatttgaggaaccaataccatccagagcatttgcgttctgcctcactggttatggatcaccggcacaaagtggaactacacttcggacgaccgaagatatacgtggacgcatctcaaaccgtgatcatctagattgatttggcagcacgcatttccatcagccagatcgtgatcgactagtaggacttttttccccaaaaatgaaactacactccagtcttaagtcataatgaatacagagccatgagcccatgatagggccgcttctgagacggagattgtgtattaacgggtacacagacggtacttgcattctagtctgagttcgatgagttgcagcaatagcggctgtaatcctgtatataaagagggaaaataatgttgcttgtgctgttatttattgcaagatctgaatgtttgtgtccaatgacaatttagtagacattttacatgcactaactaatagctaatggcccgtgtgtacctttgtatatatcctttcagatttt

SEQ ID NO: 11138 - DNA, 1826 bp, Zea Mays
gtctagtttgccacctttaatttagatccatgatgagataaaaacaaatgtggaacttgatttgtcagaatcgtgcagaactgataatggcattgttgccatacctgttcgtgcctattcatacggtaaaggtttgccctatgctcctgaaaattggccacgtcatggagacatatggcactggaaagttggaagcagggcttctggagcaggccattgggctgacaggtatattatgccgccatcccgttttcgtggcgctgctcctaagaagttaggatttgcaagtagaggatttgcaagtaggttacaagttgaggaattcgttaagagagaatttccggatgttgatcctagcacattcttttctatgtttatctggaagatccctgctgaaggatacaggatccaaaaaggcacccgacaagtgaggatccatgaacctgaacctgtggtggctgatccgggtggtctctgcaaggctaggaatagcttgtgcaatcttcaaagggaaggttttgttgaatcatcaccagcacgggtttgtaatatctgctgcaaagagcctggtttctgtcgtgagtgctgctgccttctctgtaacaggaccgttgattattctcttggaagttacagctgcataaaatgtgaggcagttgtggaagagaacttaatatgtgggcattttgcacaccttgaatgtgctcttcgatgttacatggctggaactgttggaggaagttttggcttggatgtccaatatttatgcaggctctgtgataacaaaaccaacttaatgacacatgtggagaaactcatggaaacatgccaatctcttgaatctagggaccaaatcaaacctatgctgaatttgggattatgcctcttgcgtggatcaaaacaaatgagagcaagaaacttggagaaccatatgagatcagcaatggaaaagctggaatgtggatttgattttgttgaagtctggaaattggaaggtgacgagggcaggacaacactcaatgcaggagagaattccccaaccaccaatggtgtgactgtgcttggggctcggcaagttcctgaagcgggtgcacttacagggcatcctgatctgatagatccactggttgataatgacttcgagacggttatagaaaaccttccagtgttcattactggagatcagaatgccgcgtctgctaaatttgaggatgagatagatcttgctcttcaagaactgaaaaaatctcaggaagcggaatatagcgtggcggagcagaagctttacgcccagaaagaccacatcctctgtctgtacaggcagcttgacgctgaaagggctgaacttgcagatcccatgcccttgtctgatgcttcaaattatggtgcgatgctcgctaatgttctaagccgcgtggaccaagtcaagcgtgaggaggagaaatttaggtctatgctgaaagttgctggcggatttgcgaaagcaccacaaagcgtcaccagggagatgttcggattacctgctgataagtagttgtaatagcagacttgcttggaacttaactatctgtagtttaccatagaaccaaacttggctgtgttgttatagctgtatgagctgtacatcctaccgacgggttaccccataaagactggtttggatgaaaccagcaagtgctgcggatgcgcaggttctctatggacctgcttgtactaactactaagattcgttaaatgtgacattctaaatggaccgaacctggacctccacattttccttaccaggcgataattatgttacactcgtctaacctgtgttttgtcga

SEQ ID NO: 11139 - DNA, 2745 bp, Zea Mays
gacgttttaccgtgtaacatcgccgtcccttttccaccatctactatagaaccaaacgacaactgacgccacttcgagtcgcgcccggcgtccccaactccaccgacgccgagcacaaccgttgtttccggctggtcctccactggccgctcctcagtcagtcccggattctcccttgggtctggagtggaatggaggttaatccgatcatggggtgatttcctcttttaactggtgagtaatcgtaggttagctgggcggattgctccgggtatgagttggtttcgtaatctccatccggatcagcgcagccggagctcaaaggtgcctgtggagtttattacatcaagaattttgggttcgacataatccccatgtcccccaataagtccggccatgcttcaggccgtgacgcggttttctggtccgatagaatgaacgaatatcttattgattcgctgcttcaccagcaagccattgggaacaggagtgagtccaaattctcatcggtggcatatgatagcatcatcaccggtgtgggtgagaggtttggcgtggtgatcgaccggaacaatataaaaaatcgcctaaagcatatcaaggaatcgttcaatgaatgtaggaacctccttggtgaagataatcggtttaggtggtgcccagagagcagaagattcaatgccgacccaaatgtttggagggagttgatcgagagaaaaccagaagcaaagaaatggatgatgaagacgattgaccattatgatagcttaatggatctatttggtaagaatagggagaaacgtcaagacgttgagaactcaaaaggtacctcgaagaaaaaggcgcgaacagaaccgccaaaggagatacttcaacgtactccattaaatcggaaggggtcagctcttgccgaaagttcagataagacggtggacaaatgtgagatccatgatgagataaaaacaaatgtggaacttgatttgtcagaatcgtgcagaactgataatggcattgttgccatacctgttcgtgcctattcatacggtaaaggtttgccctatgctcctgaaaattggccacgtcatggagacatatggcactggaaagttggaagcagggcttctggagcaggccattgggctgacaggtatattatgccgccatcccgttttcgtggcgctgctcctaagaagttaggatttgcaagtagaggatttgcaagtaggttacaagttgaggaattcgttaagagagaatttccggatgttgatcctagcacattcttttctatgtttatctggaagatccctgctgaaggatacaggatccaaaaaggcacccgacaagtgaggatccatgaacctgaacctgtggtggctgatccgggtggtctctgcaaggctaggaatagcttgtgcaatcttcaaagggaaggttttgttgaatcatcaccagcacgggtttgtaatatctgctgcaaagagcctggtttctgtcgtgagtgctgctgccttctctgtaacaggaccgttgattattctcttggaagttacagctgcataaaatgtgaggcagttgtggaagagaacttaatatgtgggcattttgcacaccttgaatgtgctcttcgatgttacatggctggaactgttggaggaagttttggcttggatgtccaatatttatgcaggctctgtgataacaaaaccaacttaatgacacatgtggagaaactcatggaaacatgccaatctcttgaatctagggaccaaatcaaacctatgctgaatttgggattatgcctcttgcgtggatcaaaacaaatgagagcaagaaacttggagaaccatatgagatcagcaatggaaaagctggaatgtggatttgattttgttgaagtctggaaattggaaggtgacgagggcaggacaacactcaatgcaggagagaattccccaaccaccaatggtgtgactgtgcttggggctcggcaagttcctgaagcgggtgcacttacagggcatcctgatctgatagatccactggttgataatgacttcgagacggttatagaaaaccttccagtgttcattactggagatcagaatgccgcgtctgctaaatttgaggatgagatagatcttgctcttcaagaactgaaaaaatctcaggaagcggaatatagcgtggcggagcagaagctttacgcccagaaagaccacatcctctgtctgtacaggcagcttgacgctgaaagggctgaacttgcagatcccatgcccttgtctgatgcttcaaattatggtgcgatgctcgctaatgttctaagccgcgtggaccaagtcaagcgtgaggaggagaaatttaggtctatgctgaaagttgctggcggatttgcgaaagcaccacaaagcgtcaccagggagatgttcggattacctgctgataagtagttgtaatagcagacttgcttggaacttaactatctgtagtttaccatagaaccaaacttggctgtgttgttatagctgtatgagctgtacatcctaccgacgggttaccccataaagactggtttggatgaaaccagcaagtgctgcggatgcgcaggttctctatggacctgcttgtactaactactaagattcgttaaatgtgacattctaaatggaccgaacctggacctccacattttccttaccaggcgataattatgttacactcgtctaacctgtgttttgtcga

SEQ ID NO: 11140 - DNA, 2673 bp, Zea Mays
gacgttttaccgtgtaacatcgccgtcccttttccaccatctactatagaaccaaacgacaactgacgccacttcgagtcgcgcccggcgtccccaactccaccgacgccgagcacaaccgttgtttccggctggtcctccactggccgctcctcagtcagtcccggattctcccttgggtctggagtggaatggaggttaatccgatcatggggtgatttcctcttttaactgcgcagccggagctcaaaggtgcctgtggagtttattacatcaagaattttgggttcgacataatccccatgtcccccaataagtccggccatgcttcaggccgtgacgcggttttctggtccgatagaatgaacgaatatcttattgattcgctgcttcaccagcaagccattgggaacaggagtgagtccaaattctcatcggtggcatatgatagcatcatcaccggtgtgggtgagaggtttggcgtggtgatcgaccggaacaatataaaaaatcgcctaaagcatatcaaggaatcgttcaatgaatgtaggaacctccttggtgaagataatcggtttaggtggtgcccagagagcagaagattcaatgccgacccaaatgtttggagggagttgatcgagagaaaaccagaagcaaagaaatggatgatgaagacgattgaccattatgatagcttaatggatctatttggtaagaatagggagaaacgtcaagacgttgagaactcaaaaggtacctcgaagaaaaaggcgcgaacagaaccgccaaaggagatacttcaacgtactccattaaatcggaaggggtcagctcttgccgaaagttcagataagacggtggacaaatgtgagatccatgatgagataaaaacaaatgtggaacttgatttgtcagaatcgtgcagaactgataatggcattgttgccatacctgttcgtgcctattcatacggtaaaggtttgccctatgctcctgaaaattggccacgtcatggagacatatggcactggaaagttggaagcagggcttctggagcaggccattgggctgacaggtatattatgccgccatcccgttttcgtggcgctgctcctaagaagttaggatttgcaagtagaggatttgcaagtaggttacaagttgaggaattcgttaagagagaatttccggatgttgatcctagcacattcttttctatgtttatctggaagatccctgctgaaggatacaggatccaaaaaggcacccgacaagtgaggatccatgaacctgaacctgtggtggctgatccgggtggtctctgcaaggctaggaatagcttgtgcaatcttcaaagggaaggttttgttgaatcatcaccagcacgggtttgtaatatctgctgcaaagagcctggtttctgtcgtgagtgctgctgccttctctgtaacaggaccgttgattattctcttggaagttacagctgcataaaatgtgaggcagttgtggaagagaacttaatatgtgggcattttgcacaccttgaatgtgctcttcgatgttacatggctggaactgttggaggaagttttggcttggatgtccaatatttatgcaggctctgtgataacaaaaccaacttaatgacacatgtggagaaactcatggaaacatgccaatctcttgaatctagggaccaaatcaaacctatgctgaatttgggattatgcctcttgcgtggatcaaaacaaatgagagcaagaaacttggagaaccatatgagatcagcaatggaaaagctggaatgtggatttgattttgttgaagtctggaaattggaaggtgacgagggcaggacaacactcaatgcaggagagaattccccaaccaccaatggtgtgactgtgcttggggctcggcaagttcctgaagcgggtgcacttacagggcatcctgatctgatagatccactggttgataatgacttcgagacggttatagaaaaccttccagtgttcattactggagatcagaatgccgcgtctgctaaatttgaggatgagatagatcttgctcttcaagaactgaaaaaatctcaggaagcggaatatagcgtggcggagcagaagctttacgcccagaaagaccacatcctctgtctgtacaggcagcttgacgctgaaagggctgaacttgcagatcccatgcccttgtctgatgcttcaaattatggtgcgatgctcgctaatgttctaagccgcgtggaccaagtcaagcgtgaggaggagaaatttaggtctatgctgaaagttgctggcggatttgcgaaagcaccacaaagcgtcaccagggagatgttcggattacctgctgataagtagttgtaatagcagacttgcttggaacttaactatctgtagtttaccatagaaccaaacttggctgtgttgttatagctgtatgagctgtacatcctaccgacgggttaccccataaagactggtttggatgaaaccagcaagtgctgcggatgcgcaggttctctatggacctgcttgtactaactactaagattcgttaaatgtgacattctaaatggaccgaacctggacctccacattttccttaccaggcgataattatgttacactcgtctaacctgtgttttgtcga

SEQ ID NO: 11141 - DNA, 668 bp, Zea Mays
cttccttcaccaccgctgaactgctacaatacatagtagcggtggcacagacctcacacacagcccacctccgacgacacggcgaaatcgaaatcgaaatcatccggggtcttccagcgatggaagcccgacccagcaggatagagtgctcagaacccaacgagcagcccgagccgaaggaccccggccgggtgttccacgccgagcgcgtcgccccgagggacgccacggagtcggtaaccgagaagctggcgcacggcggttgcggccacgacggcgtgatcgacgagacgtacgacacgaggatcaagatcgcggaggccgaggccgcgaatgatccccgagcgaagacgaacccccgcggggtgagcgcggcgctgggcatggccgcgaagcacaactgtggacacgagagcgcgcgcacgggcacggcctttccggatgaagctaagcaggattaagcttgatcgtatgtagtccagactctgtccatggactcccttgacggccggttgagtcgagttattagtgaatgaattattaatcgttgcgttatgtgctcgtggaagatcagtgttcttggttcttgctgccatccatggaacttgcacaagtatggcgacgagatttgcattgtcccactgattctaccacaacttcaatttgcc

SEQ ID NO: 11142 - DNA, 809 bp, Zea Mays
cccaaggtttatgctcaccggattttgtcgagctccatactcctgcctatatattcagtgttttgaggcatagttcagtgaagtttccttcttgcctcaggccctagccttggctcattgcttatgtgtggtgatccttgagtttgcaagcctatgtaaccttctccccaaccatcagttgacactgttcagaacttgtgcgccaactcactaggaatgccatggtgaccatgctcaccctcaccatggccaagattcctcggaggttgtctcggtcgtgtggtgcccgttccctactcctcgcagaactcccagcacgaggactgaagattcaagctgaagtggtgactgaagaggaatctactccagtggctgctgatcaagtggaggagccatctaactgggtagcttgtagagggatctagacctcttcactgcaacaaaggtgatgaggagtactctatgtgttcgtgaggctggagggcgcttccagttctagaggaggattagttaggcttatgtataagctttggagggttcctaccttcctgctattgtaataagttatgcactttgattatatcaggacttgtaataaatgtaactcttcctatgtaataaccttcagttttagaaataaaaagaatgttttgtaaagtcttccgctcttatcttcgaagtgtgtgtatcgaatgtgattactgtaatatgcatgtatggtgggagatccttgggatgatgagttcaagttgttgaactcgtgatagccttgttaagttacctggtacacgtgcatagccatctgaggc

SEQ ID NO: 11143 - DNA, 1446 bp, Zea Mays
aagtttccttcttgcctcaggccctagccttggctcattgcttatgtgtggtgatccttgagtttgcaagcctatgtaaccttctccccaaccatcagttgacactgttcagaacttgtgcgccaactcactaggaatgccatggtgaccatgctcaccctcaccatggccaagattcctcggaggttgtctcggtcgtgtggtgcccgttccctactcctcgcagaactcccagcacgaggactgaagattcaagctgaagtggtgactgaagaggaatctactccagtggctgctgatcaagtggaggagccatctaactgggtagcttgtagagggatctagacctcttcactgcaacaaaggcaagccccggtgcatgcaaccccttccttgtgtttttaaataatttttacacactttaattctagtgaaatgtgcattaggtttataggagttgcttggaaccttttgatgcattgccttccttgatatccatacctttatagatacttctggtgaagtatcacaatatgatttacaaaaatgcttagccctgctcagatcttgtggatagaggttgtcttttgcattaaggcctagctcaggggttatcctgaggaaagatggcttctacctgcaagaatattttcattgagagcgtggtgggatcttactgcaaagttccctttgatgctcttttcatcctaaggaacacaaacaatcctaaggatgaaagtacttaaatcgggacttgggctatgaacaggtgatgttctacccaggttaattaaggattggatgcgtatgtaggcctgtatgatcaaggactatcttaactggccacatgccctggatatgggacagggtaagcttgaacccggctattccatacatgaaaagacaatcgcgcactaggagtggagagatggcgagagtggcacgtaccctactggcaaaggaccgcctaaaaagggtggtgtgctctcgggtggcgcggacctgttcatgcagtggaggatccgtgggaatggttgacatatgcaagggttaagtgctacatatgtcgtgtggttagagatcctcagctgagtaaatcgattcggatcgccgttatatccccggagagtggagacttgatcgctgccctgcaacctaagtcaggatgtaaacattatgaataaaaatgatgttgtattgatgaaatggtgaaattagactagatgctaccagagtctattaatatttaatctggcgttaaaatattgaaagtaaggactcactttagtaggctatttctgcaaaagtatctaagttgattcttgctaaagccttttccttgattcctatttaaccagcatatccttgagagtcatttttccttagtcgggtaagacttgcgaaagtacacttcgtactcagggttttcgaacccatgttgttgta

SEQ ID NO: 11144 - DNA, 1752 bp, Zea Mays
gtgatcctgcattacaaggaatttctcagaatataactccatcttgggaagggagcaagtcaaatcattcaaatttttttgcaaagctgcagcctagaggcacatacttggaacatgcagaaatactactgaaatgaagaaaccttgatgtagaaaattttgcatagtccaaggactaattcgtagagtgatcagcagttgatccccaacaaaatgctgaggccaatcaactacaaaacccaaatggcatatacttcaaacttgctcaatccatgcagaataaagttttccacttttccatgtgattcaaaaccgtataccatatgcaagtcaaaatgatttactatcgacatcgtttcttgttaccagggtgcacaaaatagcaaacaaaaactcattctgcctagtcaggatgcagcaataacacaagtcaaaaagagtaacaagacacagcaacattggcataagttgcaaaaaaaaaagataaaacagtttctagttctgccactttattagtatctgcgtagccttattcttcttctgtaatctaatttttagacatcaaatttgtttttcttacacaaaagcaatttagatatggaaatggcactttcttgaaactatcaacataaatgcatccttcaaagtgatcagtaataagtaggtcaaagtagtctttgattaagatcctagcatcataattggataaaccataactgtaaagtgggcaatgcagacccagtgctggaggctcccacatgtgccccccacccacacagacaaatgtggagaggctgcttggctaagccaaaaacaacagagcatgtatagtctaatatttacttccttctataaatgggtgctacagcaaaggtagttttggtaatcactgaaggtaaacatcaacagttcaaattgtagaaaaatattgcgtagaagtggatgataacttatgcagttgtgcatgccatcccaatactggcaagccaaatagttactgtgcttttcagttttttttaaagacccacattctattttgttggcattttagatttgtgcacacatcgtatggataagtaaagatcaactactaaagtcgtatccactaactggctaaactcattgtcaccaactagaaaagcaagtacctttgcattgagtagttcacatctgttaaatgtgtcattacagaatacagatatgaccaaggatattatgtacatgaaagatgtatgcaaaaaaacatggcaaatacagggacaattgaaaacatcatggttttactactatggaaaaaaaaagaaacagaaccggctgatttagtagttaaagacagcacaagatgcacaccacatttatttcaagattcatgtttgattaccatatttgaaacaggttcatgttccttttttttgtttgttattctttgctgggtctaccaaaccaaaagagtgagctgaaaccaaagcaaagccatataataataaaacaagctcttcagaacagacttaaccacttatagttcaatgactggttatgagatttcagaatgactacacataattagattagagggaaagatacattttgttcattacaagtcagtatggaagacttatttttggtttttatcaagaccaccttttgttcaagttagatcagggtacacttgtattcgaatgattttctttctttttttcttgtataaggttccatcaacagtacaatagatgaaaacagggcgatgtgaaa

SEQ ID NO: 11145 - DNA, 1751 bp, Zea Mays
ttcacatctgcatcgttggaactttaaaaatcagaaagaaactacagtgagctcaaaacctccagaggaagcagtcaagatttcactaaaagactgtctagcatgcagtggctgtataacatcagcagagacggttatgctggagaaacaaagcttgagtgacttcattgatcacataaactctgataaagctgttattgtatctgtgtctccccagtcaagagcatcactagctgcattcttcggtctttctcagtcacaggttctcagaaagctgactgctttgttcaagtcgattggtgtaaaggctgtctttgacacaagctcgagtcgagatctatctcttattgaagcatgcaatgaatttgtttcacgttatcagaaaaaccattcatgtagtggccaagaagctggagccaatcttccaatgatttcatctgcatgcccgggttggatatgctatgctgaaaagactcttggttcatacatcctaccttacatctcatctgtgaagagcccgcaacaggcaattggtgcagccattaagcaccatgtggttgataaacttggtctaaagccgtatgatgtttatcatgtcactgtgatgccctgctatgacaagaagctagaggctgtccgggatgatttcactttctcagtagacggtaaagaggtcaaagaggtggattcagtactgacaactggtgaagtgttagacttgatacaggttaacaaatgttgatgaggaaggccatctatatggggtttctggaggttctgggggctatgcagaaacagtctttcgctatggagcaaatgtaatttacaaaagagaaatagagggtcctcttgacttcagaatcttgagaaattcagattttcgtgaaattacattggaggtggagggcaaacctgttttgaagtttgcactttgttatggattcaggaacctgcagaatattgttaggaagattaagatgggaaaatgtgaatatcactttattgaagttatggcgtgcccttcaggttgtcttaatgggggaggtcaattgaagcctgttcaaggccaatctgctaaggaacttatccagcaattagagagtgtgtacacacaagatatatcaatatcggatcctttcagtaaccctatcgcgaaaaaactatatgacgaatggctggggcaacctggttcagagaatgcaaagaagtatttgcacacagaatatcacccagtggtgaagagtgtggcctcacagttacagaactggtgatagaggtttcttgttgcactgggaactcctatgttcctcaagagccaagaggaacctgcaaaccgagcaaacatggcgacctgtccatgctaagcaaatatggatcacacaagaattaaacttactcaagtttttttggcattatggcgaagaagttttgttaacatataggttttcagctgctttctagttaaatgttgtgccagggaaacaacagctaaatcgcaatgtgtaaaatgaacgaagtaatgtgtaaaataaacaacagctaaacatggcgaccttttcattgtctggtacacgccctttgccacatttttttttttggtaaggaaggatagctcgttggttgcccgtatatgttttttagatgctcgggcatagtagagaagggaacgaaaaacatactcagtcccggtatattttagggattttaagacagataaaaaggacaacacaagagatgcacgtgcttttact

SEQ ID NO: 11146 - DNA, 1845 bp, Zea Mays
cccatgtacatttctgctaacaattagcttcacatctgcatcgttggaactttaaaaatcagaaagaaactacagtgagctcaaaacctccagaggaagcagtcaagatttcactaaaagactgtctagcatgcagtggctgtataacatcagcagagacggttatgctggagaaacaaagcttgagtgacttcattgatcacataaactctgataaagctgttattgtatctgtgtctccccagtcaagagcatcactagctgcattcttcggtctttctcagtcacaggttctcagaaagctgactgctttgttcaagtcgattggtgtaaaggctgtctttgacacaagctcgagtcgagatctatctcttattgaagcatgcaatgaatttgtttcacgttatcagaaaaaccattcatgtagtggccaagaagctggagccaatcttccaatgatttcatctgcatgcccggcctcttccacttgcaggttggatatgctatgctgaaaagactcttggttcatacatcctaccttacatctcatctgtgaagagcccgcaacaggcaattggtgcagccattaagcaccatgtggttgataaacttggtctaaagccgtatgatgtttatcatgtcactgtgatgccctgctatgacaagaagctagaggctgtccgggatgatttcactttctcagtagacggtaaagaggtcaaagaggtggattcagtactgacaactggtgaagtgttagacttgatacagtccaaatctatcgatttcaagacagtagaggaatcttcattggacagattgttaacaaatgttgatgaggaaggccatctatatggggtttctggaggttctgggggctatgcagaaacagtctttcgctatggagcaaatgtaatttacaaaagagaaatagagggtcctcttgacttcagaatcttgagaaattcagattttcgtgaaattacattggaggtggagggcaaacctgttttgaagtttgcactttgttatggattcaggaacctgcagaatattgttaggaagattaagatgggaaaatgtgaatatcactttattgaagttatggcgtgcccttcaggttgtcttaatgggggaggtcaattgaagcctgttcaaggccaatctgctaaggaacttatccagcaattagagagtgtgtacacacaagatatatcaatatcggatcctttcagtaaccctatcgcgaaaaaactatatgacgaatggctggggcaacctggttcagagaatgcaaagaagtatttgcacacagaatatcacccagtggtgaagagtgtggcctcacagttacagaactggtgatagaggtttcttgttgcactgggaactcctatgttcctcaagagccaagaggaacctgcaaaccgagcaaacatggcgacctgtccatgctaagcaaatatggatcacacaagaattaaacttactcaagtttttttggcattatggcgaagaagttttgttaacatataggttttcagctgctttctagttaaatgttgtgccagggaaacaacagctaaatcgcaatgtgtaaaatgaacgaagtaatgtgtaaaataaacaacagctaaacatggcgaccttttcattgtctggtacacgccctttgccacatttttttttttggtaaggaaggatagctcgttggttgcccgtatatgttttttagatgctcgggcatagtagagaagggaacgaaaaacatactcagtcccggtatattttagggattttaagacagataaaaaggacaacacaagagatgcacgtgcttttact

SEQ ID NO: 11147 - DNA, 2449 bp, Zea Mays
attatagaatcaaatattgtcttttcagtgttgtcttccatgttgctccaattggtaggaaccagattatgacatgtaataagtgaacatagcatcttcagatgatcacaaatatcatgtccatcttttttcacacgcgcgcgagcgcacacacacaaaaaaaactcatgttaattttgtaatgccaaggtgattctatgtagtcaataagaataccaaataccttgatctcaaagttttacggtgaaaggatagcctaatcctatttcccccttttgtatcaaactggagcaaaataacaccctacttgttacagaatagattcctgacagcatagcttcaccataatttgcatctatgaaaaacgatcgtttgtatgattcaggaaataaatttctagctttatttactttatcagaacaattagtataagtgtcacagcttaccaaatgttgcatgttttttcaagatttgacaccctggccctcatgttaatgactcacagtgactccacctgtcattgtaataggggtgtcaaatcttgaaaggcatgcaaattgggtgtcaaatatcaaaatctgttgccaagaatctacaactttgaaagtgctaaggatatacccatgtacatttctgctaacaattagcttcacatctgcatcgttggaactttaaaaatcagaaagaaactacagtgagctcaaaacctccagaggaagcagtcaagatttcactaaaagactgtctagcatgcagtggctgtataacatcagcagagacggttatgctggagaaacaaagcttgagtgacttcattgatcacataaactctgataaagctgttattgtatctgtgtctccccagtcaagagcatcactagctgcattcttcggtctttctcagtcacaggttctcagaaagctgactgctttgttcaagtcgattggtgtaaaggctgtctttgacacaagctcgagtcgagatctatctcttattgaagcatgcaatgaatttgtttcacgttatcagaaaaaccattcatgtagtggccaagaagctggagccaatcttccaatgatttcatctgcatgcccgggttggatatgctatgctgaaaagactcttggttcatacatcctaccttacatctcatctgtgaagagcccgcaacaggcaattggtgcagccattaagcaccatgtggttgataaacttggtctaaagccgtatgatgtttatcatgtcactgtgatgccctgctatgacaagaagctagaggctgtccgggatgatttcactttctcagtagacggtaaagaggtcaaagaggtggattcagtactgacaactggtgaagtgttagacttgatacagtccaaatctatcgatttcaagacagtagaggaatcttcattggacagattgttaacaaatgttgatgaggaaggccatctatatggggtttctggaggttctgggggctatgcagaaacagtctttcgctatggagcaaatgtaatttacaaaagagaaatagagggtcctcttgacttcagaatcttgagaaattcagattttcgtgaaattacattggaggtggagggcaaacctgttttgaagtttgcactttgttatggattcaggaacctgcagaatattgttaggaagattaagatgggaaaatgtgaatatcactttattgaagttatggcgtgcccttcaggttgtcttaatgggggaggtcaattgaagcctgttcaaggccaatctgctaaggaacttatccagcaattagagagtgtgtacacacaagatatatcaatatcggatcctttcagtaaccctatcgcgaaaaaactatatgacgaatggctggggcaacctggttcagagaatgcaaagaagtatttgcacacagaatatcacccagtggtgaagagtgtggcctcacagttacagaactggtgatagaggtttcttgttgcactgggaactcctatgttcctcaagagccaagaggaacctgcaaaccgagcaaacatggcgacctgtccatgctaagcaaatatggatcacacaagaattaaacttactcaagtttttttggcattatggcgaagaagttttgttaacatataggttttcagctgctttctagttaaatgttgtgccagggaaacaacagctaaatcgcaatgtgtaaaatgaacgaagtaatgtgtaaaataaacaacagctaaacatggcgaccttttcattgtctggtacacgccctttgccacatttttttttttggtaaggaaggatagctcgttggttgcccgtatatgttttttagatgctcgggcatagtagagaagggaacgaaaaacatactcagtcccggtatattttagggattttaagacagataaaaaggacaacacaagagatgcacgtgcttttact

SEQ ID NO: 11148 - DNA, 2280 bp, Zea Mays
gggcagattataatcgtgtcagtgtcacaccatgtggcctgtttgtgtttgaccaaccagctccaaagaccgaagcattcgaagtccccctgaaaccaatccaccgccgctcttcaccgccacgccggagctaccccccgccgaagtgcccgcttcccgctctcctcattcaccaccttcgtctcgcggcacgcgcttatctgaggcaacagcggccgcctcctgccccgccgcggagctatacgtggaggccggcatccccgtcgctgcccgcccgttcccaggctacccagggcagattgatctctgtaatctctgaggcggagaagaccaccccgaggcccaaacagtccgggaaccgattggggcgccgctcggccgacgatgtcgtcgagcaggttctcgccggtgctgcaggcgtccgacctcaacgacttcatcgccccgtcgcaggactgcatcatctccctcaataagaacacctcctcctcccgccgcctccagaaaaatcagaaagaaactacagtgagctcaaaacctccagaggaagcagtcaagatttcactaaaagactgtctagcatgcagtggctgtataacatcagcagagacggttatgctggagaaacaaagcttgagtgacttcattgatcacataaactctgataaagctgttattgtatctgtgtctccccagtcaagagcatcactagctgcattcttcggtctttctcagtcacaggttctcagaaagctgactgctttgttcaagtcgattggtgtaaaggctgtctttgacacaagctcgagtcgagatctatctcttattgaagcatgcaatgaatttgtttcacgttatcagaaaaaccattcatgtagtggccaagaagctggagccaatcttccaatgatttcatctgcatgcccgggttggatatgctatgctgaaaagactcttggttcatacatcctaccttacatctcatctgtgaagagcccgcaacaggcaattggtgcagccattaagcaccatgtggttgataaacttggtctaaagccgtatgatgtttatcatgtcactgtgatgccctgctatgacaagaagctagaggctgtccgggatgatttcactttctcagtagacggtaaagaggtcaaagaggtggattcagtactgacaactggtgaagtgttagacttgatacagtccaaatctatcgatttcaagacagtagaggaatcttcattggacagattgttaacaaatgttgatgaggaaggccatctatatggggtttctggaggttctgggggctatgcagaaacagtctttcgctatggagcaaatgtaatttacaaaagagaaatagagggtcctcttgacttcagaatcttgagaaattcagattttcgtgaaattacattggaggtggagggcaaacctgttttgaagtttgcactttgttatggattcaggaacctgcagaatattgttaggaagattaagatgggaaaatgtgaatatcactttattgaagttatggcgtgcccttcaggttgtcttaatgggggaggtcaattgaagcctgttcaaggccaatctgctaaggaacttatccagcaattagagagtgtgtacacacaagatatatcaatatcggatcctttcagtaaccctatcgcgaaaaaactatatgacgaatggctggggcaacctggttcagagaatgcaaagaagtatttgcacacagaatatcacccagtggtgaagagtgtggcctcacagttacagaactggtgatagaggtttcttgttgcactgggaactcctatgttcctcaagagccaagaggaacctgcaaaccgagcaaacatggcgacctgtccatgctaagcaaatatggatcacacaagaattaaacttactcaagtttttttggcattatggcgaagaagttttgttaacatataggttttcagctgctttctagttaaatgttgtgccagggaaacaacagctaaatcgcaatgtgtaaaatgaacgaagtaatgtgtaaaataaacaacagctaaacatggcgaccttttcattgtctggtacacgccctttgccacatttttttttttggtaaggaaggatagctcgttggttgcccgtatatgttttttagatgctcgggcatagtagagaagggaacgaaaaacatactcagtcccggtatattttagggattttaagacagataaaaaggacaacacaagagatgcacgtgcttttact

SEQ ID NO: 11149 - DNA, 3819 bp, Zea Mays
ggcaggctggctggctcggtgcctcccctgagttccatctcctgtcatgccgccgccgcagtagagctaacgagccacgggtagcatgcgccgcggcctgcgtcgcgggttgggcatcctcctcgtcccgctcccgcacgcacccagccgcctgccgccgatctctctcgcggctctcctcccccgacgcttcaatggcttctcccgccactccttctgcagcttccccgtcggggagcgcgccgtcgagcagttctcagacgacgaatacgaccacgagtacgaggacctccggccgtcgtcatcggtggcgaacatcgacgagtggaggtggaagctgagcatgctgcagcgcaacgcggaggaacaggagatcatctccagggaccggagggaccgccgggattatgaccagatagccaacctcgccaagaggatgggactctacagtgagatgtacggacgggtcgtggttgcgagcaaggtaccactgccgaactacaggcctgatctggatgacaagcggccgcaaagagaggtggtaatcccgctgggtttgcagaggagagttgaaggacttgtgcaggagcacctagaccgcgcattcttaccactgaataaatgtggtggcaacacaaaaaatggctctgacatgactgagaatgcgaacctggatgagcagcatgattcccttcttgatcggtcagtcatggagaagatacttcagaggaagagcattcggatgcggaattttcagagaagttggcaggaatcacccgaaggtgctaagatgctagaattccggagatcccttccagcagacaaagaaaaagaaaggcttctagcagccattgcacgcaatcaggtcattgtaatttctggtgagacagggtgtggtaaaacaacacagctgcctcagtttgtattggaatcagaaattgagtctggtcgaggggctttttgtaacataatttgtacacagccacgaagaatatctgcaatggcagttgcagaaagggtatccacagagagaggagaaaatcttggtgaatcgatttcctgttgattgtactaaaagagctgttatcacgtcgccgtgatttgaggctgatattgatgagcgctactctaaacgcggaactcttctcaagttattttggaggagcgccaactatccatattcctgggttcacacatccagtaagggcacattttttggaagacatattagagaggtcaggctacaagttgacctcaagcaatcaacttgatgattacgggcaagataaagtctggaaaactcagagacagctattgcctagaaaaaggaaaaatcaaattactacacttgtcgaggaagcccttaaaaattcaagcttcgagatctatggctccaggacacgtgattctctagtgaattggaatcctgattgcataggtttcaacctcatagaggctgttctgtgccacatatgtcgcaaagagcgacctggtgctgttttagttttcatgactggatgggacgatattagttgcttgaaggatcaactgaaagcacatccattgttaggtgatccgaatagggtttttctgcttgcatgccatggttctatggctacttctgagcagaggctaatttttgagaagccacctcctaatgttcggaaggtagtccttgccacaaatatggcagaagcaagtattacaataaatgatatcgtttttgttgttgattgtggtaaagcaaaggaaaccacatatgatgctctaaacaatactccatgcttactcccctcatggatttcgaaagcttctgcccgtcagaggaggggtagagctggccgtgtgcaacctggagaatgctaccatctgtaccctagatgtgtgtatgatgcatttgcagactatcagcttccagagcttcttagaactcctttgaattcattatgtctgcagataaaaagtttgcaagttggaagcattggggagttcctatcagctgctctacagcctccagaaccacgagctgtcgagaatgcagtggaattcttgaagatgattggagcattagatggaaatgagaaccttactgatcttggacgatacctttccatgcttccagttgatccaaaattgggaaagatgctcataatgggtgcagtttttcgatgcatagatcctatacttactgtagttgctgggcttagtgttcgggatcctttcctgttaccacaggaaaagaaggatgaacagcaaaagctagattctcagcaaaggattatagtgatcatatggcccttgttcgggcttatgaaggatggaaggatgcagagagagaagggtctgcttatgaatactgctggagaaatttcctttcttctcaaacactacaagccattcactctctccggaagcaattcagctatattttaaaggattccggtttgatagactctgatgggaatacaaacaacagtttgagccataatcaatcattggtccgcggtattatatgttctgggctttttcctgggatagcatctgttgtggtaaacagctcttgacaactactatccattttgttaggctggaattaacagttcaactgacctttttcctttgcagcatcgagaaagctccatgtcctttaagaccatggatgacgggcaagttcttctttatgcttgaatgcaaaatatcagaccatcccatatccatggctggtctttggtgagaaggtgaaggtgaatgctgtcttcatccgtgattcaaccggagtatcagactccatattgattttgtttggcggtgctgtagcaaaaggaggcatggccgggcacttgaagatgctcgatggctacattgatttcttcatggaccccagcctgtctgaatgctacctgcaacttaaagaagaactcgataaacttatacagcagaagcttgaagacccaaacttcgacatccacaaggaaggcaagtacatcctattcgccgtacaagagctcgccgccggcgacctgtgcgaagggaggttcgtgttcggccgcgagacgagccgggcccggctccggagccccgaggacgacggcaagagcaacctcataaaggacgggatgaaccccaagagcctgctgcagacgctgctgatgcgggccggccacaccccgcccaggtacaagacgaagcacctcaagacgaacgagttcagggccgtggtggagttcaaggggatgcagttcgtggggaagccgaagcggaacaagcagctcgcggagcgggacgccgccatcgaggcgctggggtggctgacgcagacctccggcgtgaaggctccggacgagaacgacgacgactcgccgctggacctgactgacagcatgctcaagctcctcaccaggccgaggcggcactcgaagaatagctctaggaaacggtgattttttgggcgaggatttgctgtagattgatcgcgcacacgcacaaaaggcatagagagagagagagagataggaaacgtcagctttggttacacgaatgcctcatggtctcgatgtgttgctttgtacattttttatttttatttttccacgctatgtcatcagaatcagaagttcctccatcctgctgattgctgtcaccgtagaacatggtttaaaaaattaaaataactgcctatagcgctgttatttctatagaaataaccttccgaagaatctaaatctacgatattacacttttaaccgctatttcagctagaactgctttagcctaatttagctttgctaaatgtcgtagctttaatgctaaacaacaaat

SEQ ID NO: 11150 - DNA, 4169 bp, Zea Mays
ggcaggctggctggctcggtgcctcccctgagttccatctcctgtcatgccgccgccgcagtagagctaacgagccacgggtagcatgcgccgcggcctgcgtcgcgggttgggcatcctcctcgtcccgctcccgcacgcacccagccgcctgccgccgatctctctcgcggctctcctcccccgacgcttcaatggcttctcccgccactccttctgcagcttccccgtcggggagcgcgccgtcgagcagttctcagacgacgaatacgaccacgagtacgaggacctccggccgtcgtcatcggtggcgaacatcgacgagtggaggtggaagctgagcatgctgcagcgcaacgcggaggaacaggagatcatctccagggaccggagggaccgccgggattatgaccagatagccaacctcgccaagaggatgggactctacagtgagatgtacggacgggtcgtggttgcgagcaaggtaccactgccgaactacaggcctgatctggatgacaagcggccgcaaagagaggtggtaatcccgctgggtttgcagaggagagttgaaggacttgtgcaggagcacctagaccgcgcattcttaccactgaataaatgtggtggcaacacaaaaaatggctctgacatgactgagaatgcgaacctggatgagcagcatgattcccttcttgatcggtcagtcatggagaagatacttcagaggaagagcattcggatgcggaattttcagagaagttggcaggaatcacccgaaggtgctaagatgctagaattccggagatcccttccagcagacaaagaaaaagaaaggcttctagcagccattgcacgcaatcaggtcattgtaatttctggtgagacagggtgtggtaaaacaacacagctgcctcagtttgtattggaatcagaaattgagtctggtcgaggggctttttgtaacataatttgtacacagccacgaagaatatctgcaatggcagttgcagaaagggtatccacagagagaggagaaaatcttggtgaatcgcttttttaataggttggctataaagtccgattggagggaattaaggggaaagatacacatttgcttttctgcaccagtggcatcttactaagacgcttactgagtgaccgaaacttgaatggtgtgactcatgtatttgttgatgagatacacgaaaggggcatgaatgaagatttcctgttgattgtactaaaagagctgttatcacgtcgccgtgatttgaggctgatattgatgagcgctactctaaacgcggaactcttctcaagttattttggaggagcgccaactatccatattcctgggttcacacatccagtaagggcacattttttggaagacatattagagaggtcaggctacaagttgacctcaagcaatcaacttgatgattacgggcaagataaagtctggaaaactcagagacagctattgcctagaaaaaggaaaaatcaaattactacacttgtcgaggaagcccttaaaaattcaagcttcgagatctatggctccaggacacgtgattctctagtgaattggaatcctgattgcataggtttcaacctcatagaggctgttctgtgccacatatgtcgcaaagagcgacctggtgctgttttagttttcatgactggatgggacgatattagttgcttgaaggatcaactgaaagcacatccattgttaggtgatccgaatagggtttttctgcttgcatgccatggttctatggctacttctgagcagaggctaatttttgagaagccacctcctaatgttcggaaggtagtccttgccacaaatatggcagaagcaagtattacaataaatgatatcgtttttgttgttgattgtggtaaagcaaaggaaaccacatatgatgctctaaacaatactccatgcttactcccctcatggatttcgaaagcttctgcccgtcagaggaggggtagagctggccgtgtgcaacctggagaatgctaccatctgtaccctagattttgcaagttggaagcattggggagttcctatcagctgctctacagcctccagaaccacgagctgtcgagaatgcagtggaattcttgaagatgattggagcattagatggaaatgagaaccttactgatcttggacgatacctttccatgcttccagttgatccaaaattgggaaagatgctcataatgggtgcagtttttcgatgcatagatcctatacttactgtagttgctgggcttagtgttcgggatcctttcctgttaccacaggaaaagaaggatgtaagccttttaatttctgctattagtgtatatatatattagtgtctgagtattggttgcgaatcaaaatttccttttgaaaaaagttatatttatgaaacagtaagggatactttagtactgaaaaaaatgcatgtggtgctttttatttagcaagaagcttattttgcatgaaggtaagaaggcttaattttcatattatactttatatattagttggcaggaacagcaaaagctagattctcagcaattatttagcaagaagcttattttgcatgaaggtaagaaggcttgtttttcatattattactttatatattagttggcaggaacagcaaaagctagattctcagcaaaggattatagtgatcatatggcccttgttcgggcttatgaaggatggaaggatgcagagagagaagggtctgcttatgaatactgctggagaaatttcctttcttctcaaacactacaagccattcactctctccggaagcaattcagctatattttaaaggattccggtttgatagactctgatgggaatacaaacaacagtttgagccataatcaatcattggtccgcggtattatatgttctgggctttttcctgggatagcatctgttgtgcatcgagaaagctccatgtcctttaagaccatggatgacgggcaagttcttctttatgctaattcagtgaatgcaaaatatcagaccatcccatatccatggctggtctttggtgagaaggtgaaggtgaatgctgtcttcatccgtgattcaaccggagtatcagactccatattgattttgtttggcggtgctgtagcaaaaggaggcatggccgggcacttgaagatgctcgatggctacattgatttcttcatggaccccagcctgtctgaatgctacctgcaacttaaagaagaactcgataaacttatacagcagaagcttgaagacccaaacttcgacatccacaaggaaggcaagtacatcctattcgccgtacaagagctcgccgccggcgacctgtgcgaagggaggttcgtgttcggccgcgagacgagccgggcccggctccggagccccgaggacgacggcaagagcaacctcataaaggacgggatgaaccccaagagcctgctgcagacgctgctgatgcgggccggccacaccccgcccaggtacaagacgaagcacctcaagacgaacgagttcagggccgtggtggagttcaaggggatgcagttcgtggggaagccgaagcggaacaagcagctcgcggagcgggacgccgccatcgaggcgctggggtggctgacgcagacctccggcgtgaaggctccggacgagaacgacgacgactcgccgctggacctgactgacagcatgctcaagctcctcaccaggccgaggcggcactcgaagaatagctctaggaaacggtgattttttgggcgaggatttgctgtagattgatcgcgcacacgcacaaaaggcatagagagagagagagagataggaaacgtcagctttggttacacgaatgcctcatggtctcgatgtgttgctttgtacattttttatttttatttttccacgctatgtcatcagaatcagaagttcctccatcctgctgattgctgtcaccgtagaacatggtttaaaaaattaaaataactgcctatagcgctgttatttctatagaaataaccttccgaagaatctaaatctacgatattacacttttaaccgctatttcagctagaactgctttagcctaatttagctttgctaaatgtcgtagctttaatgctaaacaacaaat

SEQ ID NO: 11151 - DNA, 4009 bp, Zea Mays
ggcaggctggctggctcggtgcctcccctgagttccatctcctgtcatgccgccgccgcagtagagctaacgagccacgggtagcatgcgccgcggcctgcgtcgcgggttgggcatcctcctcgtcccgctcccgcacgcacccagccgcctgccgccgatctctctcgcggctctcctcccccgacgcttcaatggcttctcccgccactccttctgcagcttccccgtcggggagcgcgccgtcgagcagttctcagacgacgaatacgaccacgagtacgaggacctccggccgtcgtcatcggtggcgaacatcgacgagtggaggtggaagctgagcatgctgcagcgcaacgcggaggaacaggagatcatctccagggaccggagggaccgccgggattatgaccagatagccaacctcgccaagaggatgggactctacagtgagatgtacggacgggtcgtggttgcgagcaaggtaccactgccgaactacaggcctgatctggatgacaagcggccgcaaagagaggtggtaatcccgctgggtttgcagaggagagttgaaggacttgtgcaggagcacctagaccgcgcattcttaccactgaataaatgtggtggcaacacaaaaaatggctctgacatgactgagaatgcgaacctggatgagcagcatgattcccttcttgatcggtcagtcatggagaagatacttcagaggaagagcattcggatgcggaattttcagagaagttggcaggaatcacccgaaggtgctaagatgctagaattccggagatcccttccagcagacaaagaaaaagaaaggcttctagcagccattgcacgcaatcaggtcattgtaatttctggtgagacagggtgtggtaaaacaacacagctgcctcagtttgtattggaatcagaaattgagtctggtcgaggggctttttgtaacataatttgtacacagccacgaagaatatctgcaatggcagttgcagaaagggtatccacagagagaggagaaaatcttggtgaatcggttggctataaagtccgattggagggaattaaggggaaagatacacatttgcttttctgcaccagtggcatcttactaagacgcttactgagtgaccgaaacttgaatggtgtgactcatgtatttgttgatgagatacacgaaaggggcatgaatgaagatttcctgttgattgtactaaaagagctgttatcacgtcgccgtgatttgaggctgatattgatgagcgctactctaaacgcggaactcttctcaagttattttggaggagcgccaactatccatattcctgggttcacacatccagtaagggcacattttttggaagacatattagagaggtcaggctacaagttgacctcaagcaatcaacttgatgattacgggcaagataaagtctggaaaactcagagacagctattgcctagaaaaaggaaaaatcaaattactacacttgtcgaggaagcccttaaaaattcaagcttcgagatctatggctccaggacacgtgattctctagtgaattggaatcctgattgcataggtttcaacctcatagaggctgttctgtgccacatatgtcgcaaagagcgacctggtgctgttttagttttcatgactggatgggacgatattagttgcttgaaggatcaactgaaagcacatccattgttaggtgatccgaatagggtttttctgcttgcatgccatggttctatggctacttctgagcagaggctaatttttgagaagccacctcctaatgttcggaaggtagtccttgccacaaatatggcagaagcaagtattacaataaatgatatcgtttttgttgttgattgtggtaaagcaaaggaaaccacatatgatgctctaaacaatactccatgcttactcccctcatggatttcgaaagcttctgcccgtcagaggaggggtagagctggccgtgtgcaacctggagaatgctaccatctgtaccctagatgtgtgtatgatgcatttgcagactatcagcttccagagcttcttagaactcctttgaattcattatgtctgcagataaaaagtttgcaagttggaagcattggggagttcctatcagctgctctacagcctccagaaccacgagctgtcgagaatgcagtggaattcttgaagatgattggagcattagatggaaatgagaaccttactgatcttggacgatacctttccatgcttccagttgatccaaaattgggaaagatgctcataatgggtgcagtttttcgatgcatagatcctatacttactgtagttgctgggcttagtgttcgggatcctttcctgttaccacaggaaaagaaggatgaacagcaaaagctagattctcagcaattatttagcaagaagcttattttgcatgaaggtaagaaggcttgtttttcatattattactttatatattagttggcaggaacagcaaaagctagattctcagcaaaggattatagtgatcatatggcccttgttcgggcttatgaaggatggaaggatgcagagagagaagggtctgcttatgaatactgctggagaaatttcctttcttctcaaacactacaagccattcactctctccggaagcaattcagctatattttaaaggattccggtttgatagactctgatgggaatacaaacaacagtttgagccataatcaatcattggtccgcggtattatatgttctgggctttttcctgggatagcatctgttgtgcatcgagaaagctccatgtcctttaagaccatggatgacgggcaagttcttctttatgcttgaatgcaaaatatcagaccatcccatatccatggctggtctttggtgagaaggtgaaggtgaatgctgtcttcatccgtgattcaaccggagtatcagactccatattgattttgtttggcggtgctgtagcaaaaggaggcatggccgggcacttgaagatgctcgatggctacattgatttcttcatggaccccagcctgtctgaatgctacctgcaacttaaagaagaactcgataaacttatacagcagaagcttgaagacccaaacttcgacatccacaaggaaggcaagtacatcctattcgccgtacaagagctcgccgccggcgacctgtgcgaagggaggttcgtgttcggccgcgagacgagccgggcccggctccggagccccgaggacgacggcaagagcaacctcataaaggacgggatgaaccccaagagcctgctgcagacgctgctgatgcgggccggccacaccccgcccaggtacaagacgaagcacctcaagacgaacgagttcagggccgtggtggagttcaaggggatgcagttcgtggggaagccgaagcggaacaagcagctcgcggagcgggacgccgccatcgaggcgctggggtggctgacgcagacctccggcgtgaaggctccggacgagaacgacgacgactcgccgctggacctgactgacagcatgctcaagctcctcaccaggccgaggcggcactcgaagaatagctctaggaaacggtgattttttgggcgaggatttgctgtagattgatcgcgcacacgcacaaaaggcatagagagagagagagagataggaaacgtcagctttggttacacgaatgcctcatggtctcgatgtgttgctttgtacattttttatttttatttttccacgctatgtcatcagaatcagaagttcctccatcctgctgattgctgtcaccgtagaacatggtttaaaaaattaaaataactgcctatagcgctgttatttctatagaaataaccttccgaagaatctaaatctacgatattacacttttaaccgctatttcagctagaactgctttagcctaatttagctttgctaaatgtcgtagctttaatgctaaacaacaaat

SEQ ID NO: 11152 - DNA, 3750 bp, Zea Mays
ggcaggctggctggctcggtgcctcccctgagttccatctcctgtcatgccgccgccgcagtagagctaacgagccacgggtagcatgcgccgcggcctgcgtcgcgggttgggcatcctcctcgtcccgctcccgcacgcacccagccgcctgccgccgatctctctcgcggctctcctcccccgacgcttcaatggcttctcccgccactccttctgcagcttccccgtcggggagcgcgccgtcgagcagttctcagacgacgaatacgaccacgagtacgaggacctccggccgtcgtcatcggtggcgaacatcgacgagtggaggtggaagctgagcatgctgcagcgcaacgcggaggaacaggagatcatctccagggaccggagggaccgccgggattatgaccagatagccaacctcgccaagaggatgggactctacagtgagatgtacggacgggtcgtggttgcgagcaaggtaccactgccgaactacaggcctgatctggatgacaagcggccgcaaagagaggtggtaatcccgctgggtttgcagaggagagttgaaggacttgtgcaggagcacctagaccgcgcattcttaccactgaataaatgtggtggcaacacaaaaaatggctctgacatgactgagaatgcgaacctggatgagcagcatgattcccttcttgatcggtcagtcatggagaagatacttcagaggaagagcattcggatgcggaattttcagagaagttggcaggaatcacccgaaggtgctaagatgctagaattccggagatcccttccagcagacaaagaaaaagaaaggcttctagcagccattgcacgcaatcaggtcattgtaatttctggtgagacagggtgtggtaaaacaacacagctgcctcagtttgtattggaatcagaaattgagtctggtcgaggggctttttgtaacataatttgtacacagccacgaagaatatctgcaatggcagttgcagaaagggtatccacagagagaggagaaaatcttggtgaatcgatttcctgttgattgtactaaaagagctgttatcacgtcgccgtgatttgaggctgatattgatgagcgctactctaaacgcggaactcttctcaagttattttggaggagcgccaactatccatattcctgggttcacacatccagtaagggcacattttttggaagacatattagagaggtcaggctacaagttgacctcaagcaatcaacttgatgattacgggcaagataaagtctggaaaactcagagacagctattgcctagaaaaaggaaaaatcaaattactacacttgtcgaggaagcccttaaaaattcaagcttcgagatctatggctccaggacacgtgattctctagtgaattggaatcctgattgcataggtttcaacctcatagaggctgttctgtgccacatatgtcgcaaagagcgacctggtgctgttttagttttcatgactggatgggacgatattagttgcttgaaggatcaactgaaagcacatccattgttaggtgatccgaatagggtttttctgcttgcatgccatggttctatggctacttctgagcagaggctaatttttgagaagccacctcctaatgttcggaaggtagtccttgccacaaatatggcagaagcaagtattacaataaatgatatcgtttttgttgttgattgtggtaaagcaaaggaaaccacatatgatgctctaaacaatactccatgcttactcccctcatggatttcgaaagcttctgcccgtcagaggaggggtagagctggccgtgtgcaacctggagaatgctaccatctgtaccctagatgtgtgtatgatgcatttgcagactatcagcttccagagcttcttagaactcctttgaattcattatgtctgcagataaaaagtttgcaagttggaagcattggggagttcctatcagctgctctacagcctccagaaccacgagctgtcgagaatgcagtggaattcttgaagatgattggagcattagatggaaatgagaaccttactgatcttggacgatacctttccatgcttccagttgatccaaaattgggaaagatgctcataatgggtgcagtttttcgatgcatagatcctatacttactgtagttgctgggcttagtgttcgggatcctttcctgttaccacaggaaaagaaggatgaacagcaaaagctagattctcagcaaaggattatagtgatcatatggcccttgttcgggcttatgaaggatggaaggatgcagagagagaagggtctgcttatgaatactgctggagaaatttcctttcttctcaaacactacaagccattcactctctccggaagcaattcagctatattttaaaggattccggtttgatagactctgatgggaatacaaacaacagtttgagccataatcaatcattggtccgcggtattatatgttctgggctttttcctgggatagcatctgttgtgcatcgagaaagctccatgtcctttaagaccatggatgacgggcaagttcttctttatgctaattcagtgaatgcaaaatatcagaccatcccatatccatggctggtctttggtgagaaggtgaaggtgaatgctgtcttcatccgtgattcaaccggagtatcagactccatattgattttgtttggcggtgctgtagcaaaaggaggcatggccgggcacttgaagatgctcgatggctacattgatttcttcatggaccccagcctgtctgaatgctacctgcaacttaaagaagaactcgataaacttatacagcagaagcttgaagacccaaacttcgacatccacaaggaaggcaagtacatcctattcgccgtacaagagctcgccgccggcgacctgtgcgaagggaggttcgtgttcggccgcgagacgagccgggcccggctccggagccccgaggacgacggcaagagcaacctcataaaggacgggatgaaccccaagagcctgctgcagacgctgctgatgcgggccggccacaccccgcccaggtacaagacgaagcacctcaagacgaacgagttcagggccgtggtggagttcaaggggatgcagttcgtggggaagccgaagcggaacaagcagctcgcggagcgggacgccgccatcgaggcgctggggtggctgacgcagacctccggcgtgaaggctccggacgagaacgacgacgactcgccgctggacctgactgacagcatgctcaagctcctcaccaggccgaggcggcactcgaagaatagctctaggaaacggtgattttttgggcgaggatttgctgtagattgatcgcgcacacgcacaaaaggcatagagagagagagagagataggaaacgtcagctttggttacacgaatgcctcatggtctcgatgtgttgctttgtacattttttatttttatttttccacgctatgtcatcagaatcagaagttcctccatcctgctgattgctgtcaccgtagaacatggtttaaaaaattaaaataactgcctatagcgctgttatttctatagaaataaccttccgaagaatctaaatctacgatattacacttttaaccgctatttcagctagaactgctttagcctaatttagctttgctaaatgtcgtagctttaatgctaaacaacaaat

SEQ ID NO: 11153 - DNA, 3823 bp, Zea Mays
ggcaggctggctggctcggtgcctcccctgagttccatctcctgtcatgccgccgccgcagtagagctaacgagccacgggtagcatgcgccgcggcctgcgtcgcgggttgggcatcctcctcgtcccgctcccgcacgcacccagccgcctgccgccgatctctctcgcggctctcctcccccgacgcttcaatggcttctcccgccactccttctgcagcttccccgtcggggagcgcgccgtcgagcagttctcagacgacgaatacgaccacgagtacgaggacctccggccgtcgtcatcggtggcgaacatcgacgagtggaggtggaagctgagcatgctgcagcgcaacgcggaggaacaggagatcatctccagggaccggagggaccgccgggattatgaccagatagccaacctcgccaagaggatgggactctacagtgagatgtacggacgggtcgtggttgcgagcaaggtaccactgccgaactacaggcctgatctggatgacaagcggccgcaaagagaggtggtaatcccgctgggtttgcagaggagagttgaaggacttgtgcaggagcacctagaccgcgcattcttaccactgaataaatgtggtggcaacacaaaaaatggctctgacatgactgagaatgcgaacctggatgagcagcatgattcccttcttgatcggtcagtcatggagaagatacttcagaggaagagcattcggatgcggaattttcagagaagttggcaggaatcacccgaaggtgctaagatgctagaattccggagatcccttccagcagacaaagaaaaagaaaggcttctagcagccattgcacgcaatcaggtcattgtaatttctggtgagacagggtgtggtaaaacaacacagctgcctcagtttgtattggaatcagaaattgagtctggtcgaggggctttttgtaacataatttgtacacagccacgaagaatatctgcaatggcagttgcagaaagggtatccacagagagaggagaaaatcttggtgaatcgtccgattggagggaattaaggggaaagatacacatttgcttttctgcaccagtggcatcttactaagacgcttactgagtgaccgaaacttgaatggtgtgactcatgtatttgttgatgagatacacgaaaggggcatgaatgaagatttcctgttgattgtactaaaagagctgttatcacgtcgccgtgatttgaggctgatattgatgagcgctactctaaacgcggaactcttctcaagttattttggaggagcgccaactatccatattcctgggttcacacatccagtaagggcacattttttggaagacatattagagaggtcaggctacaagttgacctcaagcaatcaacttgatgattacgggcaagataaagtctggaaaactcagagacagctattgcctagaaaaaggaaaaatcaaattactacacttgtcgaggaagcccttaaaaattcaagcttcgagatctatggctccaggacacgtgattctctagtgaattggaatcctgattgcataggtttcaacctcatagaggctgttctgtgccacatatgtcgcaaagagcgacctggtgctgttttagttttcatgactggatgggacgatattagttgcttgaaggatcaactgaaagcacatccattgttaggtgatccgaatagggtttttctgcttgcatgccatggttctatggctacttctgagcagaggctaatttttgagaagccacctcctaatgttcggaaggtagtccttgccacaaatatggcagaagcaagtattacaataaatgatatcgtttttgttgttgattgtggtaaagcaaaggaaaccacatatgatgctctaaacaatactccatgcttactcccctcatggatttcgaaagcttctgcccgtcagaggaggggtagagctggccgtgtgcaacctggagaatgctaccatctgtaccctagatataaaaagtttgcaagttggaagcattggggagttcctatcagctgctctacagcctccagaaccacgagctgtcgagaatgcagtggaattcttgaagatgattggagcattagatggaaatgagaaccttactgatcttggacgatacctttccatgcttccagttgatccaaaattgggaaagatgctcataatgggtgcagtttttcgatgcatagatcctatacttactgtagttgctgggcttagtgttcgggatcctttcctgttaccacaggaaaagaaggatttggcaggaacagcaaaagctagattctcagcaaaggattatagtgatcatatggcccttgttcgggcttatgaaggatggaaggatgcagagagagaagggtctgcttatgaatactgctggagaaatttcctttcttctcaaacactacaagccattcactctctccggaagcaattcagctatattttaaaggattccggtttgatagactctgatgggaatacaaacaacagtttgagccataatcaatcattggtccgcggtattatatgttctgggctttttcctgggatagcatctgttgtgcatcgagaaagctccatgtcctttaagaccatggatgacgggcaagttcttctttatgcttgaatgcaaaatatcagaccatcccatatccatggctggtctttggtgagaaggtgaaggtgaatgctgtcttcatccgtgattcaaccggagtatcagactccatattgattttgtttggcggtgctgtagcaaaaggaggcatggccgggcacttgaagatgctcgatggctacattgatttcttcatggaccccagcctgtctgaatgctacctgcaacttaaagaagaactcgataaacttatacagcagaagcttgaagacccaaacttcgacatccacaaggaaggcaagtacatcctattcgccgtacaagagctcgccgccggcgacctgtgcgaagggaggttcgtgttcggccgcgagacgagccgggcccggctccggagccccgaggacgacggcaagagcaacctcataaaggacgggatgaaccccaagagcctgctgcagacgctgctgatgcgggccggccacaccccgcccaggtacaagacgaagcacctcaagacgaacgagttcagggccgtggtggagttcaaggggatgcagttcgtggggaagccgaagcggaacaagcagctcgcggagcgggacgccgccatcgaggcgctggggtggctgacgcagacctccggcgtgaaggctccggacgagaacgacgacgactcgccgctggacctgactgacagcatgctcaagctcctcaccaggccgaggcggcactcgaagaatagctctaggaaacggtgattttttgggcgaggatttgctgtagattgatcgcgcacacgcacaaaaggcatagagagagagagagagataggaaacgtcagctttggttacacgaatgcctcatggtctcgatgtgttgctttgtacattttttatttttatttttccacgctatgtcatcagaatcagaagttcctccatcctgctgattgctgtcaccgtagaacatggtttaaaaaattaaaataactgcctatagcgctgttatttctatagaaataaccttccgaagaatctaaatctacgatattacacttttaaccgctatttcagctagaactgctttagcctaatttagctttgctaaatgtcgtagctttaatgctaaacaacaaat

SEQ ID NO: 11154 - DNA, 3922 bp, Zea Mays
ggcaggctggctggctcggtgcctcccctgagttccatctcctgtcatgccgccgccgcagtagagctaacgagccacgggtagcatgcgccgcggcctgcgtcgcgggttgggcatcctcctcgtcccgctcccgcacgcacccagccgcctgccgccgatctctctcgcggctctcctcccccgacgcttcaatggcttctcccgccactccttctgcagcttccccgtcggggagcgcgccgtcgagcagttctcagacgacgaatacgaccacgagtacgaggacctccggccgtcgtcatcggtggcgaacatcgacgagtggaggtggaagctgagcatgctgcagcgcaacgcggaggaacaggagatcatctccagggaccggagggaccgccgggattatgaccagatagccaacctcgccaagaggatgggactctacagtgagatgtacggacgggtcgtggttgcgagcaaggtaccactgccgaactacaggcctgatctggatgacaagcggccgcaaagagaggtggtaatcccgctgggtttgcagaggagagttgaaggacttgtgcaggagcacctagaccgcgcattcttaccactgaataaatgtggtggcaacacaaaaaatggctctgacatgactgagaatgcgaacctggatgagcagcatgattcccttcttgatcggtcagtcatggagaagatacttcagaggaagagcattcggatgcggaattttcagagaagttggcaggaatcacccgaaggtgctaagatgctagaattccggagatcccttccagcagacaaagaaaaagaaaggcttctagcagccattgcacgcaatcaggtcattgtaatttctggtgagacagggtgtggtaaaacaacacagctgcctcagtttgtattggaatcagaaattgagtctggtcgaggggctttttgtaacataatttgtacacagccacgaagaatatctgcaatggcagttgcagaaagggtatccacagagagaggagaaaatcttggtgaatcgcttttttaataggttggctataaagtccgattggagggaattaaggggaaagatacacatttgcttttctgcaccagtggcatcttactaagacgcttactgagtgaccgaaacttgaatggtgtgactcatgtatttgttgatgagatacacgaaaggggcatgaatgaagatttcctgttgattgtactaaaagagctgttatcacgtcgccgtgatttgaggctgatattgatgagcgctactctaaacgcggaactcttctcaagttattttggaggagcgccaactatccatattcctgggttcacacatccagtaagggcacattttttggaagacatattagagaggtcaggctacaagttgacctcaagcaatcaacttgatgattacgggcaagataaagtctggaaaactcagagacagctattgcctagaaaaaggaaaaatcaaattactacacttgtcgaggaagcccttaaaaattcaagcttcgagatctatggctccaggacacgtgattctctagtgaattggaatcctgattgcataggtttcaacctcatagaggctgttctgtgccacatatgtcgcaaagagcgacctggtgctgttttagttttcatgactggatgggacgatattagttgcttgaaggatcaactgaaagcacatccattgttaggtgatccgaatagggtttttctgcttgcatgccatggttctatggctacttctgagcagaggctaatttttgagaagccacctcctaatgttcggaaggtagtccttgccacaaatatggcagaagcaagtattacaataaatgatatcgtttttgttgttgattgtggtaaagcaaaggaaaccacatatgatgctctaaacaatactccatgcttactcccctcatggatttcgaaagcttctgcccgtcagaggaggggtagagctggccgtgtgcaacctggagaatgctaccatctgtaccctagatgtgtgtatgatgcatttgcagactatcagcttccagagcttcttagaactcctttgaattcattatgtctgcagataaaaagtttgcaagttggaagcattggggagttcctatcagctgctctacagcctccagaaccacgagctgtcgagaatgcagtggaattcttgaagatgattggagcattagatggaaatgagaaccttactgatcttggacgatacctttccatgcttccagttgatccaaaattgggaaagatgctcataatgggtgcagtttttcgatgcatagatcctatacttactgtagttgctgggcttagtgttcgggatcctttcctgttaccacaggaaaagaaggatgaacagcaaaagctagattctcagcaaaggattatagtgatcatatggcccttgttcgggcttatgaaggatggaaggatgcagagagagaagggtctgcttatgaatactgctggagaaatttcctttcttctcaaacactacaagccattcactctctccggaagcaattcagctatattttaaaggattccggtttgatagactctgatgggaatacaaacaacagtttgagccataatcaatcattggtccgcggtattatatgttctgggctttttcctgggatagcatctgttgtgcatcgagaaagctccatgtcctttaagaccatggatgacgggcaagttcttctttatgctaattcagtgaatgcaaaatatcagaccatcccatatccatggctggtctttggtgagaaggtgaaggtgaatgctgtcttcatccgtgattcaaccggagtatcagactccatattgattttgtttggcggtgctgtagcaaaaggaggcatggccgggcacttgaagatgctcgatggctacattgatttcttcatggaccccagcctgtctgaatgctacctgcaacttaaagaagaactcgataaacttatacagcagaagcttgaagacccaaacttcgacatccacaaggaaggcaagtacatcctattcgccgtacaagagctcgccgccggcgacctgtgcgaagggaggttcgtgttcggccgcgagacgagccgggcccggctccggagccccgaggacgacggcaagagcaacctcataaaggacgggatgaaccccaagagcctgctgcagacgctgctgatgcgggccggccacaccccgcccaggtacaagacgaagcacctcaagacgaacgagttcagggccgtggtggagttcaaggggatgcagttcgtggggaagccgaagcggaacaagcagctcgcggagcgggacgccgccatcgaggcgctggggtggctgacgcagacctccggcgtgaaggctccggacgagaacgacgacgactcgccgctggacctgactgacagcatgctcaagctcctcaccaggccgaggcggcactcgaagaatagctctaggaaacggtgattttttgggcgaggatttgctgtagattgatcgcgcacacgcacaaaaggcatagagagagagagagagataggaaacgtcagctttggttacacgaatgcctcatggtctcgatgtgttgctttgtacattttttatttttatttttccacgctatgtcatcagaatcagaagttcctccatcctgctgattgctgtcaccgtagaacatggtttaaaaaattaaaataactgcctatagcgctgttatttctatagaaataaccttccgaagaatctaaatctacgatattacacttttaaccgctatttcagctagaactgctttagcctaatttagctttgctaaatgtcgtagctttaatgctaaacaacaaat

SEQ ID NO: 11155 - DNA, 3836 bp, Zea Mays
ggcaggctggctggctcggtgcctcccctgagttccatctcctgtcatgccgccgccgcagtagagctaacgagccacgggtagcatgcgccgcggcctgcgtcgcgggttgggcatcctcctcgtcccgctcccgcacgcacccagccgcctgccgccgatctctctcgcggctctcctcccccgacgcttcaatggcttctcccgccactccttctgcagcttccccgtcggggagcgcgccgtcgagcagttctcagacgacgaatacgaccacgagtacgaggacctccggccgtcgtcatcggtggcgaacatcgacgagtggaggtggaagctgagcatgctgcagcgcaacgcggaggaacaggagatcatctccagggaccggagggaccgccgggattatgaccagatagccaacctcgccaagaggatgggactctacagtgagatgtacggacgggtcgtggttgcgagcaaggtaccactgccgaactacaggcctgatctggatgacaagcggccgcaaagagaggtggtaatcccgctgggtttgcagaggagagttgaaggacttgtgcaggagcacctagaccgcgcattcttaccactgaataaatgtggtggcaacacaaaaaatggctctgacatgactgagaatgcgaacctggatgagcagcatgattcccttcttgatcggtcagtcatggagaagatacttcagaggaagagcattcggatgcggaattttcagagaagttggcaggaatcacccgaaggtgctaagatgctagaattccggagatcccttccagcagacaaagaaaaagaaaggcttctagcagccattgcacgcaatcaggtcattgtaatttctggtgagacagggtgtggtaaaacaacacagctgcctcagtttgtattggaatcagaaattgagtctggtcgaggggctttttgtaacataatttgtacacagccacgaagaatatctgcaatggcagttgcagaaagggtatccacagagagaggagaaaatcttggtgaatcggttggctataaagtccgattggagggaattaaggggaaagatacacatttgcttttctgcaccagtggcatcttactaagacgcttactgagtgaccgaaacttgaatggtgtgactcatgtatttgttgatgagatacacgaaaggggcatgaatgaagatttcctgttgattgtactaaaagagctgttatcacgtcgccgtgatttgaggctgatattgatgagcgctactctaaacgcggaactcttctcaagttattttggaggagcgccaactatccatattcctgggttcacacatccagtaagggcacattttttggaagacatattagagaggtcaggctacaagttgacctcaagcaatcaacttgatgattacgggcaagataaagtctggaaaactcagagacagctattgcctagaaaaaggaaaaatcaaattactacacttgtcgaggaagcccttaaaaattcaagcttcgagatctatggctccaggacacgtgattctctagtgaattggaatcctgattgcataggtttcaacctcatagaggctgttctgtgccacatatgtcgcaaagagcgacctggtgctgttttagttttcatgactggatgggacgatattagttgcttgaaggatcaactgaaagcacatccattgttaggtgatccgaatagggtttttctgcttgcatgccatggttctatggctacttctgagcagaggctaatttttgagaagccacctcctaatgttcggaaggtagtccttgccacaaatatggcagaagcaagtattacaataaatgatatcgtttttgttgttgattgtggtaaagcaaaggaaaccacatatgatgctctaaacaatactccatgcttactcccctcatggatttcgaaagcttctgcccgtcagaggaggggtagagctggccgtgtgcaacctggagaatgctaccatctgtaccctagatataaaaagtttgcaagttggaagcattggggagttcctatcagctgctctacagcctccagaaccacgagctgtcgagaatgcagtggaattcttgaagatgattggagcattagatggaaatgagaaccttactgatcttggacgatacctttccatgcttccagttgatccaaaattgggaaagatgctcataatgggtgcagtttttcgatgcatagatcctatacttactgtagttgctgggcttagtgttcgggatcctttcctgttaccacaggaaaagaaggatttggcaggaacagcaaaagctagattctcagcaaaggattatagtgatcatatggcccttgttcgggcttatgaaggatggaaggatgcagagagagaagggtctgcttatgaatactgctggagaaatttcctttcttctcaaacactacaagccattcactctctccggaagcaattcagctatattttaaaggattccggtttgatagactctgatgggaatacaaacaacagtttgagccataatcaatcattggtccgcggtattatatgttctgggctttttcctgggatagcatctgttgtgcatcgagaaagctccatgtcctttaagaccatggatgacgggcaagttcttctttatgcttgaatgcaaaatatcagaccatcccatatccatggctggtctttggtgagaaggtgaaggtgaatgctgtcttcatccgtgattcaaccggagtatcagactccatattgattttgtttggcggtgctgtagcaaaaggaggcatggccgggcacttgaagatgctcgatggctacattgatttcttcatggaccccagcctgtctgaatgctacctgcaacttaaagaagaactcgataaacttatacagcagaagcttgaagacccaaacttcgacatccacaaggaaggcaagtacatcctattcgccgtacaagagctcgccgccggcgacctgtgcgaagggaggttcgtgttcggccgcgagacgagccgggcccggctccggagccccgaggacgacggcaagagcaacctcataaaggacgggatgaaccccaagagcctgctgcagacgctgctgatgcgggccggccacaccccgcccaggtacaagacgaagcacctcaagacgaacgagttcagggccgtggtggagttcaaggggatgcagttcgtggggaagccgaagcggaacaagcagctcgcggagcgggacgccgccatcgaggcgctggggtggctgacgcagacctccggcgtgaaggctccggacgagaacgacgacgactcgccgctggacctgactgacagcatgctcaagctcctcaccaggccgaggcggcactcgaagaatagctctaggaaacggtgattttttgggcgaggatttgctgtagattgatcgcgcacacgcacaaaaggcatagagagagagagagagataggaaacgtcagctttggttacacgaatgcctcatggtctcgatgtgttgctttgtacattttttatttttatttttccacgctatgtcatcagaatcagaagttcctccatcctgctgattgctgtcaccgtagaacatggtttaaaaaattaaaataactgcctatagcgctgttatttctatagaaataaccttccgaagaatctaaatctacgatattacacttttaaccgctatttcagctagaactgctttagcctaatttagctttgctaaatgtcgtagctttaatgctaaacaacaaat

SEQ ID NO: 11156 - DNA, 3683 bp, Zea Mays
ggcaggctggctggctcggtgcctcccctgagttccatctcctgtcatgccgccgccgcagtagagctaacgagccacgggtagcatgcgccgcggcctgcgtcgcgggttgggcatcctcctcgtcccgctcccgcacgcacccagccgcctgccgccgatctctctcgcggctctcctcccccgacgcttcaatggcttctcccgccactccttctgcagcttccccgtcggggagcgcgccgtcgagcagttctcagacgacgaatacgaccacgagtacgaggacctccggccgtcgtcatcggtggcgaacatcgacgagtggaggtggaagctgagcatgctgcagcgcaacgcggaggaacaggagatcatctccagggaccggagggaccgccgggattatgaccagatagccaacctcgccaagaggatgggactctacagtgagatgtacggacgggtcgtggttgcgagcaaggtaccactgccgaactacaggcctgatctggatgacaagcggccgcaaagagaggtggtaatcccgctgggtttgcagaggagagttgaaggacttgtgcaggagcacctagaccgcgcattcttaccactgaataaatgtggtggcaacacaaaaaatggctctgacatgactgagaatgcgaacctggatgagcagcatgattcccttcttgatcggtcagtcatggagaagatacttcagaggaagagcattcggatgcggaattttcagagaagttggcaggaatcacccgaaggtgctaagatgctagaattccggagatcccttccagcagacaaagaaaaagaaaggcttctagcagccattgcacgcaatcaggtcattgtaatttctggtgagacagggtgtggtaaaacaacacagctgcctcagtttgtattggaatcagaaattgagtctggtcgaggggctttttgtaacataatttgtacacagccacgaagaatatctgcaatggcagttgcagaaagggtatccacagagagaggagaaaatcttggtgaatcgatttcctgttgattgtactaaaagagctgttatcacgtcgccgtgatttgaggctgatattgatgagcgctactctaaacgcggaactcttctcaagttattttggaggagcgccaactatccatattcctgggttcacacatccagtaagggcacattttttggaagacatattagagaggtcaggctacaagttgacctcaagcaatcaacttgatgattacgggcaagataaagtctggaaaactcagagacagctattgcctagaaaaaggaaaaatcaaattactacacttgtcgaggaagcccttaaaaattcaagcttcgagatctatggctccaggacacgtgattctctagtgaattggaatcctgattgcataggtttcaacctcatagaggctgttctgtgccacatatgtcgcaaagagcgacctggtgctgttttagttttcatgactggatgggacgatattagttgcttgaaggatcaactgaaagcacatccattgttaggtgatccgaatagggtttttctgcttgcatgccatggttctatggctacttctgagcagaggctaatttttgagaagccacctcctaatgttcggaaggtagtccttgccacaaatatggcagaagcaagtattacaataaatgatatcgtttttgttgttgattgtggtaaagcaaaggaaaccacatatgatgctctaaacaatactccatgcttactcccctcatggatttcgaaagcttctgcccgtcagaggaggggtagagctggccgtgtgcaacctggagaatgctaccatctgtaccctagatataaaaagtttgcaagttggaagcattggggagttcctatcagctgctctacagcctccagaaccacgagctgtcgagaatgcagtggaattcttgaagatgattggagcattagatggaaatgagaaccttactgatcttggacgatacctttccatgcttccagttgatccaaaattgggaaagatgctcataatgggtgcagtttttcgatgcatagatcctatacttactgtagttgctgggcttagtgttcgggatcctttcctgttaccacaggaaaagaaggatttggcaggaacagcaaaagctagattctcagcaaaggattatagtgatcatatggcccttgttcgggcttatgaaggatggaaggatgcagagagagaagggtctgcttatgaatactgctggagaaatttcctttcttctcaaacactacaagccattcactctctccggaagcaattcagctatattttaaaggattccggtttgatagactctgatgggaatacaaacaacagtttgagccataatcaatcattggtccgcggtattatatgttctgggctttttcctgggatagcatctgttgtgcatcgagaaagctccatgtcctttaagaccatggatgacgggcaagttcttctttatgctaattcagtgaatgcaaaatatcagaccatcccatatccatggctggtctttggtgagaaggtgaaggtgaatgctgtcttcatccgtgattcaaccggagtatcagactccatattgattttgtttggcggtgctgtagcaaaaggaggcatggccgggcacttgaagatgctcgatggctacattgatttcttcatggaccccagcctgtctgaatgctacctgcaacttaaagaagaactcgataaacttatacagcagaagcttgaagacccaaacttcgacatccacaaggaaggcaagtacatcctattcgccgtacaagagctcgccgccggcgacctgtgcgaagggaggttcgtgttcggccgcgagacgagccgggcccggctccggagccccgaggacgacggcaagagcaacctcataaaggacgggatgaaccccaagagcctgctgcagacgctgctgatgcgggccggccacaccccgcccaggtacaagacgaagcacctcaagacgaacgagttcagggccgtggtggagttcaaggggatgcagttcgtggggaagccgaagcggaacaagcagctcgcggagcgggacgccgccatcgaggcgctggggtggctgacgcagacctccggcgtgaaggctccggacgagaacgacgacgactcgccgctggacctgactgacagcatgctcaagctcctcaccaggccgaggcggcactcgaagaatagctctaggaaacggtgattttttgggcgaggatttgctgtagattgatcgcgcacacgcacaaaaggcatagagagagagagagagataggaaacgtcagctttggttacacgaatgcctcatggtctcgatgtgttgctttgtacattttttatttttatttttccacgctatgtcatcagaatcagaagttcctccatcctgctgattgctgtcaccgtagaacatggtttaaaaaattaaaataactgcctatagcgctgttatttctatagaaataaccttccgaagaatctaaatctacgatattacacttttaaccgctatttcagctagaactgctttagcctaatttagctttgctaaatgtcgtagctttaatgctaaacaacaaat

SEQ ID NO: 11157 - DNA, 3670 bp, Zea Mays
ggcaggctggctggctcggtgcctcccctgagttccatctcctgtcatgccgccgccgcagtagagctaacgagccacgggtagcatgcgccgcggcctgcgtcgcgggttgggcatcctcctcgtcccgctcccgcacgcacccagccgcctgccgccgatctctctcgcggctctcctcccccgacgcttcaatggcttctcccgccactccttctgcagcttccccgtcggggagcgcgccgtcgagcagttctcagacgacgaatacgaccacgagtacgaggacctccggccgtcgtcatcggtggcgaacatcgacgagtggaggtggaagctgagcatgctgcagcgcaacgcggaggaacaggagatcatctccagggaccggagggaccgccgggattatgaccagatagccaacctcgccaagaggatgggactctacagtgagatgtacggacgggtcgtggttgcgagcaaggtaccactgccgaactacaggcctgatctggatgacaagcggccgcaaagagaggtggtaatcccgctgggtttgcagaggagagttgaaggacttgtgcaggagcacctagaccgcgcattcttaccactgaataaatgtggtggcaacacaaaaaatggctctgacatgactgagaatgcgaacctggatgagcagcatgattcccttcttgatcggtcagtcatggagaagatacttcagaggaagagcattcggatgcggaattttcagagaagttggcaggtgctaagatgctagaattccggagatcccttccagcagacaaagaaaaagaaaggcttctagcagccattgcacgcaatcaggtcattgtaatttctggtgagacagggtgtggtaaaacaacacagctgcctcagtttgtattggaatcagaaattgagtctggtcgaggggctttttgtaacataatttgtacacagccacgaagaatatctgcaatggcagttgcagaaagggtatccacagagagaggagaaaatcttggtgaatcgatttcctgttgattgtactaaaagagctgttatcacgtcgccgtgatttgaggctgatattgatgagcgctactctaaacgcggaactcttctcaagttattttggaggagcgccaactatccatattcctgggttcacacatccagtaagggcacattttttggaagacatattagagaggtcaggctacaagttgacctcaagcaatcaacttgatgattacgggcaagataaagtctggaaaactcagagacagctattgcctagaaaaaggaaaaatcaaattactacacttgtcgaggaagcccttaaaaattcaagcttcgagatctatggctccaggacacgtgattctctagtgaattggaatcctgattgcataggtttcaacctcatagaggctgttctgtgccacatatgtcgcaaagagcgacctggtgctgttttagttttcatgactggatgggacgatattagttgcttgaaggatcaactgaaagcacatccattgttaggtgatccgaatagggtttttctgcttgcatgccatggttctatggctacttctgagcagaggctaatttttgagaagccacctcctaatgttcggaaggtagtccttgccacaaatatggcagaagcaagtattacaataaatgatatcgtttttgttgttgattgtggtaaagcaaaggaaaccacatatgatgctctaaacaatactccatgcttactcccctcatggatttcgaaagcttctgcccgtcagaggaggggtagagctggccgtgtgcaacctggagaatgctaccatctgtaccctagatataaaaagtttgcaagttggaagcattggggagttcctatcagctgctctacagcctccagaaccacgagctgtcgagaatgcagtggaattcttgaagatgattggagcattagatggaaatgagaaccttactgatcttggacgatacctttccatgcttccagttgatccaaaattgggaaagatgctcataatgggtgcagtttttcgatgcatagatcctatacttactgtagttgctgggcttagtgttcgggatcctttcctgttaccacaggaaaagaaggatttggcaggaacagcaaaagctagattctcagcaaaggattatagtgatcatatggcccttgttcgggcttatgaaggatggaaggatgcagagagagaagggtctgcttatgaatactgctggagaaatttcctttcttctcaaacactacaagccattcactctctccggaagcaattcagctatattttaaaggattccggtttgatagactctgatgggaatacaaacaacagtttgagccataatcaatcattggtccgcggtattatatgttctgggctttttcctgggatagcatctgttgtgcatcgagaaagctccatgtcctttaagaccatggatgacgggcaagttcttctttatgctaattcagtgaatgcaaaatatcagaccatcccatatccatggctggtctttggtgagaaggtgaaggtgaatgctgtcttcatccgtgattcaaccggagtatcagactccatattgattttgtttggcggtgctgtagcaaaaggaggcatggccgggcacttgaagatgctcgatggctacattgatttcttcatggaccccagcctgtctgaatgctacctgcaacttaaagaagaactcgataaacttatacagcagaagcttgaagacccaaacttcgacatccacaaggaaggcaagtacatcctattcgccgtacaagagctcgccgccggcgacctgtgcgaagggaggttcgtgttcggccgcgagacgagccgggcccggctccggagccccgaggacgacggcaagagcaacctcataaaggacgggatgaaccccaagagcctgctgcagacgctgctgatgcgggccggccacaccccgcccaggtacaagacgaagcacctcaagacgaacgagttcagggccgtggtggagttcaaggggatgcagttcgtggggaagccgaagcggaacaagcagctcgcggagcgggacgccgccatcgaggcgctggggtggctgacgcagacctccggcgtgaaggctccggacgagaacgacgacgactcgccgctggacctgactgacagcatgctcaagctcctcaccaggccgaggcggcactcgaagaatagctctaggaaacggtgattttttgggcgaggatttgctgtagattgatcgcgcacacgcacaaaaggcatagagagagagagagagataggaaacgtcagctttggttacacgaatgcctcatggtctcgatgtgttgctttgtacattttttatttttatttttccacgctatgtcatcagaatcagaagttcctccatcctgctgattgctgtcaccgtagaacatggtttaaaaaattaaaataactgcctatagcgctgttatttctatagaaataaccttccgaagaatctaaatctacgatattacacttttaaccgctatttcagctagaactgctttagcctaatttagctttgctaaatgtcgtagctttaatgctaaacaacaaat

SEQ ID NO: 11158 - DNA, 4235 bp, Zea Mays
ggcaggctggctggctcggtgcctcccctgagttccatctcctgtcatgccgccgccgcagtagagctaacgagccacgggtagcatgcgccgcggcctgcgtcgcgggttgggcatcctcctcgtcccgctcccgcacgcacccagccgcctgccgccgatctctctcgcggctctcctcccccgacgcttcaatggcttctcccgccactccttctgcagcttccccgtcggggagcgcgccgtcgagcagttctcagacgacgaatacgaccacgagtacgaggacctccggccgtcgtcatcggtggcgaacatcgacgagtggaggtggaagctgagcatgctgcagcgcaacgcggaggaacaggagatcatctccagggaccggagggaccgccgggattatgaccagatagccaacctcgccaagaggatgggactctacagtgagatgtacggacgggtcgtggttgcgagcaaggtaccactgccgaactacaggcctgatctggatgacaagcggccgcaaagagaggtggtaatcccgctgggtttgcagaggagagttgaaggacttgtgcaggagcacctagaccgcgcattcttaccactgaataaatgtggtggcaacacaaaaaatggctctgacatgactgagaatgcgaacctggatgagcagcatgattcccttcttgatcggtcagtcatggagaagatacttcagaggaagagcattcggatgcggaattttcagagaagttggcaggaatcacccgaaggtgctaagatgctagaattccggagatcccttccagcagacaaagaaaaagaaaggcttctagcagccattgcacgcaatcagtaggtcattgtaatttctggtgagacagggtgtggtaaaacaacacagctgcctcagtttgtattggaatcagaaattgagtctggtcgaggggctttttgtaacataatttgtacacagccacgaagaatatctgcaatggcagttgcagaaagggtatccacagagagaggagaaaatcttggtgaatcggttggctataaagtccgattggagggaattaaggggaaagatacacatttgcttttctgcaccagtggcatcttactaagacgcttactgagtgaccgaaacttgaatggtgtgactcatgtatttgttgatgagatacacgaaaggggcatgaatgaagatttcctgttgattgtactaaaagagctgttatcacgtcgccgtgatttgaggctgatattgatgagcgctactctaaacgcggaactcttctcaagttattttggaggagcgccaactatccatattcctgggttcacacatccagtaagggcacattttttggaagacatattagagaggtcaggctacaagttgacctcaagcaatcaacttgatgattacgggcaagataaagtctggaaaactcagagacagctattgcctagaaaaaggaaaaatcaaattactacacttgtcgaggaagcccttaaaaattcaagcttcgagatctatggctccaggacacgtgattctctagtgaattggaatcctgattgcataggtttcaacctcatagaggctgttctgtgccacatatgtcgcaaagagcgacctggtgctgttttagttttcatgactggatgggacgatattagttgcttgaaggatcaactgaaagcacatccattgttaggtgatccgaatagggtttttctgcttgcatgccatggttctatggctacttctgagcagaggctaatttttgagaagccacctcctaatgttcggaaggtagtccttgccacaaatatggcagaagcaagtattacaataaatgatatcgtttttgttgttgattgtggtaaagcaaaggaaaccacatatgatgctctaaacaatactccatgcttactcccctcatggatttcgaaagcttctgcccgtcagaggaggggtagagctggccgtgtgcaacctggagaatgctaccatctgtaccctagatgtgtgtatgatgcatttgcagactatcagcttccagagcttcttagaactcctttgaattcattatgtctgcagataaaaagtttgcaagttggaagcattggggagttcctatcagctgctctacagcctccagaaccacgagctgtcgagaatgcagtggaattcttgaagatgattggagcattagatggaaatgagaaccttactgatcttggacgatacctttccatgcttccagttgatccaaaattgggaaagatgctcataatgggtgcagtttttcgatgcatagatcctatacttactgtagttgctgggcttagtgttcgggatcctttcctgttaccacaggaaaagaaggatgtaagccttttaatttctgctattagtgtatatatatattagtgtctgagtattggttgcgaatcaaaatttccttttgaaaaaagttatatttatgaaacagtaagggatactttagtactgaaaaaaatgcatgtggtgctttttatttagcaagaagcttattttgcatgaaggtaagaaggcttaattttcatattatactttatatattagttggcaggaacagcaaaagctagattctcagcaattatttagcaagaagcttattttgcatgaaggtaagaaggcttgtttttcatattattactttatatattagttggcaggaacagcaaaagctagattctcagcaaaggattatagtgatcatatggcccttgttcgggcttatgaaggatggaaggatgcagagagagaagggtctgcttatgaatactgctggagaaatttcctttcttctcaaacactacaagccattcactctctccggaagcaattcagctatattttaaaggattccggtttgatagactctgatgggaatacaaacaacagtttgagccataatcaatcattggtccgcggtattatatgttctgggctttttcctgggatagcatctgttgtgcatcgagaaagctccatgtcctttaagaccatggatgacgggcaagttcttctttatgcttgaatgcaaaatatcagaccatcccatatccatggctggtctttggtgagaaggtgaaggtgaatgctgtcttcatccgtgattcaaccggagtatcagactccatattgattttgtttggcggtgctgtagcaaaaggaggcatggccgggcacttgaagatgctcgatggctacattgatttcttcatggaccccagcctgtctgaatgctacctgcaacttaaagaagaactcgataaacttatacagcagaagcttgaagacccaaacttcgacatccacaaggaaggcaagtacatcctattcgccgtacaagagctcgccgccggcgacctgtgcgaagggaggttcgtgttcggccgcgagacgagccgggcccggctccggagccccgaggacgacggcaagagcaacctcataaaggacgggatgaaccccaagagcctgctgcagacgctgctgatgcgggccggccacaccccgcccaggtacaagacgaagcacctcaagacgaacgagttcagggccgtggtggagttcaaggggatgcagttcgtggggaagccgaagcggaacaagcagctcgcggagcgggacgccgccatcgaggcgctggggtggctgacgcagacctccggcgtgaaggctccggacgagaacgacgacgactcgccgctggacctgactgacagcatgctcaagctcctcaccaggccgaggcggcactcgaagaatagctctaggaaacggtgattttttgggcgaggatttgctgtagattgatcgcgcacacgcacaaaaggcatagagagagagagagagataggaaacgtcagctttggttacacgaatgcctcatggtctcgatgtgttgctttgtacattttttatttttatttttccacgctatgtcatcagaatcagaagttcctccatcctgctgattgctgtcaccgtagaacatggtttaaaaaattaaaataactgcctatagcgctgttatttctatagaaataaccttccgaagaatctaaatctacgatattacacttttaaccgctatttcagctagaactgctttagcctaatttagctttgctaaatgtcgtagctttaatgctaaacaacaaat

SEQ ID NO: 11159 - DNA, 3937 bp, Zea Mays
ctgcctggcaggctggctggctcggtgcctcccctgagttccatctcctgtcatgccgccgccgcagtagagctaacgagccacgggtagcatgcgccgcggcctgcgtcgcgggttgggcatcctcctcgtcccgctcccgcacgcacccagccgcctgccgccgatctctctcgcggctctcctcccccgacgcttcaatggcttctcccgccactccttctgcagcttccccgtcggggagcgcgccgtcgagcagttctcagacgacgaatacgaccacgagtacgaggacctccggccgtcgtcatcggtggcgaacatcgacgagtggaggtggaagctgagcatgctgcagcgcaacgcggaggaacaggagatcatctccagggaccggagggaccgccgggattatgaccagatagccaacctcgccaagaggatgggactctacagtgagatgtacggacgggtcgtggttgcgagcaaggtaccactgccgaactacaggcctgatctggatgacaagcggccgcaaagagaggtggtaatcccgctgggtttgcagaggagagttgaaggacttgtgcaggagcacctagaccgcgcattcttaccactgaataaatgtggtggcaacacaaaaaatggctctgacatgactgagaatgcgaacctggatgagcagcatgattcccttcttgatcggtcagtcatggagaagatacttcagaggaagagcattcggatgcggaattttcagagaagttggcaggaatcacccgaaggtgctaagatgctagaattccggagatcccttccagcagacaaagaaaaagaaaggcttctagcagccattgcacgcaatcaggtcattgtaatttctggtgagacagggtgtggtaaaacaacacagctgcctcagtttgtattggaatcagaaattgagtctggtcgaggggctttttgtaacataatttgtacacagccacgaagaatatctgcaatggcagttgcagaaagggtatccacagagagaggagaaaatcttggtgaatcggttggctataaagtccgattggagggaattaaggggaaagatacacatttgcttttctgcaccagtggcatcttactaagacgcttactgagtgaccgaaacttgaatggtgtgactcatgtatttgttgatgagatacacgaaaggggcatgaatgaagatttcctgttgattgtactaaaagagctgttatcacgtcgccgtgatttgaggctgatattgatgagcgctactctaaacgcggaactcttctcaagttattttggaggagcgccaactatccatattcctgggttcacacatccagtaagggcacattttttggaagacatattagagaggtcaggctacaagttgacctcaagcaatcaacttgatgattacgggcaagataaagtctggaaaactcagagacagctattgcctagaaaaaggaaaaatcaaattactacacttgtcgaggaagcccttaaaaattcaagcttcgagatctatggctccaggacacgtgattctctagtgaattggaatcctgattgcataggtttcaacctcatagaggctgttctgtgccacatatgtcgcaaagagcgacctggtgctgttttagttttcatgactggatgggacgatattagttgcttgaaggatcaactgaaagcacatccattgttaggtgatccgaatagggtttttctgcttgcatgccatggttctatggctacttctgagcagaggctaatttttgagaagccacctcctaatgttcggaaggtagtccttgccacaaatatggcagaagcaagtattacaataaatgatatcgtttttgttgttgattgtggtaaagcaaaggaaaccacatatgatgctctaaacaatactccatgcttactcccctcatggatttcgaaagcttctgcccgtcagaggaggggtagagctggccgtgtgcaacctggagaatgctaccatctgtaccctagatgtgtgtatgatgcatttgcagactatcagcttccagagcttcttagaactcctttgaattcattatgtctgcagataaaaagtttgcaagttggaagcattggggagttcctatcagctgctctacagcctccagaaccacgagctgtcgagaatgcagtggaattcttgaagatgattggagcattagatggaaatgagaaccttactgatcttggacgatacctttccatgcttccagttgatccaaaattgggaaagatgctcataatgggtgcagtttttcgatgcatagatcctatacttactgtagttgctgggcttagtgttcgggatcctttcctgttaccacaggaaaagaaggatttggcaggaacagcaaaagctagattctcagcaaaggattatagtgatcatatggcccttgttcgggcttatgaaggatggaaggatgcagagagagaagggtctgcttatgaatactgctggagaaatttcctttcttctcaaacactacaagccattcactctctccggaagcaattcagctatattttaaaggattccggtttgatagactctgatgggaatacaaacaacagtttgagccataatcaatcattggtccgcggtattatatgttctgggctttttcctgggatagcatctgttgtgcatcgagaaagctccatgtcctttaagaccatggatgacgggcaagttcttctttatgctaattcagtgaatgcaaaatatcagaccatcccatatccatggctggtctttggtgagaaggtgaaggtgaatgctgtcttcatccgtgattcaaccggagtatcagactccatattgattttgtttggcggtgctgtagcaaaaggaggcatgctgttatgtttcaggccgggcacttgaagatgctcgatggctacattgatttcttcatggaccccagcctgtctgaatgctacctgcaacttaaagaagaactcgataaacttatacagcagaagcttgaagacccaaacttcgacatccacaaggaaggcaagtacatcctattcgccgtacaagagctcgccgccggcgacctgtgcgaagggaggttcgtgttcggccgcgagacgagccgggcccggctccggagccccgaggacgacggcaagagcaacctcataaaggacgggatgaaccccaagagcctgctgcagacgctgctgatgcgggccggccacaccccgcccaggtacaagacgaagcacctcaagacgaacgagttcagggccgtggtggagttcaaggggatgcagttcgtggggaagccgaagcggaacaagcagctcgcggagcgggacgccgccatcgaggcgctggggtggctgacgcagacctccggcgtgaaggctccggacgagaacgacgacgactcgccgctggacctgactgacagcatgctcaagctcctcaccaggccgaggcggcactcgaagaatagctctaggaaacggtgattttttgggcgaggatttgctgtagattgatcgcgcacacgcacaaaaggcatagagagagagagagagataggaaacgtcagctttggttacacgaatgcctcatggtctcgatgtgttgctttgtacattttttatttttatttttccacgctatgtcatcagaatcagaagttcctccatcctgctgattgctgtcaccgtagaacatggtttaaaaaattaaaataactgcctatagcgctgttatttctatagaaataaccttccgaagaatctaaatctacgatattacacttttaaccgctatttcagctagaactgctttagcctaatttagctttgctaaatgtcgtagctttaatgctaaacaacaaat

SEQ ID NO: 11160 - DNA, 4179 bp, Zea Mays
cgctggcgctgcctggcaggctggctggctcggtgcctcccctgagttccatctcctgtcatgccgccgccgcagtagagctaacgagccacgggtagcatgcgccgcggcctgcgtcgcgggttgggcatcctcctcgtcccgctcccgcacgcacccagccgcctgccgccgatctctctcgcggctctcctcccccgacgcttcaatggcttctcccgccactccttctgcagcttccccgtcggggagcgcgccgtcgagcagttctcagacgacgaatacgaccacgagtacgaggacctccggccgtcgtcatcggtggcgaacatcgacgagtggaggtggaagctgagcatgctgcagcgcaacgcggaggaacaggagatcatctccagggaccggagggaccgccgggattatgaccagatagccaacctcgccaagaggatgggactctacagtgagatgtacggacgggtcgtggttgcgagcaaggtaccactgccgaactacaggcctgatctggatgacaagcggccgcaaagagaggtggtaatcccgctgggtttgcagaggagagttgaaggacttgtgcaggagcacctagaccgcgcattcttaccactgaataaatgtggtggcaacacaaaaaatggctctgacatgactgagaatgcgaacctggatgagcagcatgattcccttcttgatcggtcagtcatggagaagatacttcagaggaagagcattcggatgcggaattttcagagaagttggcaggaatcacccgaaggtgctaagatgctagaattccggagatcccttccagcagacaaagaaaaagaaaggcttctagcagccattgcacgcaatcaggtcattgtaatttctggtgagacagggtgtggtaaaacaacacagctgcctcagtttgtattggaatcagaaattgagtctggtcgaggggctttttgtaacataatttgtacacagccacgaagaatatctgcaatggcagttgcagaaagggtatccacagagagaggagaaaatcttggtgaatcggttggctataaagtccgattggagggaattaaggggaaagatacacatttgcttttctgcaccagtggcatcttactaagacgcttactgagtgaccgaaacttgaatggtgtgactcatgtatttgttgatgagatacacgaaaggggcatgaatgaagatttcctgttgattgtactaaaagagctgttatcacgtcgccgtgatttgaggctgatattgatgagcgctactctaaacgcggaactcttctcaagttattttggaggagcgccaactatccatattcctgggttcacacatccagtaagggcacattttttggaagacatattagagaggtcaggctacaagttgacctcaagcaatcaacttgatgattacgggcaagataaagtctggaaaactcagagacagctattgcctagaaaaaggaaaaatcaaattactacacttgtcgaggaagcccttaaaaattcaagcttcgagatctatggctccaggacacgtgattctctagtgaattggaatcctgattgcataggtttcaacctcatagaggctgttctgtgccacatatgtcgcaaagagcgacctggtgctgttttagttttcatgactggatgggacgatattagttgcttgaaggatcaactgaaagcacatccattgttaggtgatccgaatagggtttttctgcttgcatgccatggttctatggctacttctgagcagaggctaatttttgagaagccacctcctaatgttcggaaggtagtccttgccacaaatatggcagaagcaagtattacaataaatgatatcgtttttgttgttgattgtggtaaagcaaaggaaaccacatatgatgctctaaacaatactccatgcttactcccctcatggatttcgaaagcttctgcccgtcagaggaggggtagagctggccgtgtgcaacctggagaatgctaccatctgtaccctagatataaaaagtttgcaagttggaagcattggggagttcctatcagctgctctacagcctccagaaccacgagctgtcgagaatgcagtggaattcttgaagatgattggagcattagatggaaatgagaaccttactgatcttggacgatacctttccatgcttccagttgatccaaaattgggaaagatgctcataatgggtgcagtttttcgatgcatagatcctatacttactgtagttgctgggcttagtgttcgggatcctttcctgttaccacaggaaaagaaggatgtaagccttttaatttctgctattagtgtatatatatattagtgtctgagtattggttgcgaatcaaaatttccttttgaaaaaagttatatttatgaaacagtaagggatactttagtactgaaaaaaatgcatgtggtgctttttatttagcaagaagcttattttgcatgaaggtaagaaggcttaattttcatattatactttatatattagttggcaggaacagcaaaagctagattctcagcaattatttagcaagaagcttattttgcatgaaggtaagaaggcttgtttttcatattattactttatatattagttggcaggaacagcaaaagctagattctcagcaaaggattatagtgatcatatggcccttgttcgggcttatgaaggatggaaggatgcagagagagaagggtctgcttatgaatactgctggagaaatttcctttcttctcaaacactacaagccattcactctctccggaagcaattcagctatattttaaaggattccggtttgatagactctgatgggaatacaaacaacagtttgagccataatcaatcattggtccgcggtattatatgttctgggctttttcctgggatagcatctgttgtgcatcgagaaagctccatgtcctttaagaccatggatgacgggcaagttcttctttatgctaattcagtgaatgcaaaatatcagaccatcccatatccatggctggtctttggtgagaaggtgaaggtgaatgctgtcttcatccgtgattcaaccggagtatcagactccatattgattttgtttggcggtgctgtagcaaaaggaggcatggccgggcacttgaagatgctcgatggctacattgatttcttcatggaccccagcctgtctgaatgctacctgcaacttaaagaagaactcgataaacttatacagcagaagcttgaagacccaaacttcgacatccacaaggaaggcaagtacatcctattcgccgtacaagagctcgccgccggcgacctgtgcgaagggaggttcgtgttcggccgcgagacgagccgggcccggctccggagccccgaggacgacggcaagagcaacctcataaaggacgggatgaaccccaagagcctgctgcagacgctgctgatgcgggccggccacaccccgcccaggtacaagacgaagcacctcaagacgaacgagttcagggccgtggtggagttcaaggggatgcagttcgtggggaagccgaagcggaacaagcagctcgcggagcgggacgccgccatcgaggcgctggggtggctgacgcagacctccggcgtgaaggctccggacgagaacgacgacgactcgccgctggacctgactgacagcatgctcaagctcctcaccaggccgaggcggcactcgaagaatagctctaggaaacggtgattttttgggcgaggatttgctgtagattgatcgcgcacacgcacaaaaggcatagagagagagagagagataggaaacgtcagctttggttacacgaatgcctcatggtctcgatgtgttgctttgtacattttttatttttatttttccacgctatgtcatcagaatcagaagttcctccatcctgctgattgctgtcaccgtagaacatggtttaaaaaattaaaataactgcctatagcgctgttatttctatagaaataaccttccgaagaatctaaatctacgatattacacttttaaccgctatttcagctagaactgctttagcctaatttagctttgctaaatgtcgtagctttaatgctaaacaacaaat

SEQ ID NO: 11161 - DNA, 3857 bp, Zea Mays
cgctggcgctgcctggcaggctggctggctcggtgcctcccctgagttccatctcctgtcatgccgccgccgcagtagagctaacgagccacgggtagcatgcgccgcggcctgcgtcgcgggttgggcatcctcctcgtcccgctcccgcacgcacccagccgcctgccgccgatctctctcgcggctctcctcccccgacgcttcaatggcttctcccgccactccttctgcagcttccccgtcggggagcgcgccgtcgagcagttctcagacgacgaatacgaccacgagtacgaggacctccggccgtcgtcatcggtggcgaacatcgacgagtggaggtggaagctgagcatgctgcagcgcaacgcggaggaacaggagatcatctccagggaccggagggaccgccgggattatgaccagatagccaacctcgccaagaggatgggactctacagtgagatgtacggacgggtcgtggttgcgagcaaggtaccactgccgaactacaggcctgatctggatgacaagcggccgcaaagagaggtggtaatcccgctgggtttgcagaggagagttgaaggacttgtgcaggagcacctagaccgcgcattcttaccactgaataaatgtggtggcaacacaaaaaatggctctgacatgactgagaatgcgaacctggatgagcagcatgattcccttcttgatcggtcagtcatggagaagatacttcagaggaagagcattcggatgcggaattttcagagaagttggcaggaatcacccgaaggtgctaagatgctagaattccggagatcccttccagcagacaaagaaaaagaaaggcttctagcagccattgcacgcaatcaggtcattgtaatttctggtgagacagggtgtggtaaaacaacacagctgcctcagtttgtattggaatcagaaattgagtctggtcgaggggctttttgtaacataatttgtacacagccacgaagaatatctgcaatggcagttgcagaaagggtatccacagagagaggagaaaatcttggtgaatcggttggctataaagtccgattggagggaattaaggggaaagatacacatttgcttttctgcaccagtggcatcttactaagacgcttactgagtgaccgaaacttgaatggtgtgactcatgtatttgttgatgagatacacgaaaggggcatgaatgaagatttcctgttgattgtactaaaagagctgttatcacgtcgccgtgatttgaggctgatattgatgagcgctactctaaacgcggaactcttctcaagttattttggaggagcgccaactatccatattcctgggttcacacatccagtaagggcacattttttggaagacatattagagaggtcaggctacaagttgacctcaagcaatcaacttgatgattacgggcaagataaagtctggaaaactcagagacagctattgcctagaaaaaggaaaaatcaaattactacacttgtcgaggaagcccttaaaaattcaagcttcgagatctatggctccaggacacgtgattctctagtgaattggaatcctgattgcataggtttcaacctcatagaggctgttctgtgccacatatgtcgcaaagagcgacctggtgctgttttagttttcatgactggatgggacgatattagttgcttgaaggatcaactgaaagcacatccattgttaggtgatccgaatagggtttttctgcttgcatgccatggttctatggctacttctgagcagaggctaatttttgagaagccacctcctaatgttcggaaggtagtccttgccacaaatatggcagaagcaagtattacaataaatgatatcgtttttgttgttgattgtggtaaagcaaaggaaaccacatatgatgctctaaacaatactccatgcttactcccctcatggatttcgaaagcttctgcccgtcagaggaggggtagagctggccgtgtgcaacctggagaatgctaccatctgtaccctagatataaaaagtttgcaagttggaagcattggggagttcctatcagctgctctacagcctccagaaccacgagctgtcgagaatgcagtggaattcttgaagatgattggagcattagatggaaatgagaaccttactgatcttggacgatacctttccatgcttccagttgatccaaaattgggaaagatgctcataatgggtgcagtttttcgatgcatagatcctatacttactgtagttgctgggcttagtgttcgggatcctttcctgttaccacaggaaaagaaggatttggcaggaacagcaaaagctagattctcagcaaaggattatagtgatcatatggcccttgttcgggcttatgaaggatggaaggatgcagagagagaagggtctgcttatgaatactgctggagaaatttcctttcttctcaaacactacaagccattcactctctccggaagcaattcagctatattttaaaggattccggtttgatagactctgatgggaatacaaacaacagtttgagccataatcaatcattggtccgcggtattatatgttctgggctttttcctgggatagcatctgttgtgcatcgagaaagctccatgtcctttaagaccatggatgacgggcaagttcttctttatgctaattcagtgaatgcaaaatatcagaccatcccatatccatggctggtctttggtgagaaggtgaaggtgaatgctgtcttcatccgtgattcaaccggagtatcagactccatattgattttgtttggcggtgctgtagcaaaaggaggcatggccgggcacttgaagatgctcgatggctacattgatttcttcatggaccccagcctgtctgaatgctacctgcaacttaaagaagaactcgataaacttatacagcagaagcttgaagacccaaacttcgacatccacaaggaaggcaagtacatcctattcgccgtacaagagctcgccgccggcgacctgtgcgaagggaggttcgtgttcggccgcgagacgagccgggcccggctccggagccccgaggacgacggcaagagcaacctcataaaggacgggatgaaccccaagagcctgctgcagacgctgctgatgcgggccggccacaccccgcccaggtacaagacgaagcacctcaagacgaacgagttcagggccgtggtggagttcaaggggatgcagttcgtggggaagccgaagcggaacaagcagctcgcggagcgggacgccgccatcgaggcgctggggtggctgacgcagacctccggcgtgaaggctccggacgagaacgacgacgactcgccgctggacctgactgacagcatgctcaagctcctcaccaggccgaggcggcactcgaagaatagctctaggaaacggtgattttttgggcgaggatttgctgtagattgatcgcgcacacgcacaaaaggcatagagagagagagagagataggaaacgtcagctttggttacacgaatgcctcatggtctcgatgtgttgctttgtacattttttatttttatttttccacgctatgtcatcagaatcagaagttcctccatcctgctgattgctgtcaccgtagaacatggtttaaaaaattaaaataactgcctatagcgctgttatttctatagaaataaccttccgaagaatctaaatctacgatattacacttttaaccgctatttcagctagaactgctttagcctaatttagctttgctaaatgtcgtagctttaatgctaaacaacaaat

SEQ ID NO: 11162 - DNA, 3872 bp, Zea Mays
aaacgctggcgctgcctggcaggctggctggctcggtgcctcccctgagttccatctcctgtcatgccgccgccgcagtagagctaacgagccacgggtagcatgcgccgcggcctgcgtcgcgggttgggcatcctcctcgtcccgctcccgcacgcacccagccgcctgccgccgatctctctcgcggctctcctcccccgacgcttcaatggcttctcccgccactccttctgcagcttccccgtcggggagcgcgccgtcgagcagttctcagacgacgaatacgaccacgagtacgaggacctccggccgtcgtcatcggtggcgaacatcgacgagtggaggtggaagctgagcatgctgcagcgcaacgcggaggaacaggagatcatctccagggaccggagggaccgccgggattatgaccagatagccaacctcgccaagaggatgggactctacagtgagatgtacggacgggtcgtggttgcgagcaaggtaccactgccgaactacaggcctgatctggatgacaagcggccgcaaagagaggtggtaatcccgctgggtttgcagaggagagttgaaggacttgtgcaggagcacctagaccgcgcattcttaccactgaataaatgtggtggcaacacaaaaaatggctctgacatgactgagaatgcgaacctggatgagcagcatgattcccttcttgatcggtcagtcatggagaagatacttcagaggaagagcattcggatgcggaattttcagagaagttggcaggaatcacccgaaggtgctaagatgctagaattccggagatcccttccagcagacaaagaaaaagaaaggcttctagcagccattgcacgcaatcaggtcattgtaatttctggtgagacagggtgtggtaaaacaacacagctgcctcagtttgtattggaatcagaaattgagtctggtcgaggggctttttgtaacataatttgtacacagccacgaagaatatctgcaatggcagttgcagaaagggtatccacagagagaggagaaaatcttggtgaatcgcttttttaataggttggctataaagtccgattggagggaattaaggggaaagatacacatttgcttttctgcaccagtggcatcttactaagacgcttactgagtgaccgaaacttgaatggtgtgactcatgtatttgttgatgagatacacgaaaggggcatgaatgaagatttcctgttgattgtactaaaagagctgttatcacgtcgccgtgatttgaggctgatattgatgagcgctactctaaacgcggaactcttctcaagttattttggaggagcgccaactatccatattcctgggttcacacatccagtaagggcacattttttggaagacatattagagaggtcaggctacaagttgacctcaagcaatcaacttgatgattacgggcaagataaagtctggaaaactcagagacagctattgcctagaaaaaggaaaaatcaaattactacacttgtcgaggaagcccttaaaaattcaagcttcgagatctatggctccaggacacgtgattctctagtgaattggaatcctgattgcataggtttcaacctcatagaggctgttctgtgccacatatgtcgcaaagagcgacctggtgctgttttagttttcatgactggatgggacgatattagttgcttgaaggatcaactgaaagcacatccattgttaggtgatccgaatagggtttttctgcttgcatgccatggttctatggctacttctgagcagaggctaatttttgagaagccacctcctaatgttcggaaggtagtccttgccacaaatatggcagaagcaagtattacaataaatgatatcgtttttgttgttgattgtggtaaagcaaaggaaaccacatatgatgctctaaacaatactccatgcttactcccctcatggatttcgaaagcttctgcccgtcagaggaggggtagagctggccgtgtgcaacctggagaatgctaccatctgtaccctagatataaaaagtttgcaagttggaagcattggggagttcctatcagctgctctacagcctccagaaccacgagctgtcgagaatgcagtggaattcttgaagatgattggagcattagatggaaatgagaaccttactgatcttggacgatacctttccatgcttccagttgatccaaaattgggaaagatgctcataatgggtgcagtttttcgatgcatagatcctatacttactgtagttgctgggcttagtgttcgggatcctttcctgttaccacaggaaaagaaggatttggcaggaacagcaaaagctagattctcagcaaaggattatagtgatcatatggcccttgttcgggcttatgaaggatggaaggatgcagagagagaagggtctgcttatgaatactgctggagaaatttcctttcttctcaaacactacaagccattcactctctccggaagcaattcagctatattttaaaggattccggtttgatagactctgatgggaatacaaacaacagtttgagccataatcaatcattggtccgcggtattatatgttctgggctttttcctgggatagcatctgttgtgcatcgagaaagctccatgtcctttaagaccatggatgacgggcaagttcttctttatgctaattcagtgaatgcaaaatatcagaccatcccatatccatggctggtctttggtgagaaggtgaaggtgaatgctgtcttcatccgtgattcaaccggagtatcagactccatattgattttgtttggcggtgctgtagcaaaaggaggcatggccgggcacttgaagatgctcgatggctacattgatttcttcatggaccccagcctgtctgaatgctacctgcaacttaaagaagaactcgataaacttatacagcagaagcttgaagacccaaacttcgacatccacaaggaaggcaagtacatcctattcgccgtacaagagctcgccgccggcgacctgtgcgaagggaggttcgtgttcggccgcgagacgagccgggcccggctccggagccccgaggacgacggcaagagcaacctcataaaggacgggatgaaccccaagagcctgctgcagacgctgctgatgcgggccggccacaccccgcccaggtacaagacgaagcacctcaagacgaacgagttcagggccgtggtggagttcaaggggatgcagttcgtggggaagccgaagcggaacaagcagctcgcggagcgggacgccgccatcgaggcgctggggtggctgacgcagacctccggcgtgaaggctccggacgagaacgacgacgactcgccgctggacctgactgacagcatgctcaagctcctcaccaggccgaggcggcactcgaagaatagctctaggaaacggtgattttttgggcgaggatttgctgtagattgatcgcgcacacgcacaaaaggcatagagagagagagagagataggaaacgtcagctttggttacacgaatgcctcatggtctcgatgtgttgctttgtacattttttatttttatttttccacgctatgtcatcagaatcagaagttcctccatcctgctgattgctgtcaccgtagaacatggtttaaaaaattaaaataactgcctatagcgctgttatttctatagaaataaccttccgaagaatctaaatctacgatattacacttttaaccgctatttcagctagaactgctttagcctaatttagctttgctaaatgtcgtagctttaatgctaaacaacaaat

SEQ ID NO: 11163 - DNA, 2242 bp, Zea Mays
gtattatatgtttttatgaccttctaaatcctgattgatatgacaatgacaacatagataagtcaggttttatttgttcgctgttgcggatacctatcccagaggatttcattctgtagccatgctagcataaattcgtaattcaaaagtgttagatagatatcatatcactgacctttgggtatctattgttattagccacatacattcatgtttagaaattgttctattttgccagtcaaagaacacaggtggttcttggagaggtaatacaatagttgctgattcatataaaattgaaatgaatgcataaactgatgcttcatagatttggtaatggtttacctattggtcagactaagataggttgtcaatgggggaaaaagtcagggtttgtatcctatcctctgtctcaacaataccagacaaattgacaaaataaataaataaaactcatggactgcatgctctaatgtacgaactgttaggaattttctatttttggtacttctgttttgagccacaattggtgtagtggccactgccaacactcttaagtacactgatatgttttctctcgctgaaaacaaaaaaaacttccaatactcactagcttaatgtacacacattccattttacatgtatttgggccagtcctgtgaagcttttcttttatgtgttgtagtctttaatgatggttttccttcctaatctagaaccctatcagaaaaccatgggctctgatggaataatgttctcttcattgctgttgttttaatcagggcctggtttatctaaacaagaggggccaaaagatcattcactatgatctaaagccgggcaatgttctctttgatgaggttggtgttgcaaaagttaccgactttggcctcagcaagatagtggagaatgatgttgggtctcaggggatggagctcacttctcagggagctggaacctattggtatcttcctccagaatgctttgacctgagcaaaacaccatttatttcatctaaggtggatgtttggtcagctggtgtaatgttttaccagatgctcttcggaaagcgtccttttggtcatgaccagacccaggagagaatacttcgggaagatacgattatcaatgcacggagagtggagttcccttcaaagccagctgtatcaaatgaggcaaaggatctgatacgccggtgcttgacatacaaccaatcagagagaccagatgtactaaccatagctcaagatccttatctctcatacgcaaagagatagccgctatgccggagaacactaaggcaagggtagctgatcatttatgagattatttatgtatggggatggataatcttgcgaaggagcaaagtgttccacaagctcaagaagaccacaaagggtgtaactgtatatgttgtaaattttagtctttcccatcgcagcaatgacctgaaatccagaagccatcagttcaacggacagcttctttgtagcgtagagaaagcaggcattggtttgaacggggcatgcgtaacgtgatggtttcttggctggtgggctgtgggcagtggtcctgttgatggttggtttttgtttgctcatactgtcggtaaggtctgccaaatcagaaaccaccggtgacaggcgagagctcacatgctcacctccgaaaaaaatctcggccttgcactggcaggatggactggattttgcgtattgccaaaacagatttaaggtagcatgcatcaatacaggttactttggataacctatagactcaccacagccacaagcacagaagctcttcgtacaatttcagagagtaccgatgtgccagatttctgctggtgccaatttgtttgtgatcgctgtcacccttgtacaacactgggatcgctcattgagcatacacaagttatgcaatttgcttttttattatagtcatctttagggcgtcgttttgttcggaacggattctttggaactttaatgttagttttatttgtgttaaaactgaacgtggaatagttccaggttatataatcccagctaacctaacttgcacttaggagatgtttggtttgagaaatcactctatctaaaataagttagtgtatcatgagttcattttctaaatttggtgggatgatctcattccatatactaagtaactaggaagaatgaggtgatgatatattaactcattttattttacaaaccaaaaaaaaatgaggagtaagaag

SEQ ID NO: 11164 - DNA, 2484 bp, Zea Mays
caggtgctcgcaggtcatgtgagtgcctccgtgaagggtttgaaatctttgctggaaactaaggagactattgaaaggcatcgtaaatcacttaagaaaagacaatctggtgactttatttctgaagttcatttttccctttattgcattctgttgacttgaatccttcataagcttctgtaggtactatctgacatatgttttgcagttgcagacctcaatgcttgtcaatattgtttcataaatagcactagaaaaaattaaagttgatgttggatttattcttgtgatattccagtttgtttgtttatacagagcaaaccctcctccattattgcaagtgcaatacaaaggtcatagcagcttaacaaaataagaaaaacatccactagcctaattgtatatttttctggctatatattcctacgttctttctttgttattcttttttaaatgattttctgtttagacaagggtgatggcagtgatgctgagactggcatgtctgaggaggacatcctcttacaagatgaaatatgtaaatctcggttaatgagtataaaacgggaggaagaacagtatatgagagagagagatcggtatgagttggaaaaggggaggcttatacgagagatgaagcgtctcagagatgaagatggctcacgctttaacaacttccaaattcttcaccatcgttatgctctcttaaatcttcttggaaagggagggtttagtgaggtttacagggcttttgatttggtggagtacaaatatgtggcatgcaagcttcatggattgaatgctcaatggagtgaggagaaaaaacagagctacatacggcatgcgattcgtgaatataacattcacaaaactttggttcatccaaacattgtcaggctatgggatatatttgagattgatcacaatacattctgcactgtcctagaatattgcagtgaaccctatcagaaaaccatgggctctgatggaataatgttctcttcattgctgttgttttaatcagggcctggtttatctaaacaagaggggccaaaagatcattcactatgatctaaagccgggcaatgttctctttgatgaggttggtgttgcaaaagttaccgactttggcctcagcaagatagtggagaatgatgttgggtctcaggggatggagctcacttctcagggagctggaacctattggtatcttcctccagaatgctttgacctgagcaaaacaccatttatttcatctaaggtggatgtttggtcagctggtgtaatgttttaccagatgctcttcggaaagcgtccttttggtcatgaccagacccaggagagaatacttcgggaagatacgattatcaatgcacggagagtggagttcccttcaaagccagctgtatcaaatgaggcaaaggatctgatacgccggtgcttgacatacaaccaatcagagagaccagatgtactaaccatagctcaagatccttatctctcatacgcaaagagatagccgctatgccggagaacactaaggcaagggtagctgatcatttatgagattatttatgtatggggatggataatcttgcgaaggagcaaagtgttccacaagctcaagaagaccacaaagggtgtaactgtatatgttgtaaattttagtctttcccatcgcagcaatgacctgaaatccagaagccatcagttcaacggacagcttctttgtagcgtagagaaagcaggcattggtttgaacggggcatgcgtaacgtgatggtttcttggctggtgggctgtgggcagtggtcctgttgatggttggtttttgtttgctcatactgtcggtaaggtctgccaaatcagaaaccaccggtgacaggcgagagctcacatgctcacctccgaaaaaaatctcggccttgcactggcaggatggactggattttgcgtattgccaaaacagatttaaggtagcatgcatcaatacaggttactttggataacctatagactcaccacagccacaagcacagaagctcttcgtacaatttcagagagtaccgatgtgccagatttctgctggtgccaatttgtttgtgatcgctgtcacccttgtacaacactgggatcgctcattgagcatacacaagttatgcaatttgcttttttattatagtcatctttagggcgtcgttttgttcggaacggattctttggaactttaatgttagttttatttgtgttaaaactgaacgtggaatagttccaggttatataatcccagctaacctaacttgcacttaggagatgtttggtttgagaaatcactctatctaaaataagttagtgtatcatgagttcattttctaaatttggtgggatgatctcattccatatactaagtaactaggaagaatgaggtgatgatatattaactcattttattttacaaaccaaaaaaaaatgaggagtaagaag

SEQ ID NO: 11165 - DNA, 2140 bp, Zea Mays
tgaacatctgttgggggtgatatatttagctagcagcatagaaatctttgctggaaactaaggagactattgaaaggcatcgtaaatcacttaagaaaagacaatctgacaagggtgatggcagtgatgctgagactggcatgtctgaggaggacatcctcttacaagatgaaatatgtaaatctcggttaatgagtataaaacgggaggaagaacagtatatgagagagagagatcggtatgagttggaaaaggggaggcttatacgagagatgaagcgtctcagagatgaagatggctcacgctttaacaacttccaaattcttcaccatcgttatgctctcttaaatcttcttggaaagggagggtttagtgaggtttacagggcttttgatttggtggagtacaaatatgtggcatgcaagcttcatggattgaatgctcaatggagtgaggagaaaaaacagagctacatacggcatgcgattcgtgaatataacattcacaaaactttggttcatccaaacattgtcaggctatgggatatatttgagattgatcacaatacattctgcactgtcctagaatattgcagtggcaaggatcttgatgcagtccttaaagctacaccaattcttccagaaaaagaaggaaggatcataattgttcaaatatttcagggcctggtttatctaaacaagaggggccaaaagatcattcactatgatctaaagccgggcaatgttctctttgatgaggttggtgttgcaaaagttaccgactttggcctcagcaagatagtggagaatgatgttgggtctcaggggatggagctcacttctcagggagctggaacctattggtatcttcctccagaatgctttgacctgagcaaaacaccatttatttcatctaaggtggatgtttggtcagctggtgtaatgttttaccagatgctcttcggaaagcgtccttttggtcatgaccagacccaggagagaatacttcgggaagatacgattatcaatgcacggagagtggagttcccttcaaagccagctgtatcaaatgaggcaaaggatctgatacgccggtgcttgacatacaaccaatcagagagaccagatgtactaaccatagctcaagatccttatctctcatacgcaaagagatagccgctatgccggagaacactaaggcaagggtagctgatcatttatgagattatttatgtatggggatggataatcttgcgaaggagcaaagtgttccacaagctcaagaagaccacaaagggtgtaactgtatatgttgtaaattttagtctttcccatcgcagcaatgacctgaaatccagaagccatcagttcaacggacagcttctttgtagcgtagagaaagcaggcattggtttgaacggggcatgcgtaacgtgatggtttcttggctggtgggctgtgggcagtggtcctgttgatggttggtttttgtttgctcatactgtcggtaaggtctgccaaatcagaaaccaccggtgacaggcgagagctcacatgctcacctccgaaaaaaatctcggccttgcactggcaggatggactggattttgcgtattgccaaaacagatttaaggtagcatgcatcaatacaggttactttggataacctatagactcaccacagccacaagcacagaagctcttcgtacaatttcagagagtaccgatgtgccagatttctgctggtgccaatttgtttgtgatcgctgtcacccttgtacaacactgggatcgctcattgagcatacacaagttatgcaatttgcttttttattatagtcatctttagggcgtcgttttgttcggaacggattctttggaactttaatgttagttttatttgtgttaaaactgaacgtggaatagttccaggttatataatcccagctaacctaacttgcacttaggagatgtttggtttgagaaatcactctatctaaaataagttagtgtatcatgagttcattttctaaatttggtgggatgatctcattccatatactaagtaactaggaagaatgaggtgatgatatattaactcattttattttacaaaccaaaaaaaaatgaggagtaagaag

SEQ ID NO: 11166 - DNA, 4121 bp, Zea Mays
taataggcaatctctggtagggtagaaacagtaccagatagggagggtcggcaacgatgactcggtaggcgtgcttcatcgccgccggcagctcctccggtcggttgtagtcgtagaaggtgaagtcgccgccgtactgcccgaaccgctcgtcgtactccagcagctgcgcgggcactccggggtccgtcttcttcaggtaggcgtagagcgtcgggcatgcgatgcaggccacggcaccggcggcggagcctgatccagaaggggagacaaggcggacgacctcctccacgagctcccgcgcggtacgctcatcataccagaactggctcaaccgccagtcctccgggaccagctctaccccgtcttcccctcctccagcttcattctgctcctccggacgatgctgttccgccagaaactcccggagcgcctccatcgccgcagcgctgagttgaggcacgttgtcgtcgtcgtcttcctgctccctgacctccccgctcactctctcatcctccataccgctcgcggccatcacatccaccgctggtctgctactctgctgcgggggcggcggcgcggggcaattgggcaaacactccgctggtccactccttcgatacgacgaaccaatggttttagcgaaatgagcatttgtggagttaccacatgggcctcgttggcccaaaggcccagtgagcctgacggaaagagcaataataaagcggagtggcaatggaatcgctcgcaggggaggggaacgagtgggaagggactgaagaagagcgagagaggtgggtgaccgccgcgcctccgtccagacttccagttccaggcgtggcgaactaggcaagcggcacgctccgccttcgcataccctccgcgagtgagctccagttgcctccaccgccgtactcagcagcggagaccggcgagtcaacaggggaggacatagtgcagcacctatcgtccaattccaacccgtcttcgtcgaagctcgccaagctcgaggcacggatggccggcaaggctgtctccgcgccatcgtcaccgccgcaccatcccatgtctgcccccgtcatatcgttcatggaccaggaggagctgcctgagacttcctcttccgatgacgataactgtgaggagttcttgatacaaaagaataccctgaagcgtccgagatctccagatggtgacaacatgcttgctcttggaaattttgagggttcggtaaatgaggcagcaaagattttaggcgtcacagatacaaaaccttccttggacaattcaagtaggaaaaaacaaggccgtggaaggggtcgtgctggtacaggccgagggcgtggctcaagggctgctgatcaaacacgattgacttcaacttcctcagcagctgtaacaaatggccaactagataaattaaccaacaaggaaccccgatcgagtgttcaactgggccatgacgacagagctgctttacagcaaatgaaaatcctgtccgatctgctgatagctgtgtcaaaagcagagaggcaagaagcgagaatgagaataaggcaggaatctttcagacttggaaatgttgctgttatgagagctgggactatcatatctgaaacttgggaagacggtcaggcaataaaagatcttaatgctcacctgaaatctttgctggaaactaaggagactattgaaaggcatcgtaaatcacttaagaaaagacaatctggtgactttatttctgaagttcatttttccctttattgcattctgttgacttgaatccttcataagcttctgtaggtactatctgacatatgttttgcagttgcagacctcaatgcttgtcaatattgtttcataaatagcactagaaaaaattaaagttgatgttggatttattcttgtgatattccagtttgtttgtttatacagagcaaaccctcctccattattgcaagtgcaatacaaaggtcatagcagcttaacaaaataagaaaaacatccactagcctaattgtatatttttctggctatatattcctacgttctttctttgttattcttttttaaatgattttctgtttagacaagggtgatggcagtgatgctgagactggcatgtctgaggaggacatcctcttacaagatgaaatatgtaaatctcggttaatgagtataaaacgggaggaagaacagtatatgagagagagagatcggtatgagttggaaaaggggaggcttatacgagagatgaagcgtctcagagatgaagatggctcacgctttaacaacttccaaattcttcaccatcgttatgctctcttaaatcttcttggaaagggagggtttagtgaggtttacagggcttttgatttggtggagtacaaatatgtggcatgcaagcttcatggattgaatgctcaatggagtgaggagaaaaaacagagctacatacggcatgcgattcgtgaatataacattcacaaaactttggttcatccaaacattgtcaggctatgggatatatttgagattgatcacaatacattctgcactgtcctagaatattgcagtggcaaggatcttgatgcagtccttaaagctacaccaattcttccagaaaaagaaggaaggatcataattgttcaaatatttcagggcctggtttatctaaacaagaggggccaaaagatcattcactatgatctaaagccgggcaatgttctctttgatgaggttggtgttgcaaaagttaccgactttggcctcagcaagatagtggagaatgatgttgggtctcaggggatggagctcacttctcagggagctggaacctattggtatcttcctccagaatgctttgacctgagcaaaacaccatttatttcatctaaggtggatgtttggtcagctggtgtaatgttttaccagatgctcttcggaaagcgtccttttggtcatgaccagacccaggagagaatacttcgggaagatacgattatcaatgcacggagagtggagttcccttcaaagccagctgtatcaaatgaggcaaaggatctgatacgccggtgcttgacatacaaccaatcagagagaccagatgtactaaccatagctcaagatccttatctctcatacgcaaagagatagccgctatgccggagaacactaaggcaagggtagctgatcatttatgagattatttatgtatggggatggataatcttgcgaaggagcaaagtgttccacaagctcaagaagaccacaaagggtgtaactgtatatgttgtaaattttagtctttcccatcgcagcaatgacctgaaatccagaagccatcagttcaacggacagcttctttgtagcgtagagaaagcaggcattggtttgaacggggcatgcgtaacgtgatggtttcttggctggtgggctgtgggcagtggtcctgttgatggttggtttttgtttgctcatactgtcggtaaggtctgccaaatcagaaaccaccggtgacaggcgagagctcacatgctcacctccgaaaaaaatctcggccttgcactggcaggatggactggattttgcgtattgccaaaacagatttaaggtagcatgcatcaatacaggttactttggataacctatagactcaccacagccacaagcacagaagctcttcgtacaatttcagagagtaccgatgtgccagatttctgctggtgccaatttgtttgtgatcgctgtcacccttgtacaacactgggatcgctcattgagcatacacaagttatgcaatttgcttttttattatagtcatctttagggcgtcgttttgttcggaacggattctttggaactttaatgttagttttatttgtgttaaaactgaacgtggaatagttccaggttatataatcccagctaacctaacttgcacttaggagatgtttggtttgagaaatcactctatctaaaataagttagtgtatcatgagttcattttctaaatttggtgggatgatctcattccatatactaagtaactaggaagaatgaggtgatgatatattaactcattttattttacaaaccaaaaaaaaatgaggagtaagaag

SEQ ID NO: 11167 - DNA, 4515 bp, Zea Mays
taataggcaatctctggtagggtagaaacagtaccagatagggagggtcggcaacgatgactcggtaggcgtgcttcatcgccgccggcagctcctccggtcggttgtagtcgtagaaggtgaagtcgccgccgtactgcccgaaccgctcgtcgtactccagcagctgcgcgggcactccggggtccgtcttcttcaggtaggcgtagagcgtcgggcatgcgatgcaggccacggcaccggcggcggagcctgatccagaaggggagacaaggcggacgacctcctccacgagctcccgcgcggtacgctcatcataccagaactggctcaaccgccagtcctccgggaccagctctaccccgtcttcccctcctccagcttcattctgctcctccggacgatgctgttccgccagaaactcccggagcgcctccatcgccgcagcgctgagttgaggcacgttgtcgtcgtcgtcttcctgctccctgacctccccgctcactctctcatcctccataccgctcgcggccatcacatccaccgctggtctgctactctgctgcgggggcggcggcgcggggcaattgggcaaacactccgctggtccactccttcgatacgacgaaccaatggttttagcgaaatgagcatttgtggagttaccacatgggcctcgttggcccaaaggcccagtgagcctgacggaaagagcaataataaagcggagtggcaatggaatcgctcgcaggggaggggaacgagtgggaagggactgaagaagagcgagagaggtgggtgaccgccgcgcctccgtccagacttccagttccaggcgtggcgaactaggcaagcggcacgctccgccttcgcataccctccgcgagtgagctccagttgcctccaccgccgtactcagcagcggagaccggcgagtcaacaggtagcagagggggaggaggggagcagttcctattcgcccgggcaccgaccgcccggagcattcccgttcccgctgctgcgtccgctagtttgccgtcgccctgttgcacgtacggctagggtttggagatagatccgcccgccgccccgccggctcgtgtagatgcacgccgtgctgcagggaggagtagaggaagtgcctggctcgcgtggttttggttccttgttctgaaggcttcgtagcgcgcgatccggttcggttgcaatcggtagtaatgtcgggctcgtcggccgcaggggaggacatagtgcagcacctatcgtccaattccaacccgtcttcgtcgaagctcgccaagctcgaggcacggatggccggcaaggctgtctccgcgccatcgtcaccgccgcaccatcccatgtctgcccccgtcatatcgttcatggaccaggaggagctgcctgagacttcctcttccgatgacgataactgtgaggagttcttgatacaaaagaataccctgaagcgtccgagatctccagatggtgacaacatgcttgctcttggaaattttgagggttcggtaaatgaggcagcaaagattttaggcgtcacagatacaaaaccttccttggacaattcaagtaggaaaaaacaaggccgtggaaggggtcgtgctggtacaggccgagggcgtggctcaagggctgctgatcaaacacgattgacttcaacttcctcagcagctgtaacaaatggccaactagataaattaaccaacaaggaaccccgatcgagtgttcaactgggccatgacgacagagctgctttacaggacgaattgtcaacattacgtggcaaagttgcatttttggaggaagacctttctaaatcgcatcaagaagcaacaaattaccatgaacttagtgataggttagcaaaggaattgaaggatctcaaagatcatgaccaacaaatgagattaaagcaaatgaaaatcctgtccgatctgctgatagctgtgtcaaaagcagagaggcaagaagcgagaatgagaataaggcaggaatctttcagacttggaaatgttgctgttatgagagctgggactatcatatctgaaacttgggaagacggtcaggcaataaaagatcttaatgctcacctgaaatctttgctggaaactaaggagactattgaaaggcatcgtaaatcacttaagaaaagacaatctggtgactttatttctgaagttcatttttccctttattgcattctgttgacttgaatccttcataagcttctgtaggtactatctgacatatgttttgcagttgcagacctcaatgcttgtcaatattgtttcataaatagcactagaaaaaattaaagttgatgttggatttattcttgtgatattccagtttgtttgtttatacagagcaaaccctcctccattattgcaagtgcaatacaaaggtcatagcagcttaacaaaataagaaaaacatccactagcctaattgtatatttttctggctatatattcctacgttctttctttgttattcttttttaaatgattttctgtttagacaagggtgatggcagtgatgctgagactggcatgtctgaggaggacatcctcttacaagatgaaatatgtaaatctcggttaatgagtataaaacgggaggaagaacagtatatgagagagagagatcggtatgagttggaaaaggggaggcttatacgagagatgaagcgtctcagagatgaagatggctcacgctttaacaacttccaaattcttcaccatcgttatgctctcttaaatcttcttggaaagggagggtttagtgaggtttacagggcttttgatttggtggagtacaaatatgtggcatgcaagcttcatggattgaatgctcaatggagtgaggagaaaaaacagagctacatacggcatgcgattcgtgaatataacattcacaaaactttggttcatccaaacattgtcaggctatgggatatatttgagattgatcacaatacattctgcactgtcctagaatattgcagtggcaaggatcttgatgcagtccttaaagctacaccaattcttccagaaaaagaaggaaggatcataattgttcaaatatttcagggcctggtttatctaaacaagaggggccaaaagatcattcactatgatctaaagccgggcaatgttctctttgatgaggttggtgttgcaaaagttaccgactttggcctcagcaagatagtggagaatgatgttgggtctcaggggatggagctcacttctcagggagctggaacctattggtggatgtttggtcagctggtgtaatgttttaccagatgctcttcggaaagcgtccttttggtcatgaccagacccaggagagaatacttcgggaagatacgattatcaatgcacggagagtggagttcccttcaaagccagctgtatcaaatgaggcaaaggatctgatacgccggtgcttgacatacaaccaatcagagagaccagatgtactaaccatagctcaagatccttatctctcatacgcaaagagatagccgctatgccggagaacactaaggcaagggtagctgatcatttatgagattatttatgtatggggatggataatcttgcgaaggagcaaagtgttccacaagctcaagaagaccacaaagggtgtaactgtatatgttgtaaattttagtctttcccatcgcagcaatgacctgaaatccagaagccatcagttcaacggacagcttctttgtagcgtagagaaagcaggcattggtttgaacggggcatgcgtaacgtgatggtttcttggctggtgggctgtgggcagtggtcctgttgatggttggtttttgtttgctcatactgtcggtaaggtctgccaaatcagaaaccaccggtgacaggcgagagctcacatgctcacctccgaaaaaaatctcggccttgcactggcaggatggactggattttgcgtattgccaaaacagatttaaggtagcatgcatcaatacaggttactttggataacctatagactcaccacagccacaagcacagaagctcttcgtacaatttcagagagtaccgatgtgccagatttctgctggtgccaatttgtttgtgatcgctgtcacccttgtacaacactgggatcgctcattgagcatacacaagttatgcaatttgcttttttattatagtcatctttagggcgtcgttttgttcggaacggattctttggaactttaatgttagttttatttgtgttaaaactgaacgtggaatagttccaggttatataatcccagctaacctaacttgcacttaggagatgtttggtttgagaaatcactctatctaaaataagttagtgtatcatgagttcattttctaaatttggtgggatgatctcattccatatactaagtaactaggaagaatgaggtgatgatatattaactcattttattttacaaaccaaaaaaaaatgaggagtaagaag

SEQ ID NO: 11168 - DNA, 4448 bp, Zea Mays
taataggcaatctctggtagggtagaaacagtaccagatagggagggtcggcaacgatgactcggtaggcgtgcttcatcgccgccggcagctcctccggtcggttgtagtcgtagaaggtgaagtcgccgccgtactgcccgaaccgctcgtcgtactccagcagctgcgcgggcactccggggtccgtcttcttcaggtaggcgtagagcgtcgggcatgcgatgcaggccacggcaccggcggcggagcctgatccagaaggggagacaaggcggacgacctcctccacgagctcccgcgcggtacgctcatcataccagaactggctcaaccgccagtcctccgggaccagctctaccccgtcttcccctcctccagcttcattctgctcctccggacgatgctgttccgccagaaactcccggagcgcctccatcgccgcagcgctgagttgaggcacgttgtcgtcgtcgtcttcctgctccctgacctccccgctcactctctcatcctccataccgctcgcggccatcacatccaccgctggtctgctactctgctgcgggggcggcggcgcggggcaattgggcaaacactccgctggtccactccttcgatacgacgaaccaatggttttagcgaaatgagcatttgtggagttaccacatgggcctcgttggcccaaaggcccagtgagcctgacggaaagagcaataataaagcggagtggcaatggaatcgctcgcaggggaggggaacgagtgggaagggactgaagaagagcgagagaggtgggtgaccgccgcgcctccgtccagacttccagttccaggcgtggcgaactaggcaagcggcacgctccgccttcgcataccctccgcgagtgagctccagttgcctccaccgccgtactcagcagcggagaccggcgagtcaacaggtagcagagggggaggaggggagcagttcctattcgcccgggcaccgaccgcccggagcattcccgttcccgctgctgcgtccgctagtttgccgtcgccctgttgcacgtacggctagggtttggagatagatccgcccgccgccccgccggctcgtgtagatgcacgccgtgctgcagggaggagtagaggaagtgcctggctcgcgtggttttggttccttgttctgaaggcttcgtagcgcgcgatccggttcggttgcaatcggtagtaatgtcgggctcgtcggccgcaggggaggacatagtgcagcacctatcgtccaattccaacccgtcttcgtcgaagctcgccaagctcgaggcacggatggccggcaaggctgtctccgcgccatcgtcaccgccgcaccatcccatgtctgcccccgtcatatcgttcatggaccaggaggagctgcctgagacttcctcttccgatgacgataactgtgaggagttcttgatacaaaagaataccctgaagcgtccgagatctccagatggtgacaacatgcttgctcttggaaattttgagggttcggtaaatgaggcagcaaagattttaggcgtcacagatacaaaaccttccttggacaattcaagtaggaaaaaacaaggccgtggaaggggtcgtgctggtacaggccgagggcgtggctcaagggctgctgatcaaacacgattgacttcaacttcctcagcagctgtaacaaatggccaactagataaattaaccaacaaggaaccccgatcgagtgttcaactgggccatgacgacagagctgctttacaggacgaattgtcaacattacgtggcaaagttgcatttttggaggaagacctttctaaatcgcatcaagaagcaacaaattaccatgaacttagtgataggttagcaaaggaattgaaggatctcaaagatcatgaccaacaaatgagattaaagcaaatgaaaatcctgtccgatctgctgatagctgtgtcaaaagcagagaggcaagaagcgagaatgagaataaggcaggaatctttcagacttggaaatgttgctgttatgagagctgggactatcatatctgaaacttgggaagacggtcaggcaataaaagatcttaatgctcacctgaaatctttgctggaaactaaggagactattgaaaggcatcgtaaatcacttaagaaaagacaatctggtgactttatttctgaagttcatttttccctttattgcattctgttgacttgaatccttcataagcttctgtaggtactatctgacatatgttttgcagttgcagacctcaatgcttgtcaatattgtttcataaatagcactagaaaaaattaaagttgatgttggatttattcttgtgatattccagtttgtttgtttatacagagcaaaccctcctccattattgcaagtgcaatacaaaggtcatagcagcttaacaaaataagaaaaacatccactagcctaattgtatatttttctggctatatattcctacgttctttctttgttattcttttttaaatgattttctgtttagacaagggtgatggcagtgatgctgagactggcatgtctgaggaggacatcctcttacaagatgaaatatgtaaatctcggttaatgagtataaaacgggaggaagaacagtatatgagagagagagatcggtatgagttggaaaaggggaggcttatacgagagatgaagcgtctcagagatgaagatggctcacgctttaacaacttccaaattcttcaccatcgttatgctctcttaaatcttcttggaaagggagggtttagtgaggtttacagggcttttgatttggtggagtacaaatatgtggcatgcaagcttcatggattgaatgctcaatggagtgaggagaaaaaacagagctacatacggcatgcgattcgtgaatataacattcacaaaactttggttcatccaaacattgcaaggatcttgatgcagtccttaaagctacaccaattcttccagaaaaagaaggaaggatcataattgttcaaatatttcagggcctggtttatctaaacaagaggggccaaaagatcattcactatgatctaaagccgggcaatgttctctttgatgaggttggtgttgcaaaagttaccgactttggcctcagcaagatagtggagaatgatgttgggtctcaggggatggagctcacttctcagggagctggaacctattggtggatgtttggtcagctggtgtaatgttttaccagatgctcttcggaaagcgtccttttggtcatgaccagacccaggagagaatacttcgggaagatacgattatcaatgcacggagagtggagttcccttcaaagccagctgtatcaaatgaggcaaaggatctgatacgccggtgcttgacatacaaccaatcagagagaccagatgtactaaccatagctcaagatccttatctctcatacgcaaagagatagccgctatgccggagaacactaaggcaagggtagctgatcatttatgagattatttatgtatggggatggataatcttgcgaaggagcaaagtgttccacaagctcaagaagaccacaaagggtgtaactgtatatgttgtaaattttagtctttcccatcgcagcaatgacctgaaatccagaagccatcagttcaacggacagcttctttgtagcgtagagaaagcaggcattggtttgaacggggcatgcgtaacgtgatggtttcttggctggtgggctgtgggcagtggtcctgttgatggttggtttttgtttgctcatactgtcggtaaggtctgccaaatcagaaaccaccggtgacaggcgagagctcacatgctcacctccgaaaaaaatctcggccttgcactggcaggatggactggattttgcgtattgccaaaacagatttaaggtagcatgcatcaatacaggttactttggataacctatagactcaccacagccacaagcacagaagctcttcgtacaatttcagagagtaccgatgtgccagatttctgctggtgccaatttgtttgtgatcgctgtcacccttgtacaacactgggatcgctcattgagcatacacaagttatgcaatttgcttttttattatagtcatctttagggcgtcgttttgttcggaacggattctttggaactttaatgttagttttatttgtgttaaaactgaacgtggaatagttccaggttatataatcccagctaacctaacttgcacttaggagatgtttggtttgagaaatcactctatctaaaataagttagtgtatcatgagttcattttctaaatttggtgggatgatctcattccatatactaagtaactaggaagaatgaggtgatgatatattaactcattttattttacaaaccaaaaaaaaatgaggagtaagaag

SEQ ID NO: 11169 - DNA, 4207 bp, Zea Mays
taataggcaatctctggtagggtagaaacagtaccagatagggagggtcggcaacgatgactcggtaggcgtgcttcatcgccgccggcagctcctccggtcggttgtagtcgtagaaggtgaagtcgccgccgtactgcccgaaccgctcgtcgtactccagcagctgcgcgggcactccggggtccgtcttcttcaggtaggcgtagagcgtcgggcatgcgatgcaggccacggcaccggcggcggagcctgatccagaaggggagacaaggcggacgacctcctccacgagctcccgcgcggtacgctcatcataccagaactggctcaaccgccagtcctccgggaccagctctaccccgtcttcccctcctccagcttcattctgctcctccggacgatgctgttccgccagaaactcccggagcgcctccatcgccgcagcgctgagttgaggcacgttgtcgtcgtcgtcttcctgctccctgacctccccgctcactctctcatcctccataccgctcgcggccatcacatccaccgctggtctgctactctgctgcgggggcggcggcgcggggcaattgggcaaacactccgctggtccactccttcgatacgacgaaccaatggttttagcgaaatgagcatttgtggagttaccacatgggcctcgttggcccaaaggcccagtgagcctgacggaaagagcaataataaagcggagtggcaatggaatcgctcgcaggggaggggaacgagtgggaagggactgaagaagagcgagagaggtgggtgaccgccgcgcctccgtccagacttccagttccaggcgtggcgaactaggcaagcggcacgctccgccttcgcataccctccgcgagtgagctccagttgcctccaccgccgtactcagcagcggagaccggcgagtcaacaggggaggacatagtgcagcacctatcgtccaattccaacccgtcttcgtcgaagctcgccaagctcgaggcacggatggccggcaaggctgtctccgcgccatcgtcaccgccgcaccatcccatgtctgcccccgtcatatcgttcatggaccaggaggagctgcctgagacttcctcttccgatgacgataactgtgaggagttcttgatacaaaagaataccctgaagcgtccgagatctccagatggtgacaacatgcttgctcttggaaattttgagggttcggtaaatgaggcagcaaagattttaggcgtcacagatacaaaaccttccttggacaattcaagtaggaaaaaacaaggccgtggaaggggtcgtgctggtacaggccgagggcgtggctcaagggctgctgatcaaacacgattgacttcaacttcctcagcagctgtaacaaatggccaactagataaattaaccaacaaggaaccccgatcgagtgttcaactgggccatgacgacagagctgctttacaggacgaattgtcaacattacgtggcaaagttgcatttttggaggaagacctttctaaatcgcatcaagaagcaacaaattaccatgaacttagtgataggttagcaaaggaattgaaggatctcaaagatcatgaccaacaaatgagattaaagcaaatgaaaatcctgtccgatctgctgatagctgtgtcaaaagcagagaggcaagaagcgagaatgagaataaggcaggaatctttcagacttggaaatgttgctgttatgagagctgggactatcatatctgaaacttgggaagacggtcaggcaataaaagatcttaatgctcacctgaaatctttgctggaaactaaggagactattgaaaggcatcgtaaatcacttaagaaaagacaatctggtgactttatttctgaagttcatttttccctttattgcattctgttgacttgaatccttcataagcttctgtaggtactatctgacatatgttttgcagttgcagacctcaatgcttgtcaatattgtttcataaatagcactagaaaaaattaaagttgatgttggatttattcttgtgatattccagtttgtttgtttatacagagcaaaccctcctccattattgcaagtgcaatacaaaggtcatagcagcttaacaaaataagaaaaacatccactagcctaattgtatatttttctggctatatattcctacgttctttctttgttattcttttttaaatgattttctgtttagacaagggtgatggcagtgatgctgagactggcatgtctgaggaggacatcctcttacaagatgaaatatgtaaatctcggttaatgagtataaaacgggaggaagaacagtatatgagagagagagatcggtatgagttggaaaaggggaggcttatacgagagatgaagcgtctcagagatgaagatggctcacgctttaacaacttccaaattcttcaccatcgttatgctctcttaaatcttcttggaaagggagggtttagtgaggtttacagggcttttgatttggtggagtacaaatatgtggcatgcaagcttcatggattgaatgctcaatggagtgaggagaaaaaacagagctacatacggcatgcgattcgtgaatataacattcacaaaactttggttcatccaaacattgcaaggatcttgatgcagtccttaaagctacaccaattcttccagaaaaagaaggaaggatcataattgttcaaatatttcagggcctggtttatctaaacaagaggggccaaaagatcattcactatgatctaaagccgggcaatgttctctttgatgaggttggtgttgcaaaagttaccgactttggcctcagcaagatagtggagaatgatgttgggtctcaggggatggagctcacttctcagggagctggaacctattggtatcttcctccagaatgctttgacctgagcaaaacaccatttatttcatctaaggtggatgtttggtcagctggtgtaatgttttaccagatgctcttcggaaagcgtccttttggtcatgaccagacccaggagagaatacttcgggaagatacgattatcaatgcacggagagtggagttcccttcaaagccagctgtatcaaatgaggcaaaggatctgatacgccggtgcttgacatacaaccaatcagagagaccagatgtactaaccatagctcaagatccttatctctcatacgcaaagagatagccgctatgccggagaacactaaggcaagggtagctgatcatttatgagattatttatgtatggggatggataatcttgcgaaggagcaaagtgttccacaagctcaagaagaccacaaagggtgtaactgtatatgttgtaaattttagtctttcccatcgcagcaatgacctgaaatccagaagccatcagttcaacggacagcttctttgtagcgtagagaaagcaggcattggtttgaacggggcatgcgtaacgtgatggtttcttggctggtgggctgtgggcagtggtcctgttgatggttggtttttgtttgctcatactgtcggtaaggtctgccaaatcagaaaccaccggtgacaggcgagagctcacatgctcacctccgaaaaaaatctcggccttgcactggcaggatggactggattttgcgtattgccaaaacagatttaaggtagcatgcatcaatacaggttactttggataacctatagactcaccacagccacaagcacagaagctcttcgtacaatttcagagagtaccgatgtgccagatttctgctggtgccaatttgtttgtgatcgctgtcacccttgtacaacactgggatcgctcattgagcatacacaagttatgcaatttgcttttttattatagtcatctttagggcgtcgttttgttcggaacggattctttggaactttaatgttagttttatttgtgttaaaactgaacgtggaatagttccaggttatataatcccagctaacctaacttgcacttaggagatgtttggtttgagaaatcactctatctaaaataagttagtgtatcatgagttcattttctaaatttggtgggatgatctcattccatatactaagtaactaggaagaatgaggtgatgatatattaactcattttattttacaaaccaaaaaaaaatgaggagtaagaag

SEQ ID NO: 11170 - DNA, 4083 bp, Zea Mays
taataggcaatctctggtagggtagaaacagtaccagatagggagggtcggcaacgatgactcggtaggcgtgcttcatcgccgccggcagctcctccggtcggttgtagtcgtagaaggtgaagtcgccgccgtactgcccgaaccgctcgtcgtactccagcagctgcgcgggcactccggggtccgtcttcttcaggtaggcgtagagcgtcgggcatgcgatgcaggccacggcaccggcggcggagcctgatccagaaggggagacaaggcggacgacctcctccacgagctcccgcgcggtacgctcatcataccagaactggctcaaccgccagtcctccgggaccagctctaccccgtcttcccctcctccagcttcattctgctcctccggacgatgctgttccgccagaaactcccggagcgcctccatcgccgcagcgctgagttgaggcacgttgtcgtcgtcgtcttcctgctccctgacctccccgctcactctctcatcctccataccgctcgcggccatcacatccaccgctggtctgctactctgctgcgggggcggcggcgcggggcaattgggcaaacactccgctggtccactccttcgatacgacgaaccaatggttttagcgaaatgagcatttgtggagttaccacatgggcctcgttggcccaaaggcccagtgagcctgacggaaagagcaataataaagcggagtggcaatggaatcgctcgcaggggaggggaacgagtgggaagggactgaagaagagcgagagaggtgggtgaccgccgcgcctccgtccagacttccagttccaggcgtggcgaactaggcaagcggcacgctccgccttcgcataccctccgcgagtgagctccagttgcctccaccgccgtactcagcagcggagaccggcgagtcaacagaactgtgaggagttcttgatacaaaagaataccctgaagcgtccgagatctccagatggtgacaacatgcttgctcttggaaattttgagggttcggtaaatgaggcagcaaagattttaggcgtcacagatacaaaaccttccttggacaattcaagtaggaaaaaacaaggccgtggaaggggtcgtgctggtacaggccgagggcgtggctcaagggctgctgatcaaacacgattgacttcaacttcctcagcagctgtaacaaatggccaactagataaattaaccaacaaggaaccccgatcgagtgttcaactgggccatgacgacagagctgctttacaggacgaattgtcaacattacgtggcaaagttgcatttttggaggaagacctttctaaatcgcatcaagaagcaacaaattaccatgaacttagtgataggttagcaaaggaattgaaggatctcaaagatcatgaccaacaaatgagattaaagcaaatgaaaatcctgtccgatctgctgatagctgtgtcaaaagcagagaggcaagaagcgagaatgagaataaggcaggaatctttcagacttggaaatgttgctgttatgagagctgggactatcatatctgaaacttgggaagacggtcaggcaataaaagatcttaatgctcacctgaaatctttgctggaaactaaggagactattgaaaggcatcgtaaatcacttaagaaaagacaatctggtgactttatttctgaagttcatttttccctttattgcattctgttgacttgaatccttcataagcttctgtaggtactatctgacatatgttttgcagttgcagacctcaatgcttgtcaatattgtttcataaatagcactagaaaaaattaaagttgatgttggatttattcttgtgatattccagtttgtttgtttatacagagcaaaccctcctccattattgcaagtgcaatacaaaggtcatagcagcttaacaaaataagaaaaacatccactagcctaattgtatatttttctggctatatattcctacgttctttctttgttattcttttttaaatgattttctgtttagacaagggtgatggcagtgatgctgagactggcatgtctgaggaggacatcctcttacaagatgaaatatgtaaatctcggttaatgagtataaaacgggaggaagaacagtatatgagagagagagatcggtatgagttggaaaaggggaggcttatacgagagatgaagcgtctcagagatgaagatggctcacgctttaacaacttccaaattcttcaccatcgttatgctctcttaaatcttcttggaaagggagggtttagtgaggtttacagggcttttgatttggtggagtacaaatatgtggcatgcaagcttcatggattgaatgctcaatggagtgaggagaaaaaacagagctacatacggcatgcgattcgtgaatataacattcacaaaactttggttcatccaaacattgtcaggctatgggatatatttgagattgatcacaatacattctgcactgtcctagaatattgcagtggcaaggatcttgatgcagtccttaaagctacaccaattcttccagaaaaagaaggaaggatcataattgttcaaatatttcagggcctggtttatctaaacaagaggggccaaaagatcattcactatgatctaaagccgggcaatgttctctttgatgaggttggtgttgcaaaagttaccgactttggcctcagcaagatagtggagaatgatgttgggtctcaggggatggagctcacttctcagggagctggaacctattggtatcttcctccagaatgctttgacctgagcaaaacaccatttatttcatctaaggtggatgtttggtcagctggtgtaatgttttaccagatgctcttcggaaagcgtccttttggtcatgaccagacccaggagagaatacttcgggaagatacgattatcaatgcacggagagtggagttcccttcaaagccagctgtatcaaatgaggcaaaggatctgatacgccggtgcttgacatacaaccaatcagagagaccagatgtactaaccatagctcaagatccttatctctcatacgcaaagagatagccgctatgccggagaacactaaggcaagggtagctgatcatttatgagattatttatgtatggggatggataatcttgcgaaggagcaaagtgttccacaagctcaagaagaccacaaagggtgtaactgtatatgttgtaaattttagtctttcccatcgcagcaatgacctgaaatccagaagccatcagttcaacggacagcttctttgtagcgtagagaaagcaggcattggtttgaacggggcatgcgtaacgtgatggtttcttggctggtgggctgtgggcagtggtcctgttgatggttggtttttgtttgctcatactgtcggtaaggtctgccaaatcagaaaccaccggtgacaggcgagagctcacatgctcacctccgaaaaaaatctcggccttgcactggcaggatggactggattttgcgtattgccaaaacagatttaaggtagcatgcatcaatacaggttactttggataacctatagactcaccacagccacaagcacagaagctcttcgtacaatttcagagagtaccgatgtgccagatttctgctggtgccaatttgtttgtgatcgctgtcacccttgtacaacactgggatcgctcattgagcatacacaagttatgcaatttgcttttttattatagtcatctttagggcgtcgttttgttcggaacggattctttggaactttaatgttagttttatttgtgttaaaactgaacgtggaatagttccaggttatataatcccagctaacctaacttgcacttaggagatgtttggtttgagaaatcactctatctaaaataagttagtgtatcatgagttcattttctaaatttggtgggatgatctcattccatatactaagtaactaggaagaatgaggtgatgatatattaactcattttattttacaaaccaaaaaaaaatgaggagtaagaag

SEQ ID NO: 11171 - DNA, 4274 bp, Zea Mays
taataggcaatctctggtagggtagaaacagtaccagatagggagggtcggcaacgatgactcggtaggcgtgcttcatcgccgccggcagctcctccggtcggttgtagtcgtagaaggtgaagtcgccgccgtactgcccgaaccgctcgtcgtactccagcagctgcgcgggcactccggggtccgtcttcttcaggtaggcgtagagcgtcgggcatgcgatgcaggccacggcaccggcggcggagcctgatccagaaggggagacaaggcggacgacctcctccacgagctcccgcgcggtacgctcatcataccagaactggctcaaccgccagtcctccgggaccagctctaccccgtcttcccctcctccagcttcattctgctcctccggacgatgctgttccgccagaaactcccggagcgcctccatcgccgcagcgctgagttgaggcacgttgtcgtcgtcgtcttcctgctccctgacctccccgctcactctctcatcctccataccgctcgcggccatcacatccaccgctggtctgctactctgctgcgggggcggcggcgcggggcaattgggcaaacactccgctggtccactccttcgatacgacgaaccaatggttttagcgaaatgagcatttgtggagttaccacatgggcctcgttggcccaaaggcccagtgagcctgacggaaagagcaataataaagcggagtggcaatggaatcgctcgcaggggaggggaacgagtgggaagggactgaagaagagcgagagaggtgggtgaccgccgcgcctccgtccagacttccagttccaggcgtggcgaactaggcaagcggcacgctccgccttcgcataccctccgcgagtgagctccagttgcctccaccgccgtactcagcagcggagaccggcgagtcaacaggggaggacatagtgcagcacctatcgtccaattccaacccgtcttcgtcgaagctcgccaagctcgaggcacggatggccggcaaggctgtctccgcgccatcgtcaccgccgcaccatcccatgtctgcccccgtcatatcgttcatggaccaggaggagctgcctgagacttcctcttccgatgacgataactgtgaggagttcttgatacaaaagaataccctgaagcgtccgagatctccagatggtgacaacatgcttgctcttggaaattttgagggttcggtaaatgaggcagcaaagattttaggcgtcacagatacaaaaccttccttggacaattcaagtaggaaaaaacaaggccgtggaaggggtcgtgctggtacaggccgagggcgtggctcaagggctgctgatcaaacacgattgacttcaacttcctcagcagctgtaacaaatggccaactagataaattaaccaacaaggaaccccgatcgagtgttcaactgggccatgacgacagagctgctttacaggacgaattgtcaacattacgtggcaaagttgcatttttggaggaagacctttctaaatcgcatcaagaagcaacaaattaccatgaacttagtgataggttagcaaaggaattgaaggatctcaaagatcatgaccaacaaatgagattaaagcaaatgaaaatcctgtccgatctgctgatagctgtgtcaaaagcagagaggcaagaagcgagaatgagaataaggcaggaatctttcagacttggaaatgttgctgttatgagagctgggactatcatatctgaaacttgggaagacggtcaggcaataaaagatcttaatgctcacctgaaatctttgctggaaactaaggagactattgaaaggcatcgtaaatcacttaagaaaagacaatctggtgactttatttctgaagttcatttttccctttattgcattctgttgacttgaatccttcataagcttctgtaggtactatctgacatatgttttgcagttgcagacctcaatgcttgtcaatattgtttcataaatagcactagaaaaaattaaagttgatgttggatttattcttgtgatattccagtttgtttgtttatacagagcaaaccctcctccattattgcaagtgcaatacaaaggtcatagcagcttaacaaaataagaaaaacatccactagcctaattgtatatttttctggctatatattcctacgttctttctttgttattcttttttaaatgattttctgtttagacaagggtgatggcagtgatgctgagactggcatgtctgaggaggacatcctcttacaagatgaaatatgtaaatctcggttaatgagtataaaacgggaggaagaacagtatatgagagagagagatcggtatgagttggaaaaggggaggcttatacgagagatgaagcgtctcagagatgaagatggctcacgctttaacaacttccaaattcttcaccatcgttatgctctcttaaatcttcttggaaagggagggtttagtgaggtttacagggcttttgatttggtggagtacaaatatgtggcatgcaagcttcatggattgaatgctcaatggagtgaggagaaaaaacagagctacatacggcatgcgattcgtgaatataacattcacaaaactttggttcatccaaacattgtcaggctatgggatatatttgagattgatcacaatacattctgcactgtcctagaatattgcagtggcaaggatcttgatgcagtccttaaagctacaccaattcttccagaaaaagaaggaaggatcataattgttcaaatatttcagggcctggtttatctaaacaagaggggccaaaagatcattcactatgatctaaagccgggcaatgttctctttgatgaggttggtgttgcaaaagttaccgactttggcctcagcaagatagtggagaatgatgttgggtctcaggggatggagctcacttctcagggagctggaacctattggtatcttcctccagaatgctttgacctgagcaaaacaccatttatttcatctaaggtggatgtttggtcagctggtgtaatgttttaccagatgctcttcggaaagcgtccttttggtcatgaccagacccaggagagaatacttcgggaagatacgattatcaatgcacggagagtggagttcccttcaaagccagctgtatcaaatgaggcaaaggatctgatacgccggtgcttgacatacaaccaatcagagagaccagatgtactaaccatagctcaagatccttatctctcatacgcaaagagatagccgctatgccggagaacactaaggcaagggtagctgatcatttatgagattatttatgtatggggatggataatcttgcgaaggagcaaagtgttccacaagctcaagaagaccacaaagggtgtaactgtatatgttgtaaattttagtctttcccatcgcagcaatgacctgaaatccagaagccatcagttcaacggacagcttctttgtagcgtagagaaagcaggcattggtttgaacggggcatgcgtaacgtgatggtttcttggctggtgggctgtgggcagtggtcctgttgatggttggtttttgtttgctcatactgtcggtaaggtctgccaaatcagaaaccaccggtgacaggcgagagctcacatgctcacctccgaaaaaaatctcggccttgcactggcaggatggactggattttgcgtattgccaaaacagatttaaggtagcatgcatcaatacaggttactttggataacctatagactcaccacagccacaagcacagaagctcttcgtacaatttcagagagtaccgatgtgccagatttctgctggtgccaatttgtttgtgatcgctgtcacccttgtacaacactgggatcgctcattgagcatacacaagttatgcaatttgcttttttattatagtcatctttagggcgtcgttttgttcggaacggattctttggaactttaatgttagttttatttgtgttaaaactgaacgtggaatagttccaggttatataatcccagctaacctaacttgcacttaggagatgtttggtttgagaaatcactctatctaaaataagttagtgtatcatgagttcattttctaaatttggtgggatgatctcattccatatactaagtaactaggaagaatgaggtgatgatatattaactcattttattttacaaaccaaaaaaaaatgaggagtaagaag

SEQ ID NO: 11172 - DNA, 4570 bp, Zea Mays
taataggcaatctctggtagggtagaaacagtaccagatagggagggtcggcaacgatgactcggtaggcgtgcttcatcgccgccggcagctcctccggtcggttgtagtcgtagaaggtgaagtcgccgccgtactgcccgaaccgctcgtcgtactccagcagctgcgcgggcactccggggtccgtcttcttcaggtaggcgtagagcgtcgggcatgcgatgcaggccacggcaccggcggcggagcctgatccagaaggggagacaaggcggacgacctcctccacgagctcccgcgcggtacgctcatcataccagaactggctcaaccgccagtcctccgggaccagctctaccccgtcttcccctcctccagcttcattctgctcctccggacgatgctgttccgccagaaactcccggagcgcctccatcgccgcagcgctgagttgaggcacgttgtcgtcgtcgtcttcctgctccctgacctccccgctcactctctcatcctccataccgctcgcggccatcacatccaccgctggtctgctactctgctgcgggggcggcggcgcggggcaattgggcaaacactccgctggtccactccttcgatacgacgaaccaatggttttagcgaaatgagcatttgtggagttaccacatgggcctcgttggcccaaaggcccagtgagcctgacggaaagagcaataataaagcggagtggcaatggaatcgctcgcaggggaggggaacgagtgggaagggactgaagaagagcgagagaggtgggtgaccgccgcgcctccgtccagacttccagttccaggcgtggcgaactaggcaagcggcacgctccgccttcgcataccctccgcgagtgagctccagttgcctccaccgccgtactcagcagcggagaccggcgagtcaacaggtagcagagggggaggaggggagcagttcctattcgcccgggcaccgaccgcccggagcattcccgttcccgctgctgcgtccgctagtttgccgtcgccctgttgcacgtacggctagggtttggagatagatccgcccgccgccccgccggctcgtgtagatgcacgccgtgctgcagggaggagtagaggaagtgcctggctcgcgtggttttggttccttgttctgaaggcttcgtagcgcgcgatccggttcggttgcaatcggtagtaatgtcgggctcgtcggccgcaggggaggacatagtgcagcacctatcgtccaattccaacccgtcttcgtcgaagctcgccaagctcgaggcacggatggccggcaaggctgtctccgcgccatcgtcaccgccgcaccatcccatgtctgcccccgtcatatcgttcatggaccaggaggagctgcctgagacttcctcttccgatgacgataactgtgaggagttcttgatacaaaagaataccctgaagcgtccgagatctccagatggtgacaacatgcttgctcttggaaattttgagggttcggtaaatgaggcagcaaagattttaggcgtcacagatacaaaaccttccttggacaattcaagtaggaaaaaacaaggccgtggaaggggtcgtgctggtacaggccgagggcgtggctcaagggctgctgatcaaacacgattgacttcaacttcctcagcagctgtaacaaatggccaactagataaattaaccaacaaggaaccccgatcgagtgttcaactgggccatgacgacagagctgctttacaggacgaattgtcaacattacgtggcaaagttgcatttttggaggaagacctttctaaatcgcatcaagaagcaacaaattaccatgaacttagtgataggttagcaaaggaattgaaggatctcaaagatcatgaccaacaaatgagattaaagcaaatgaaaatcctgtccgatctgctgatagctgtgtcaaaagcagagaggcaagaagcgagaatgagaataaggcaggaatctttcagacttggaaatgttgctgttatgagagctgggactatcatatctgaaacttgggaagacggtcaggcaataaaagatcttaatgctcacctgaaatctttgctggaaactaaggagactattgaaaggcatcgtaaatcacttaagaaaagacaatctggtgactttatttctgaagttcatttttccctttattgcattctgttgacttgaatccttcataagcttctgtaggtactatctgacatatgttttgcagttgcagacctcaatgcttgtcaatattgtttcataaatagcactagaaaaaattaaagttgatgttggatttattcttgtgatattccagtttgtttgtttatacagagcaaaccctcctccattattgcaagtgcaatacaaaggtcatagcagcttaacaaaataagaaaaacatccactagcctaattgtatatttttctggctatatattcctacgttctttctttgttattcttttttaaatgattttctgtttagacaagggtgatggcagtgatgctgagactggcatgtctgaggaggacatcctcttacaagatgaaatatgtaaatctcggttaatgagtataaaacgggaggaagaacagtatatgagagagagagatcggtatgagttggaaaaggggaggcttatacgagagatgaagcgtctcagagatgaagatggctcacgctttaacaacttccaaattcttcaccatcgttatgctctcttaaatcttcttggaaagggagggtttagtgaggtttacagggcttttgatttggtggagtacaaatatgtggcatgcaagcttcatggattgaatgctcaatggagtgaggagaaaaaacagagctacatacggcatgcgattcgtgaatataacattcacaaaactttggttcatccaaacattgtcaggctatgggatatatttgagattgatcacaatacattctgcactgtcctagaatattgcagtggcaaggatcttgatgcagtccttaaagctacaccaattcttccagaaaaagaaggaaggatcataattgttcaaatatttcagggcctggtttatctaaacaagaggggccaaaagatcattcactatgatctaaagccgggcaatgttctctttgatgaggttggtgttgcaaaagttaccgactttggcctcagcaagatagtggagaatgatgttgggtctcaggggatggagctcacttctcagggagctggaacctattggtatcttcctccagaatgctttgacctgagcaaaacaccatttatttcatctaaggtggatgtttggtcagctggtgtaatgttttaccagatgctcttcggaaagcgtccttttggtcatgaccagacccaggagagaatacttcgggaagatacgattatcaatgcacggagagtggagttcccttcaaagccagctgtatcaaatgaggcaaaggatctgatacgccggtgcttgacatacaaccaatcagagagaccagatgtactaaccatagctcaagatccttatctctcatacgcaaagagatagccgctatgccggagaacactaaggcaagggtagctgatcatttatgagattatttatgtatggggatggataatcttgcgaaggagcaaagtgttccacaagctcaagaagaccacaaagggtgtaactgtatatgttgtaaattttagtctttcccatcgcagcaatgacctgaaatccagaagccatcagttcaacggacagcttctttgtagcgtagagaaagcaggcattggtttgaacggggcatgcgtaacgtgatggtttcttggctggtgggctgtgggcagtggtcctgttgatggttggtttttgtttgctcatactgtcggtaaggtctgccaaatcagaaaccaccggtgacaggcgagagctcacatgctcacctccgaaaaaaatctcggccttgcactggcaggatggactggattttgcgtattgccaaaacagatttaaggtagcatgcatcaatacaggttactttggataacctatagactcaccacagccacaagcacagaagctcttcgtacaatttcagagagtaccgatgtgccagatttctgctggtgccaatttgtttgtgatcgctgtcacccttgtacaacactgggatcgctcattgagcatacacaagttatgcaatttgcttttttattatagtcatctttagggcgtcgttttgttcggaacggattctttggaactttaatgttagttttatttgtgttaaaactgaacgtggaatagttccaggttatataatcccagctaacctaacttgcacttaggagatgtttggtttgagaaatcactctatctaaaataagttagtgtatcatgagttcattttctaaatttggtgggatgatctcattccatatactaagtaactaggaagaatgaggtgatgatatattaactcattttattttacaaaccaaaaaaaaatgaggagtaagaag

SEQ ID NO: 11173 - DNA, 4228 bp, Zea Mays
taataggcaatctctggtagggtagaaacagtaccagatagggagggtcggcaacgatgactcggtaggcgtgcttcatcgccgccggcagctcctccggtcggttgtagtcgtagaaggtgaagtcgccgccgtactgcccgaaccgctcgtcgtactccagcagctgcgcgggcactccggggtccgtcttcttcaggtaggcgtagagcgtcgggcatgcgatgcaggccacggcaccggcggcggagcctgatccagaaggggagacaaggcggacgacctcctccacgagctcccgcgcggtacgctcatcataccagaactggctcaaccgccagtcctccgggaccagctctaccccgtcttcccctcctccagcttcattctgctcctccggacgatgctgttccgccagaaactcccggagcgcctccatcgccgcagcgctgagttgaggcacgttgtcgtcgtcgtcttcctgctccctgacctccccgctcactctctcatcctccataccgctcgcggccatcacatccaccgctggtctgctactctgctgcgggggcggcggcgcggggcaattgggcaaacactccgctggtccactccttcgatacgacgaaccaatggttttagcgaaatgagcatttgtggagttaccacatgggcctcgttggcccaaaggcccagtgagcctgacggaaagagcaataataaagcggagtggcaatggaatcgctcgcaggggaggggaacgagtgggaagggactgaagaagagcgagagaggtgggtgaccgccgcgcctccgtccagacttccagttccaggcgtggcgaactaggcaagcggcacgctccgccttcgcataccctccgcgagtgagctccagttgcctccaccgccgtactcagcagcggagaccggcgagtcaacaggggaggacatagtgcagcacctatcgtccaattccaacccgtcttcgtcgaagctcgccaagctcgaggcacggatggccggcaaggctgtctccgcgccatcgtcaccgccgcaccatcccatgtctgcccccgtcatatcgttcatggaccaggaggagctgcctgagacttcctcttccgatgacgataactgtgaggagttcttgatacaaaagaataccctgaagcgtccgagatctccagatggtgacaacatgcttgctcttggaaattttgagggttcggtaaatgaggcagcaaagattttaggcgtcacagatacaaaaccttccttggacaattcaagtaggaaaaaacaaggccgtggaaggggtcgtgctggtacaggccgagggcgtggctcaagggctgctgatcaaacacgattgacttcaacttcctcagcagctgtaacaaatggccaactagataaattaaccaacaaggaaccccgatcgagtgttcaactgggccatgacgacagagctgctttacaggacgaattgtcaacattacgtggcaaagttgcatttttggaggaagacctttctaaatcgcatcaagaagcaacaaattaccatgaacttagtgataggttagcaaaggaattgaaggatctcaaagatcatgaccaacaaatgagattaaagagaggcaagaagcgagaatgagaataaggcaggaatctttcagacttggaaatgttgctgttatgagagctgggactatcatatctgaaacttgggaagacggtcaggcaataaaagatcttaatgctcacctgaaatctttgctggaaactaaggagactattgaaaggcatcgtaaatcacttaagaaaagacaatctggtgactttatttctgaagttcatttttccctttattgcattctgttgacttgaatccttcataagcttctgtaggtactatctgacatatgttttgcagttgcagacctcaatgcttgtcaatattgtttcataaatagcactagaaaaaattaaagttgatgttggatttattcttgtgatattccagtttgtttgtttatacagagcaaaccctcctccattattgcaagtgcaatacaaaggtcatagcagcttaacaaaataagaaaaacatccactagcctaattgtatatttttctggctatatattcctacgttctttctttgttattcttttttaaatgattttctgtttagacaagggtgatggcagtgatgctgagactggcatgtctgaggaggacatcctcttacaagatgaaatatgtaaatctcggttaatgagtataaaacgggaggaagaacagtatatgagagagagagatcggtatgagttggaaaaggggaggcttatacgagagatgaagcgtctcagagatgaagatggctcacgctttaacaacttccaaattcttcaccatcgttatgctctcttaaatcttcttggaaagggagggtttagtgaggtttacagggcttttgatttggtggagtacaaatatgtggcatgcaagcttcatggattgaatgctcaatggagtgaggagaaaaaacagagctacatacggcatgcgattcgtgaatataacattcacaaaactttggttcatccaaacattgtcaggctatgggatatatttgagattgatcacaatacattctgcactgtcctagaatattgcagtggcaaggatcttgatgcagtccttaaagctacaccaattcttccagaaaaagaaggaaggatcataattgttcaaatatttcagggcctggtttatctaaacaagaggggccaaaagatcattcactatgatctaaagccgggcaatgttctctttgatgaggttggtgttgcaaaagttaccgactttggcctcagcaagatagtggagaatgatgttgggtctcaggggatggagctcacttctcagggagctggaacctattggtatcttcctccagaatgctttgacctgagcaaaacaccatttatttcatctaaggtggatgtttggtcagctggtgtaatgttttaccagatgctcttcggaaagcgtccttttggtcatgaccagacccaggagagaatacttcgggaagatacgattatcaatgcacggagagtggagttcccttcaaagccagctgtatcaaatgaggcaaaggatctgatacgccggtgcttgacatacaaccaatcagagagaccagatgtactaaccatagctcaagatccttatctctcatacgcaaagagatagccgctatgccggagaacactaaggcaagggtagctgatcatttatgagattatttatgtatggggatggataatcttgcgaaggagcaaagtgttccacaagctcaagaagaccacaaagggtgtaactgtatatgttgtaaattttagtctttcccatcgcagcaatgacctgaaatccagaagccatcagttcaacggacagcttctttgtagcgtagagaaagcaggcattggtttgaacggggcatgcgtaacgtgatggtttcttggctggtgggctgtgggcagtggtcctgttgatggttggtttttgtttgctcatactgtcggtaaggtctgccaaatcagaaaccaccggtgacaggcgagagctcacatgctcacctccgaaaaaaatctcggccttgcactggcaggatggactggattttgcgtattgccaaaacagatttaaggtagcatgcatcaatacaggttactttggataacctatagactcaccacagccacaagcacagaagctcttcgtacaatttcagagagtaccgatgtgccagatttctgctggtgccaatttgtttgtgatcgctgtcacccttgtacaacactgggatcgctcattgagcatacacaagttatgcaatttgcttttttattatagtcatctttagggcgtcgttttgttcggaacggattctttggaactttaatgttagttttatttgtgttaaaactgaacgtggaatagttccaggttatataatcccagctaacctaacttgcacttaggagatgtttggtttgagaaatcactctatctaaaataagttagtgtatcatgagttcattttctaaatttggtgggatgatctcattccatatactaagtaactaggaagaatgaggtgatgatatattaactcattttattttacaaaccaaaaaaaaatgaggagtaagaag

SEQ ID NO: 11174 - DNA, 4086 bp, Zea Mays
agcagcagcaggaatgaaccttcaggccgtgcgaggaaagatactgttttggcaaccttttccaagcactccttactctgcatcatcaaccaacgaataatagccatttctcctcgatatttcctctcatctcaaatgttaagaactgatcaaacactttttaataggcaatctctggtagggtagaaacagtaccagatagggagggtcggcaacgatgactcggtaggcgtgcttcatcgccgccggcagctcctccggtcggttgtagtcgtagaaggtgaagtcgccgccgtactgcccgaaccgctcgtcgtactccagcagctgcgcgggcacgttgtcgtcgtcgtcttcctgctccctgacctccccgctcactctctcatcctccataccgctcgcggccatcacatccaccgctggtctgctactctgctgcgggggcggcggcgcggggcaattgggcaaacactccgctggtccactccttcgatacgacgaaccaatggttttagcgaaatgagcatttgtggagttaccacatgggcctcgttggcccaaaggcccagtgagcctgacggaaagagcaataataaagcggagtggcaatggaatcgctcgcaggggaggggaacgagtgggaagggactgaagaagagcgagagaggtgggtgaccgccgcgcctccgtccagacttccagttccaggcgtggcgaactaggcaagcggcacgctccgccttcgcataccctccgcgagtgagctccagttgcctccaccgccgtactcagcagcggagaccggcgagtcaacaggtagcagagggggaggaggggagcagttcctattcgcccgggcaccgaccgcccggagcattcccgttcccgctgctgcgtccgctagtttgccgtcgccctgttgcacgtacggctagggtttggagatagatccgcccgccgccccgccggctcgtgtagatgcacgccgtgctgcagggaggagtagaggaagtgcctggctcgcgtggttttggttccttgttctgaaggcttcgtagcgcgcgatccggttcggttgcaatcggtagtaatgtcgggctcgtcggccgcaggggaggacatagtgcagcacctatcgtccaattccaacccgtcttcgtcgaagctcgccaagctcgaggcacggatggccggcaaggctgtctccgcgccatcgtcaccgccgcaccatcccatgtctgcccccgtcatatcgttcatggaccaggaggagctgcctgagacttcctcttccgatgacgataactgtgaggagttcttgatacaaaagaataccctgaagcgtccgagatctccagatggtgacaacatgcttgctcttggaaattttgagggttcggtaaatgaggcagcaaagattttaggcgtcacagatacaaaaccttccttggacaattcaagtaggaaaaaacaaggccgtggaaggggtcgtgctggtacaggccgagggcgtggctcaagggctgctgatcaaacacgattgacttcaacttcctcagcagctgtaacaaatggccaactagataaattaaccaacaaggaaccccgatcgagtgttcaactgggccatgacgacagagctgctttacaggacgaattgtcaacattacgtggcaaagttgcatttttggaggaagacctttctaaatcgcatcaagaagcaacaaattaccatgaacttagtgataggttagcaaaggaattgaaggatctcaaagatcatgaccaacaaatgagattaaagcaaatgaaaatcctgtccgatctgctgatagctgtgtcaaaagcagagaggcaagaagcgagaatgagaataaggcaggaatctttcagacttggaaatgttgctgttatgagagctgggactatcatatctgaaacttgggaagacggtcaggcaataaaagatcttaatgctcacctgaaatctttgctggaaactaaggagactattgaaaggcatcgtaaatcacttaagaaaagacaatctgacaagggtgatggcagtgatgctgagactggcatgtctgaggaggacatcctcttacaagatgaaatatgtaaatctcggttaatgagtataaaacgggaggaagaacagtatatgagagagagagatcggtatgagttggaaaaggggaggcttatacgagagatgaagcgtctcagagatgaagatggctcacgctttaacaacttccaaattcttcaccatcgttatgctctcttaaatcttcttggaaagggagggtttagtgaggtttacagggcttttgatttggtggagtacaaatatgtggcatgcaagcttcatggattgaatgctcaatggagtgaggagaaaaaacagagctacatacggcatgcgattcgtgaatataacattcacaaaactttggttcatccaaacattgtcaggctatgggatatatttgagattgatcacaatacattctgcactgtcctagaatattgcagtggcaaggatcttgatgcagtccttaaagctacaccaattcttccagaaaaagaaggaaggatcataattgttcaaatatttcagggcctggtttatctaaacaagaggggccaaaagatcattcactatgatctaaagccgggcaatgttctctttgatgaggttggtgttgcaaaagttaccgactttggcctcagcaagatagtggagaatgatgttgggtctcaggggatggagctcacttctcagggagctggaacctattggtatcttcctccagaatgctttgacctgagcaaaacaccatttatttcatctaaggtggatgtttggtcagctggtgtaatgttttaccagatgctcttcggaaagcgtccttttggtcatgaccagacccaggagagaatacttcgggaagatacgattatcaatgcacggagagtggagttcccttcaaagccagctgtatcaaatgaggcaaaggatctgatacgccggtgcttgacatacaaccaatcagagagaccagatgtactaaccatagctcaagatccttatctctcatacgcaaagagatagccgctatgccggagaacactaaggcaagggtagctgatcatttatgagattatttatgtatggggatggataatcttgcgaaggagcaaagtgttccacaagctcaagaagaccacaaagggtgtaactgtatatgttgtaaattttagtctttcccatcgcagcaatgacctgaaatccagaagccatcagttcaacggacagcttctttgtagcgtagagaaagcaggcattggtttgaacggggcatgcgtaacgtgatggtttcttggctggtgggctgtgggcagtggtcctgttgatggttggtttttgtttgctcatactgtcggtaaggtctgccaaatcagaaaccaccggtgacaggcgagagctcacatgctcacctccgaaaaaaatctcggccttgcactggcaggatggactggattttgcgtattgccaaaacagatttaaggtagcatgcatcaatacaggttactttggataacctatagactcaccacagccacaagcacagaagctcttcgtacaatttcagagagtaccgatgtgccagatttctgctggtgccaatttgtttgtgatcgctgtcacccttgtacaacactgggatcgctcattgagcatacacaagttatgcaatttgcttttttattatagtcatctttagggcgtcgttttgttcggaacggattctttggaactttaatgttagttttatttgtgttaaaactgaacgtggaatagttccaggttatataatcccagctaacctaacttgcacttaggagatgtttggtttgagaaatcactctatctaaaataagttagtgtatcatgagttcattttctaaatttggtgggatgatctcattccatatactaagtaactaggaagaatgaggtgatgatatattaactcattttattttacaaaccaaaaaaaaatgaggagtaagaag

SEQ ID NO: 11175 - DNA, 1954 bp, Zea Mays
ttcccttgctgggaggccttagtctcccttctctttctctcccagccgccagccgccgccgcactctcccagccgccagccgccgccgcggccgccgcaaaaaaccctaacccccaatccaccaatggcgtcgagcagccccgaccttgccgacgacggcttcgcggcgccgcgcctcttctcgcagggtgtctcctacacatacgacgacgtcatctttctcccgggctacatcggcttccccgccgacgccgtcgacctctccacccgcctctcccgccgcgtcccgctatccatcccctgcgtcgcgtccccgatggacactgtctccgaggccgctatggccgcggccatggcatcactcggcgccgccgccgtcgtgcactgcaacaccgagccccactcccaggccgccatcgtacgcgctgccaagtcccgccgcctccccttcgtttcctccgtgcccttcttctccccgtcctcctccccgacgctcaacgatttcgctggcagcgagtacgccctcgtcaccgagcgcggagattcgctctccaggctcgtcggcatcgctgtcgcggccgatgctgcctcccgcgaggttcccatctctgtctcggagtacatgcgaccgacgccgcgctcagcctcctctgccttcgacttcgaggaagcagcaaccttccttgccgatgagggtctggattacgctcctctcgtatccgatgatggtgaggttgtcgatctcatcaccgccaaggacgtggagcgcatccggagttatcccaagctgggcaagccgtctctcggagccaacgggaagtttgtagttgcggcttccattgggactcgtgaggatgacaagggaagactggagcaactagttaaggccggggcaaatgctatcgtgattgatagttcacaggggaactccatataccagctcgatatgataaagtttgcgaagaagatgtatccggaggtggatttgatcggtggtaatgtggtgacaattgcacaggcccagaatttgattcaagctggtgtggatggattgcgtgttggaatgggatcgggctcaatttgtaccacccaagaggtttgtgctgttggaagaggacaggcaacagcagtatataaggtttcatcttatgccaaggatcacaatgtaccggttattgctgatggtggaatttcaaactctgggcatattgtgaaagctctgtcgctgggggcatccactgttatgatgggcagctttttagctggtagtcatgaagctcctggtacttatgagtataaggacggccgccgagtcaaaaaatacagaggcatgggctctcttgaagccatgacaaaagggagtgatgcaagcagttaagcaaggattacaagatcttggcgcagattctgtccagtcagctcatgatcttttgcgatcagagacactcagattagaggtgagaactggtgctgcccaggctgaaggaggtatccatggactggtttcatacgtgaagaaggcattctagttccataatcaaacaaagaagtattggaacgatagtggttagctgcatgatatggaggggggggggggggtgcgatgctcatttatcctacctggcaaaagctcagcagcttgtcagcaaagattgtcgagttgggcagcaagtgtaccatctacttggcgtcataataatattaataaacctctggcatcgtaactgttgtataagctcacagcttgtcatctaaacttttttgcccaattttgttaaaagagtaaaacctcaatgttgtaccttgtattattatgtgttcgaagaatggttgataatagtggtttgtctctaaagttgacatcctggctagtgtgttactgacaattgaaaggctttcgtaaagtgggttgcttgaacaaatttgttgagccaatttttctaagttgcagctg

SEQ ID NO: 11176 - DNA, 1179 bp, Zea Mays
gacacacttcaaaagtttgtagatcggcagtctgagttagtccgagtttaaggatagaaaatgtattttgtcctctttgggttagaaccagcaagaggagtcgtgaatccgtgacaaccggcggcggcgagggaagaatcgaagatcgccgcagccgcaaggaaggaaaccgagaacaactcaatccgctggctatggcgttgctgatggagcccggcgctgagcccctgactgagagcgagcaggccgacctggccggcatcgccgccatcaaggagtcggcggcgcgcgaatacaaggagcaggggaaccagttcgtccggatgggccggaggcactacgccgcggcggtctcctgctacacgaaggccatcgctcagatggagcccctctcctccctcgacgcatcagccgctgctgacgcctccgttctcttcgccaaccgagcacatgtcaacatcctcctcggtaaccaccgacgggccctcgacgacgccgagcaggccatccgcctctctccctccagcgtcaaggcgtactaccgagcagtgaaggcggcgcttgcgctggacttgttaacggacgcggcgtccttctgcaggaaggggctcgaacaggacccccctaacgaggaattcaagaaactgttgtcggaagtggattcaaaactgagagagcaagatcgtcagagagcgaaggttgcacaagcaatcgccaaagccaaggatcttgctgctgctatgggaaagagaggggtgaaacttgggaaggcagcctatcaagagctgacaggggtaaagaagccagtgctggatgagcagggcgtgctccactggcctgttcttctgctctacccagaggtcatgtcgagtgacttcattgaggattttccagatacagatactttctcgccccaccttgatgtcatatcctcctgaattacatgatgcttccttttggttgagttaaaatgtgtagatgtataagtagctttactgaatttattgcaatggtatccttaactatcaaacatgttctcagaaacttctccaccattgccatgggatgataaccatgtttacacaagggactcaatcgaattatattatcagggtggttttggcaaacctttgtcccgaacaacccacagccagtaatccagtaccatcaataccacaa

SEQ ID NO: 11177 - DNA, 1115 bp, Zea Mays
gtggcgtgcgaaccaaaaccaggtgtcaccttgggtgcgtgcatggaagacaagagggcaaacacaagctgagatacggcggaaggcaacaagaacggccgccttcgcctccgttcatctctatcccagatactactagcgagcacgccatggagcaaaccgaggcggcggtgagcggcgcgcttggagcgggagtggaaggtggcgacaagacggcgaggaaggcgctgaaggtggtggcggccgtggacgcgagcgaggagagcctgcacgcgctgtcgtgggcgctggacaacgtcgtgcggtgccacccggacgcgacgctcgtcgtcgttcacgcccagcacgccgccgaccacttcgcctaccccgtcgccgcgcacggcatcgtgtacgccccgtcctcggcggtggagtccgtgcgggcggcgcaggaggagagctcccgcagggtcgtggcgcgcgcgctggacatctgcaaggagaggcaggtggacgccacgggggccgtcgtggagggcgacgccaaggaggccatccgccaggccgtggagcgtatgcaggccgggcttctcgtcctcggcagccggggcctcggcgcgatcaaaagggcgttcctgggcagcgtgagcgactacctcatccatcacgcctgctgcccggtgctggtcgtcaggcccaggccgaccaagtgaactcgcctatcgttctcgagcagtactccagtcatgtacgcagtgccctgtgccgctgcgcggtcagtaataccagtatatgtatgctcatagaaaaaaaatgtagaaaactgaataaagaacctatgcatggttgtatctgcacaaattatcaacgcgcctccttgcctgcacttccgaactttgccgttatcaccaaagaattaagacaggactgcaatacgatcatttttgttggcacgttgtatgaacttggattagtgttaaaagctcttgtgttgtttcacaaaattctagctccgatgcagctagccttccgtagtagtgtcgtttagatgccttacacaaatgtccaatgtgactgagcgcccgccgcctacagcatgattgttgtcacctttattgtaacttttatgtttg

SEQ ID NO: 11178 - DNA, 2491 bp, Zea Mays
gacacacttcaaaagtttgtagatcggcagtctgagttagtccgagtttaaggatagaaaatgtattttgtcctctttgggttagaaccagcaagaggagtcgtgaatccgtgacaaccggcggcggcgagggaagaatcgaagatcgccgcagccgcaaggaaggaaaccgagaacaactcaatccgctggctatggcgttgctgatggagcccggcgctgagcccctgactgagagcgagcaggccgacctggccggcatcgccgccatcaaggagtcggcggcgcgcgaatacaaggagcaggggaaccagttcgtccggatgggccggaggcactacgccgcggcggtctcctgctacacgaaggccatcgctcagatggagcccctctcctccctcgacgcatcagccgctgctgacgcctccgttctcttcgccaaccgagcacatgtcaacatcctcctcggtaaccaccgacgggccctcgacgacgccgagcaggccatccgcctctctccctccagcgtcaaggaaggggctcgaacaggacccccctaacgaggaattcaagaaactgttgtcggaagtggattcaaaactgagagagcaagatcgtcagagagcgaaggttgcacaagcaatcgccaaagccaaggatcttgctgctgctatgggaaagagaggggtgaaacttgggaaggcagcctatcaagagctgacaggggtaaagaagccagtgctggatgagcagggcgtgctccactggcctgttcttctgctctacccagaggtcatgtcgagtgacttcattgaggattttccagatacagatactttctcgccccaccttgatgtcatatcctcctgaattacatgatgcttccttttggttgagttaaaatgtgtagatgtataagtagctttactgaatttattgcaatggtatccttaactatcaaacatgttctcagaaacttctccaccattgccatgggatgataaccatgtttacacaagggactcaatcgaattatattatcaggtttgtttggatgaatttaattttgctcgagtaaacccctactttctgctaagcattatgattacagttttttttttcagaaagcaaagcattatgtgatgtagcctcttcattgaacattataaaaaaaatcttcattttgtgtacgcgcaattgttgatcttttgttctttttgatgttggaaaatcccattttgattaggtgaaccatatgtaactctggcagggcagtcatcagataacaacaacattattgtactgaactcgcaacacctgcacatttaagctgtcctgtaattaagaaacaggcaaatgacatagattaagggctgacataatttaactccatgattattatgatataattgaagtattagtatatactcaaactattatcattagttgtatttcattgctggcctattggtgacgccctgaaaaatgaaaaccatgacatcacattttcctttattgctttgaatttaaagcatctgatgagaaatgaagagacattggcaacttgagatttcaaacctatcacagagattgctgttataaccgtctagtccaatttgtctaattcagtaccttatgagtttaacctcactcattactgtaaggttcggtttgccatcctactgtggatgttattataggttgatttcagtttcaagaaatagaaggtcaatttttactctttttctggctatattcacctttatttatgcattagggtggttttggcaaacctttgtcccgaagtgaggtattaagatatcttctagaaggcaatgtagattcgaaggcgcttccagatagccttcttgacggggaagacgaagaacatgacagtaccaaatgtaccactgttacatcaactgatagctccagtaagtggatcaaggtaaaagaaggaaaaacacttcaggaggtgctgcaggataaaggctatattgttcctgcaattcctgtgttcttcgttgtttcaaggaagtccacattctataaagacttcaaggctggaaactggtctttgccatgaaacagaaccggacactaaggttcagcttaaatcgatctctgagacgggcagcggatatggcaagaaagcagaagatgccctcttgtgatcatggtcatttggtttaaaaggagtgtgcttttttcagtgtctgcagactgacagccttttgttaccgagatagacagaaaagacgaggcaatgtaatatgaatttttatgtgaaccgattcagcgtttagcatggtcgtagtatgttaagtctcggttgaaacgttggtgtttctaacggatggtcttgacagtagtgtctgagcagtgcgacttgggtgactcttctccgatcgagcaacaaacttggaatatatgcttgccgctgggagccggtggcctgtacacgcgctatgtacgaggcaagagtttccgc

SEQ ID NO: 11179 - DNA, 1657 bp, Zea Mays
gacacacttcaaaagtttgtagatcggcagtctgagttagtccgagtttaaggatagaaaatgtattttgtcctctttgggttagaaccagcaagaggagtcgtgaatccgtgacaaccggcggcggcgagggaagaatcgaagatcgccgcagccgcaaggaaggaaaccgagaacaactcaatccgctggctatggcgttgctgatggagcccggcgctgagcccctgactgagagcgagcaggccgacctggccggcatcgccgccatcaaggagtcggcggcgcgcgaatacaaggagcaggggaaccagttcgtccggatgggccggaggcactacgccgcggcggtctcctgctacacgaaggccatcgctcagatggagcccctctcctccctcgacgcatcagccgctgctgacgcctccgttctcttcgccaaccgagcacatgtcaacatcctcctcggtaaccaccgacgggccctcgacgacgccgagcaggccatccgcctctctccctccagcgtcaaggcgtactaccgagcagtgaaggcggcgcttgcgctggacttgttaacggacgcggcgtccttctgcaggaaggggctcgaacaggacccccctaacgaggaattcaagaaactgttgtcggaagtggattcaaaactgagagagcaagatcgtcagagagcgaaggttgcacaagcaatcgccaaagccaaggatcttgctgctgctatgggaaagagaggggtgaaacttgggaaggcagcctatcaagagctgacaggggtaaagaagccagtgctggatgagcagggcgtgctccactggcctgttcttctgctctacccagaggtcatgtcgagtgacttcattgaggattttccagatacagatactttctcgccccaccttgatgtcatgttctcagaaacttctccaccattgccatgggatgataaccatgtttacacaagggactcaatcgaattatattatcagattcgaaggcgcttccagatagccttcttgacggggaagacgaagaacatgacagtaccaaatgtaccactgttacatcaactgatagctccagtaagtggatcaaggtaaaagaaggaaaaacacttcaggaggtgctgcaggataaaggctatattgttcctgcaattcctgtgttcttcgttgtttcaaggaagtccacattctataaagacttcaaggctggaaactggtctttgccatgaaacagaaccggacactaaggttcagcttaaatcgatctctgagacgggcagcggatatggcaagaaagcagaagatgccctcttgtgatcatggtcatttggtttaaaaggagtgtgcttttttcagtgtctgcagactgacagccttttgttaccgagatagacagaaaagacgaggcaatgtaatatgaatttttatgtgaaccgattcagcgtttagcatggtcgtagtatgttaagtctcggttgaaacgttggtgtttctaacggatggtcttgacagtagtgtctgagcagtgcgacttgggtgactcttctccgatcgagcaacaaacttggaatatatgcttgccgctgggagccggtggcctgtacacgcgctatgtacgaggcaagagtttccgc

SEQ ID NO: 11180 - DNA, 1653 bp, Zea Mays
gacacacttcaaaagtttgtagatcggcagtctgagttagtccgagtttaaggatagaaaatgtattttgtcctctttgggttagaaccagcaagaggagtcgtgaatccgtgacaaccggcggcggcgagggaagaatcgaagatcgccgcagccgcaaggaaggaaaccgagaacaactcaatccgctggctatggcgttgctgatggagcccggcgctgagcccctgactgagagcgagcaggccgacctggccggcatcgccgccatcaaggagtcggcggcgcgcgaatacaaggagcaggggaaccagttcgtccggatgggccggaggcactacgccgcggcggtctcctgctacacgaaggccatcgctcagatggagcccctctcctccctcgacgcatcagccgctgctgacgcctccgttctcttcgccaaccgagcacatgtcaacatcctcctcggtaaccaccgacgggccctcgacgacgccgagcaggccatccgcctctctccctccagcgtcaaggaaggggctcgaacaggacccccctaacgaggaattcaagaaactgttgtcggaagtggattcaaaactgagagagcaagatcgtcagagagcgaaggttgcacaagcaatcgccaaagccaaggatcttgctgctgctatgggaaagagaggggtgaaacttgggaaggcagcctatcaagagctgacaggggtaaagaagccagtgctggatgagcagggcgtgctccactggcctgttcttctgctctacccagaggtcatgtcgagtgacttcattgaggattttccagatacagatactttctcgccccaccttgatgtcatgttctcagaaacttctccaccattgccatgggatgataaccatgtttacacaagggactcaatcgaattatattatcagggtggttttggcaaacctttgtcccgaagtgaggtattaagatatcttctagaaggcaatgtagattcgaaggcgcttccagatagccttcttgacggggaagacgaagaacatgacagtaccaaatgtaccactgttacatcaactgatagctccagtaagtggatcaaggtaaaagaaggaaaaacacttcaggaggtgctgcaggataaaggctatattgttcctgcaattcctgtgttcttcgttgtttcaaggaagtccacattctataaagacttcaaggctggaaactggtctttgccatgaaacagaaccggacactaaggttcagcttaaatcgatctctgagacgggcagcggatatggcaagaaagcagaagatgccctcttgtgatcatggtcatttggtttaaaaggagtgtgcttttttcagtgtctgcagactgacagccttttgttaccgagatagacagaaaagacgaggcaatgtaatatgaatttttatgtgaaccgattcagcgtttagcatggtcgtagtatgttaagtctcggttgaaacgttggtgtttctaacggatggtcttgacagtagtgtctgagcagtgcgacttgggtgactcttctccgatcgagcaacaaacttggaatatatgcttgccgctgggagccggtggcctgtacacgcgctatgtacgaggcaagagtttccgc

SEQ ID NO: 11181 - DNA, 1801 bp, Zea Mays
gtgttatctctgtccaaacttttaaagcgtgtcggtccgttttaatcctggttcgtgtcaatcatgatatgtttagacctgacacacttcaaaagtttgtagatcggcagtctgagttagtccgagtttaaggatagaaaatgtattttgtcctctttgggttagaaccagcaagaggagtcgtgaatccgtgacaaccggcggcggcgagggaagaatcgaagatcgccgcagccgcaaggaaggaaaccgagaacaactcaatccgctggctatggcgttgctgatggagcccggcgctgagcccctgactgagagcgagcaggccgacctggccggcatcgccgccatcaaggagtcggcggcgcgcgaatacaaggagcaggggaaccagttcgtccggatgggccggaggcactacgccgcggcggtctcctgctacacgaaggccatcgctcagatggagcccctctcctccctcgacgcatcagccgctgctgacgcctccgttctcttcgccaaccgagcacatgtcaacatcctcctcggtaaccaccgacgggccctcgacgacgccgagcaggccatccgcctctctccctccagcgtcaaggcgtactaccgagcagtgaaggcggcgcttgcgctggacttgttaacggacgcggcgtccttctgcaggaaggggctcgaacaggacccccctaacgaggaattcaagaaactgttgtcggaagtggattcaaaactgagagagcaagatcgtcagagagcgaaggttgcacaagcaatcgccaaagccaaggatcttgctgctgctatgggaaagagaggggtgaaacttgggaaggcagcctatcaagagctgacaggggtaaagaagccagtgctggatgagcagggcgtgctccactggcctgttcttctgctctacccagaggtcatgtcgagtgacttcattgaggattttccagatacagatactttctcgccccaccttgatgtcatgttctcagaaacttctccaccattgccatgggatgataaccatgtttacacaagggactcaatcgaattatattatcagggtggttttggcaaacctttgtcccgaagtgaggtattaagatatcttctagaaggcaatgtagattcgaaggcgcttccagatagccttcttgacggggaagacgaagaacatgacagtaccaaatgtaccactgttacatcaactgatagctccagtaagtggatcaaggtaaaagaaggaaaaacacttcaggaggtgctgcaggataaaggctatattgttcctgcaattcctgtgttcttcgttgtttcaaggaagtccacattctataaagacttcaaggctggaaactggtctttgccatgaaacagaaccggacactaaggttcagcttaaatcgatctctgagacgggcagcggatatggcaagaaagcagaagatgccctcttgtgatcatggtcatttggtttaaaaggagtgtgcttttttcagtgtctgcagactgacagccttttgttaccgagatagacagaaaagacgaggcaatgtaatatgaatttttatgtgaaccgattcagcgtttagcatggtcgtagtatgttaagtctcggttgaaacgttggtgtttctaacggatggtcttgacagtagtgtctgagcagtgcgacttgggtgactcttctccgatcgagcaacaaacttggaatatatgcttgccgctgggagccggtggcctgtacacgcgctatgtacgaggcaagagtttccgc

SEQ ID NO: 11182 - DNA, 1024 bp, Zea Mays
ctcacttgaaacttgattcctactgaccacggggaatttcatgcagttagttttctcgggggatccctctgggagacttctgaaatataacccacagacaaaggaaacgacagtactgcatcgcaacctccaatttcccaacggtgtgtccatgagcaaggatggctcattctttgttttctgcgaaggatcgcgtggcaggttgagcagatactggttgaaaggcgagaaggcaggcactgtggatcttttcgctatcttgcctggcttcccagacaatgtgagaacgaatgagaagggcgagttctgggtggcaatccactgccgccgaagtctgtacgcccggcttatgagccgccatgtcaagctgaggaagtttttgctcagcctcccgatccccgccaagtaccactacctgatgcagatcggtggcaggctccacgcggtcatcatcaagtacagcccagagggccaggtgcttgacatcttggaggacaccaagggcgaggtggtgagagccgtcagcgaagtggaggagaaagacgggaagctctggatagggtctgtcctgatgccgttcatcgctgtctttgacctcgcgaaggcgtcttagccgcctcaagtttgattggaaacattgttgctttaagacatggagtccatggttaccgctgcacgcttctctgagaggatcagtgatcccaataatttggttctggtgcaacctggagctgtatataatgctccagcttcttttagtagcaaatgtaagttgctgacatgttctttagattgtcactagaactagaactatgaacgaacagctcgtgcttccgagtccagatttaccagatgtgcttcttgagtttgatccgtttttatttttatttgggcaacaaatgaaagttttcaatttttatttcgccaacaaaagaaggtttcgatttttatttggccaacaaacgaagtttttacagagcgagagtgtaggccacgttctaagggttagctgaaaatagttcga

SEQ ID NO: 11183 - DNA, 2353 bp, Zea Mays
cacatctgacctccgcctgctcgccctctctctctcgatggtcgtcttctccacgagaccacgaccgatcaaccccaatcgtagggaactgggaacccggacccagatctcccctagatcctcaatcccaatctgccctccgccgtatcgatcatacctcccgatgcgaccccaagtctggtcgatgcgagtagcggcggcgatttagcgaactgcgcgttcgctagggttagggtttcgagggtttgcgctagggtttgggcgcacgatggggcggtcgcgaggggtgcagaattccggcgacgacgacaccgtacacaggtcgaagcggaggagggtcgcatcgggcggggatgcgacggactccgtttccgctggcatcgggggagctggagaaggagggggcaagaaagcgctctaccactgcaattactgcaacaaggacatctctgggaagatacggatcaaatgctccaagtgccctgacttcgacctttgcgtggagtgcttctctgttggcgctgaagtcaccccacatcgcagcaaccatccttacaaagtcatggacaacctgtctttcccacttatttgcccagattggaatgcagacgaagaaattctcctccttgagagcatgttggtaccaagtctaagttacagtgtattgatcattacacaacagcatacatgaactcaccttgttatcccctaccggatatgtctcatgttaatggcaagaacaggaaggagcttctagctatggctaaagtgcagggtgaaagtaaaaaagggacttcactgttgcctggagagctgactcctaaggctgaatctccattttctccctccagggtcaaggtggaagatgcacttggagaaggtctagcaggtcgatcaccttcgcacatagctgttggtgcaaataaaaaagcttcaaatgtgggacatattaaagatgggtctaatgtatcaaaagttgaagatggtcatgtcgatagaagtgttggtgtgaagaagcccagatattctgcagatgaaggcccttcgttgactgaactgagtggatacaatgcaaagagacacgagtttgacccagagtatgataatgatgccgaacaagcgcttgctgagatggaatttaaagaaactgattcagaaactgatcgtgaactgaaactccgtgtgctgcgtatttatctgtccaggcttgatgaaagaaaaaggagaaaagagttcatattggaaaggaatttattgtttcctaatcccttggagaaggatcttacaaatgaagacagggaagtttaccatcggtataaggtcttcatgcgttttctttccaaggaggaacatgaagcccttgttaggagtgtcattgaagagcgaaaaattcggaggagaattcaagaactccaggaatgtcgttctgctggatgccgcacacttgctgaagcaaagatacacatagagcaaaagaggaaaaaagaatacgagctgaatgcccaaaaagctaaggaaagtaaccaccttattgcaaatactaaattggtgcagaagatgaatcgacctatgaagattgagtctgatgggaatttggatccaaagaaaggtggtgttggcttagattctcctaaaactacaggacttacaagtgttaagcagtgggatgactgggatatagttggtcttcctggggcggagctattaagtgctagcgaaaagcttctatgttgccagaacagactgctacccagtcattacctgagaatgcaggaggtgctgatgcaggagatattcaagggtagtgtcctaaagaaggaagacgcacacgtcttgtttaaggttgatcctaccaaagtagatagtgtttatgatatggtaacaaaaaagctgggcaaccatgtggagttgcctacggtctagcttatgcctttgggcttgcctgctgtgacatgccgaagaaaacaagtcttggtttcgccccttgcagcgtgtctgaaccatagctgaaggtggaactgtactagatcaaatcggccatagttaactgaaattcgtatcagttgtcagaagcacaataaggcattccagccaagttgtaaaattattgcccttagcagaatgtgtagcgtgagttgtcatttcctttctgccattgttgtgcactgtttcagctgtggtagtgccttgtagtaggtataggtgcctgagtttatatgtatcatcgtgtatgtaccattgggagctcaattatatgccattgtaccaaccccagacattgattattacaattcatctagcagccagattcttgtctctaatggaatgcatggcgtcaatatatttttttttc

SEQ ID NO: 11184 - DNA, 2408 bp, Zea Mays
tccacatctgacctccgcctgctcgccctctctctctcgatggtcgtcttctccacgagaccacgaccgatcaaccccaatcgtagggaactgggaacccggacccagatctcccctagatcctcaatcccaatctgccctccgccgtatcgatcatacctcccgatgcgaccccaagtctggtcgatgcgagtagcggcggcgatttagcgaactgcgcgttcgctagggttagggtttcgagggtttgcgctagggtttgggcgcacgatggggcggtcgcgaggggtgcagaattccggcgacgacgacaccgtacacaggtcgaagcggaggagggtcgcatcgggcggggatgcgacggactccgtttccgctggcatcgggggagctggagaaggagggggcaagaaagcgctctaccactgcaattactgcaacaaggacatctctgggaagatacggatcaaatgctccaagtgccctgacttcgacctttgcgtggagtgcttctctgttggcgctgaagtcaccccacatcgcagcaaccatccttacaaagtcatggacaacctgtctttcccacttatttgcccagattggaatgcagacgaagaaattctcctccttgagggaattgaaatgtatggtctgggaaactggcttgaagttgcagagcatgttggtaccaagtctaagttacagtgtattgatcattacacaacagcatacatgaactcaccttgttatcccctaccggatatgtctcatgttaatggcaagaacaggaaggagcttctagctatggctaaagtgcagggtgaaagtaaaaaagggacttcactgttgcctggagagctgactcctaaggctgaatctccattttctccctccagggtcaaggtggaagatgcacttggagaaggtctagcaggtcgatcaccttcgcacatagctgttggtatgtattggtgcaaataaaaaagcttcaaatgtgggacatattaaagatgggtctaatgtatcaaaagttgaagatggtcatgtcgatagaagtgttggtgtgaagaagcccagatattctgcagatgaaggcccttcgttgactgaactgagtggatacaatgcaaagagacacgagtttgacccagagtatgataatgatgccgaacaagcgcttgctgagatggaatttaaagaaactgattcagaaactgatcgtgaactgaaactccgtgtgctgcgtatttatctgtccaggcttgatgaaagaaaaaggagaaaagagttcatattggaaaggaatttattgtttcctaatcccttggagaaggatcttacaaatgaagacagggaagtttaccatcggtataaggtcttcatgcgttttctttccaaggaggaacatgaagcccttgttaggagtgtcattgaagagcgaaaaattcggaggagaattcaagaactccaggaatgtcgttctgctggatgccgcacacttgctgaagcaaagatacacatagagcaaaagaggaaaaaagaatacgagctgaatgcccaaaaagctaaggaaagtaaccaccttattgcaaatactaaattggtgcagaagatgaatcgacctatgaagattgagtctgatgggaatttggatccaaagaaaggtggtgttggcttagattctcctaaaactacaggacttacaagtgttaagcagtgggatgactgggatatagttggtcttcctggggcggagctattaagtgctagcgaaaagcttctatgttgccagaacagactgctacccagtcattacctgagaatgcaggaggtgctgatgcaggagatattcaagggtagtgtcctaaagaaggaagacgcacacgtcttgtttaaggttgatcctaccaaagtagatagtgtttatgatatggtaacaaaaaagctgggcaaccatgtggagttgcctacggtctagcttatgcctttgggcttgcctgctgtgacatgccgaagaaaacaagtcttggtttcgccccttgcagcgtgtctgaaccatagctgaaggtggaactgtactagatcaaatcggccatagttaactgaaattcgtatcagttgtcagaagcacaataaggcattccagccaagttgtaaaattattgcccttagcagaatgtgtagcgtgagttgtcatttcctttctgccattgttgtgcactgtttcagctgtggtagtgccttgtagtaggtataggtgcctgagtttatatgtatcatcgtgtatgtaccattgggagctcaattatatgccattgtaccaaccccagacattgattattacaattcatctagcagccagattcttgtctctaatggaatgcatggcgtcaatatatttttttttc

SEQ ID NO: 11185 - DNA, 2176 bp, Zea Mays
cgattttgtatcaccaactaccaattcacttaatttcactatccaccaaattagtccggctggactagtggacccgagtccacatctgacctccgcctgctcgccctctctctctcgatggtcgtcttctccacgagaccacgaccgatcaaccccaatcgtagggaactgggaacccggacccagatctcccctagatcctcaatcccaatctgccctccgccgtatcgatcatacctcccgatgcgaccccaagtctggtcgatgcgagtagcggcggcgatttagcgaactgcgcgttcgctagggttagggtttcgagggtttgcgctagggtttgggcgcacgatggggcggtcgcgaggggtgcagaattccggcgacgacgacaccgtacacaggtcgaagcggaggagggtcgcatcgggcggggatgcgacggactccgtttccgctggcatcgggggagctggagaaggagggggcaagaaagcgctctaccactgcaattactgcaacaaggacatctctgggaagatacggatcaaatgctccaagtgccctgacttcgacctttgcgtggagtgcttctctgttggcgctgaagtcaccccacatcgcagcaaccatccttacaaagtcatggacaacctgtctttcccacttatttgcccagattggaatgcagacgaagaaattctcctccttgagggaattgaaatgtatggtctgggaaactggcttgaagttgcagagcatgttggtaccaagtctaagttacagtgtattgatcattacacaacagcatacatgaactcaccttgttatcccctaccggatatgtctcatgttaatggcaagaacaggaaggagcttctagctatggctaaagtgcagggtgaaagtaaaaaagggacttcactgttgcctggagagctgactcctaaggctgaatctccattttctccctccagggtcaaggtggaagatgcacttggagaaggtctagcaggtcgatcaccttcgcacatagctgttggtgcaaataaaaaagcttcaaatgtgggacatattaaagatgggtctaatgtatcaaaagttgaagatggtcatgtcgatagaagtgttggtgtgaagaagcccagatattctgcagatgaaggcccttcgttgactgaactgagtggatacaatgcaaagagacacgagtttgacccagagtatgataatgatgccgaacaagcgcttgctgagatggaatttaaagaaactgattcagaaactgatcgtgaactgaaactccgtgtgctgcgtatttatctgtccaggcttgatgaaagaaaaaggagaaaagagttcatattggaaaggaatttattgtttcctaatcccttggagaaggatcttacaaatgaagacagggaagtttaccatcggtataaggtcttcatgcgttttctttccaaggaggaacatgaagcccttgttaggagtgtcattgaagagcgaaaaattcggaggagaattcaagaactccaggaaaagcttctatgttgccagaacagactgctacccagtcattacctgagaatgcaggaggtgctgatgcaggagatattcaagggtagtgtcctaaagaaggaagacgcacacgtcttgtttaaggttgatcctaccaaagtagatagtgtttatgatatggtaacaaaaaagctgggcaaccatgtggagttgcctacggtctagcttatgcctttgggcttgcctgctgtgacatgccgaagaaaacaagtcttggtttcgccccttgcagcgtgtctgaaccatagctgaaggtggaactgtactagatcaaatcggccatagttaactgaaattcgtatcagttgtcagaagcacaataaggcattccagccaagttgtaaaattattgcccttagcagaatgtgtagcgtgagttgtcatttcctttctgccattgttgtgcactgtttcagctgtggtagtgccttgtagtaggtataggtgcctgagtttatatgtatcatcgtgtatgtaccattgggagctcaattatatgccattgtaccaaccccagacattgattattacaattcatctagcagccagattcttgtctctaatggaatgcatggcgtcaatatatttttttttc

SEQ ID NO: 11186 - DNA, 3631 bp, Zea Mays
ggccacgagcaccgctccggggccgggagtgccagccaacggaatataaataggggcgagcaggggttcaagcgctaccatccaggagccgagaatctctaaaaggcgccgctcccgtccacggcgcggcgggcagcagcgaagcgtcggtttcagaggccggcgggccggtcgagtcggtggagggagggtgggtagatagatagctagctactagcgggtagcggagagggtccagtcagtgggcgggaggagcgaggggccgggaccgggacgatggcgtcgcggaagtcgccggtggcggcggaggagcgggcggggacggggacgggggaggggaagggggagcggtgcgcggtggaggaggtggcgctggtggtgccggagacggacgacccgtcgatgcccgtgatgacattccgggcgtgggcgctggggctcggctcctgcgtcgtcctcatcttcctcaacaccttcttcacgtaccgcacccagccgctcaccatctcggggatcctggcgcagatcctcgtgctccccgccggccgcttcctggccgccgtgctgcccgaccgcgaggtcaggatcctcggcggcaggctcggcagcttcaacctcaacccggggcccttcaacgtcaaggagcacgtcatcatcaccatcttcgccaactgcggcgtctcctacggcggcggcgacgcttactccatcggcgccatcaccgtcatgaaggcctactacaagcagacgctcagcttcgcatgcgccctcctcatcgtcctcaccacacagatactggggtacggctgggctgggttgctgaggaggtacctggtcgaccctgccgagatgtggtggccttctaaccttgcccaggtctcactcttcagggcgctgcacgagaaagaagaggagggcggcaagtcccgtggcccgtcgcggatgcgcttcttcctcatcgtcttcttcgcgagcttcgcgtactacgcgctgccggggtacctgctgccgatcctgaccttcttctcgtgggcgtgctgggcgtggccgcacagcatcacggcgcagcaggtcgggtccgggtaccacggcctcggcgtcggcgcattcacgctcgactgggcgggcatctcggcgtaccacggcagcccgctggtggcgccgtgggcgtccatcgccaacacggccgtgggattcgtcatgttcatctacgtcatcgtgccgctctgctactggcagttcaacacgttcgacgcccgcaggttccccatcttctccaaccagctcttcacggcgtcgggccagaagtacgacaccaccaaggtgctcaccaaggacttcgacctcaacgtcgccgcctacgacagctacgggaagctctacctcagcccgctcttcgccatctccatcggctccggcttcctgcggttcacggccaccattgtccacgtcctgctcttccatggcagcgacatgtggaagcagagcaagtcggccatgaacgcggtgaagctggacgtgcacgccaagctgatgcagaggtacaggcaggtgccgcagtggtggttcctcatgctgctgctgggcagcgtggtggtgtccctgctcatgtccttcgtctggaaggaggagatgcagctgccgtggtgggggatgctcttcgccttcgcgctcgccttcgtcgtcaccctccccatcggcgtcatccaggccaccactaaccagcaaccggggtacgacatcatcgcgcagttcatgatcggctacgcgctgcccggcaagcccatcgccaacctgctcttcaagatctacggccggatcagcaccgtgcacgcgctatcgttcctcgcagacctcaagctcggccactacatgaagatccccccacggtgcatgtacacggcccagctggtcgggacggtggtcgccggcgtggtgaacctggcggtggcgtggtggatgctggacaacatcgagaacatctgcgacgtggaggcgctgcacccggacagcccgtggacgtgccccaagtaccgcgtcacgttcgacgcgtcggtgatctggggcctgatcggcccggggcggctcttcggccagcacgggctgtaccgcaacctggtgtggctgttcctggtcggcgcggtgctccccgtgccggtgtggctgctgagcagggcgttcccggagaagaagtggatcgcactcatcaacgtgcccgtcatctcgtacgggttcgccgggatgccgccggccacgcccaccaacatcgccacctggctggtgacgggcaccatcttcaactacttcgtcttcaggtaccgcaaggggtggtggcagaagtacaactacgtgctatcggcggcgctcgacgccggcaccgccttcatgggtgtgctcatcttcttcgccctccagaacgcgcaccacgagctcaagtggtggggcacggaggtggatcactgcccactcgcctcctgccccaccgcgccgggcatcgccgtcaagggctgcccggtgttctgaatcttccgacgtgagcgtagtaagcagtgtgtgtaacagtgtaaggaaatgtttgctacgggagccatggattcaaccaagcatcgattaaccgatgcagtgctttgtcactcgtgaatgtaacgccatagcgccagtggtggattcagatttcagagggagaaaaaaacacaggcccagtgtctttggaacgcccgaatttggagtcatctggaaccgacggctcaggtttactgcaaccaacaacttagcacttgcgatctagcgtgtgtaataaaagtctgcacaattcgaagctcggcgtgtcaagaacaagaagcatatgtgcggagaataccggagcggcgaaaactgcatggtttttatttagaacaagaagcatatgacgatacagtttttactccatgtcatagcttcaagaatccacaaaacacaaaggaatatacagactgatatttgataaaagcgagagtatgatcaagcgatctcatgtggtgaaagttggctaataaaagttgctctacgaatacctggttctggagtgccgtcgtccatcctcctcatcctcacagattgtacacttatcacctgaaagcagaaagtccttggctacttgcatgtcttctttgaactctggacgccgggcctctggatgctcaaagtggcagctcgaagatttcctcttcccttgctgcgatgtgtttcctgcagatccatgcaatgtggccgtcatctctgtatcgaacacgccacaggccaaatctctgtgctatgtccatccccgtcagaaccccttgccctttcaagaaatccacaagccattgcctggctgctgtcatatcctctcccatgtcgctcgtgctaccattccttgacttgccatacagtgctgccgcgcccagagcccccacggacatggcagatgcagttgtgccgtacaaggccgaggagtccagcaggcgcaccacctccctgctcaggtcaggtatcatctctcccatcccaacgatgaaatgcgcgccgatcttcagagcaaaggtcacagccgagctgatcttccactacatgcatctctctacggaattcacatagcatatgcacccgtaag

SEQ ID NO: 11187 - DNA, 4011 bp, Zea Mays
attttcgccgctccaattcgctcatccgtccgcgcgcccctcgccgaccggccggcgcggcgccggccgacgtcctctctccggggtagtcagtcgcgcactgcgcatcgctgttgttccttccggttcctttcgcgtccccccttcggagcagggcaacgtccaagagatattatcgctgccgctgccccgcgcgggccgctcgctgtcccactcgtgcgccacgcctcggactcggaggtgtattccctcttctccccccgtgcttatccgcgacggaatccaatcccttcgctcaagtccttctcctaagcaaagccccctcgcttttggcgtatgcccccgctggcgcgcccatgattcccgccgattcctccgcccgttcagtccagcaacccttgctgctgcagtgctgcggctagttcggtggcggggaaggaggaggaggcgagatcttggagtggggcgaagcggagatgtcgttgccgtcgaacaaccggaggacgtgctcccggagcagctctgcgcggtccaagcacagcgcgcgggtggtggcacagacgcccgtggacgcgcagctgcacgccgagttcgagggctcccagcgccacttcgactactcctcgtcggtgggcgccgccaaccgcccgtcggcaagcaccagcaccgtctccacctacctccagaacatgcagcggggccgctacatccagcccttcggctgcctgctcgccgtccacccggacaccttcgcgctgctcgcctacagcgagaacgcgcccgagatgctcgacctcacgccacacgccgtccccaccatcgaccagcgggatgcgctcggcatcggcgtcgatgtgcgcacgctcttccgctcgcagagctccgtcgcgcttcacaaggccgccgccttcggggaggtcaacctactcaaccccatcctcgtgcacgccaggacgtcggggaagcccttctacgccatattgcaccggatcgacgtcggccttgtcatcgaccttgagccggtcaatccagccgacgtgccagtcaccgccgcgggcgcgctcaagtcgtacaagctcgctgccaaggccatctccaggctgcagtcgctgcccagcgggaacctgtcgttgctgtgcgatgtgcttgtccgtgaggtgagcgaactcacgggctatgaccgggtcatggcctacaagttctatgaggatgagcatggcgaggtcatttccgaatgcaggaggtccgatctggagccgtatcttggactgcactacccagccaccgacatcccgcaggcgtccaggttcctgtttatgaagaacaaagtgcggatgatatgtgattgctgtgccactccagtgaaggtcattcaggatgatagcctagcacaacctctcagcctctgtggttccacactcagggcttcccatggttgccatgcacagtacatggcaaacatgggttctgttgcatcacttgcgatgtcagtcactataaacgaggatgaggaggaagatggggataccgggagtgaccaacaaccgaaaggcaggaagctgtgggggcttgtcgtctgccatcatacaagcccgaggttcgtccctttcccactaaggtatgcttgtgagtttctcttgcaagtatttggcatacagctcaacaaggaggtggaattggctgctcaggcaaaggagaggcacatcctcagaacgcaaacccttctttgtgatatgctcctgcgggatgctcctgttgggatatttactcggtcacctaatgtgatggatctagtaaagtgcgatggagctgcattgtattaccagaaccagcttttggtgcttggatcaacaccctctgagtcagagataaagagcattgcaacatggctgcaggataatcatgatggttcaactgggctgagtactgacagcttagtggaagcgggttatcctggtgctgttgcacttcgtgaagttgtgtgtggcatggcggccataaagatctcttccaaagattttatcttctggttccgatcgcacacaacaaaggagatcaagtggggtggggctaagcatgaaccggttgatgcagatgacgatggcaggaggatgcatccacgatcttcattcaaggccttcttggaggtggttaaatggagaagtgttccctgggaagatgttgaaatggatgctatccattctttgcagttaatattacgtggctccctgccagatgaagatgccaacagaaacaatgtaaggtccattgtaaaagctccatctgatgatatgaagaagatacaggggctacttgaactgagaacagttacaaatgagatggtccgcttaattgagacagcaactgcccctgtcttggctgtcgacattgccggtaacataaatggatggaacaataaagctgcagaactaacaggtttacctgtaatggaagccatagggaggcccctgatagatcttgttgttactgattctatagaagtggttaagcagattttggactcagctttacaaggaattgaagagcaaaatatggaaatcaagcttaaaacattccatgaacatgaatgcaatggtccagtaatcttgaaggttaactcctgctgtagtcgggacctttcagagaaagtcattggagtttgctttgtagcacaagatttgaccaggcagaagatgattatggataagtatactaggatacaaggagactatgttgccatagtaaagaaccccactgagctcatccctcccatatttatgatcaatgatcttggttcctgcttagagtggaataaagctatgcagaagattaccggtataaagagggaagatgcgataaacaaattgttaattggggaggtcttcacgcttcatgattatggctatgggaagtatattgaatccttgctgacagtgaacaagaggacagatgctgaggaggaacagcggcaacttctttcatctaatgttctctgtcaggaccagctgaaaaagattttacatgacactgatcttgaaagcattgaacagtgctatatggagatgaacacagtagagttcaaccttgagcaagctctgaatacggttctgatgcaaggcattcctttgggcaaggaaaaacagatttcaattgaacgtaattggcctgtggaagtatcatgcatgtacctttatggggacaatttaaggcttcagcagatcctagcagactatctagcatgcgcccttcaattcacacaaactgctgaaggacctatcgtgctccaggtcatgtctaagaaggaaaacattggatctggcatgcagattgctcatttggagttcaggattgtccatccagctccaggcgttccagaggccctgatacaggagatgttccagcacaacccaggggtgtccagggagggcctcggcctgtacataagccagaagctggtgaaaacgatgagcggcacggtacagtaccttcgagaagccgacacctcgtcgttcatcatcctgatggagttcccggtcgcccagctcagcagcaagcggtccaagccttcgacgagtaaattctgaccctcatgctgctggaactgcagcgagtgttctgccgtgtcgaagtctcggttgtagctagccaagtggctgctactgaaacatcggttggtcggttctggtatctagcacggcctgtgtagtgcggatagatttggttgtttggctttggagagataagctagctggctaggtgtaacgtaacgtcgaccgataactgtatgtgaatgatgatgagctgtgaggacgaataaaggcttcacttgtgttctctattgctcttcttagagtatgatggccaacagctgtacaggaaagcatccacctaaatctgggctcgctgaatgacggctaaaagttgtttggtggctttaaactcttttatgctttgtaatcccttacagtcggatgttggtctttaaactgtcagttaaatgctggtacggcg

SEQ ID NO: 11188 - DNA, 4297 bp, Zea Mays
attttcgccgctccaattcgctcatccgtccgcgcgcccctcgccgaccggccggcgcggcgccggccgacgtcctctctccggggtagtcagtcgcgcactgcgcatcgctgttgttccttccggttcctttcgcgtccccccttcggagcagggcaacgtccaagagatattatcgctgccgctgccccgcgcgggccgctcgctgtcccactcgtgcgccacgcctcggactcggaggtgtattccctcttctccccccgtgcttatccgcgacggaatccaatcccttcgctcaagtccttctcctaagcaaagccccctcgcttttggcgtatgcccccgctggcgcgcccatgattcccgccgattcctccgcccgttcagtccagcaacccttgctgctgcagtgctgcggctagttcggtggcggggaaggaggaggaggcgagatcttggagtggggcgaagcggagatgtcgttgccgtcgaacaaccggaggacgtgctcccggagcagctctgcgcggtccaagcacagcgcgcgggtggtggcacagacgcccgtggacgcgcagctgcacgccgagttcgagggctcccagcgccacttcgactactcctcgtcggtgggcgccgccaaccgcccgtcggcaagcaccagcaccgtctccacctacctccagaacatgcagcggggccgctacatccagcccttcggctgcctgctcgccgtccacccggacaccttcgcgctgctcgcctacagcgagaacgcgcccgagatgctcgacctcacgccacacgccgtccccaccatcgaccagcgggatgcgctcggcatcggcgtcgatgtgcgcacgctcttccgctcgcagagctccgtcgcgcttcacaaggccgccgccttcggggaggtcaacctactcaaccccatcctcgtgcacgccaggacgtcggggaagcccttctacgccatattgcaccggatcgacgtcggccttgtcatcgaccttgagccggtcaatccagccgacgtgccagtcaccgccgcgggcgcgctcaagtcgtacaagctcgctgccaaggccatctccaggctgcagtcgctgcccagcgggaacctgtcgttgctgtgcgatgtgcttgtccgtgaggtgagcgaactcacgggctatgaccgggtcatggcctacaagttctatgaggatgagcatggcgaggtcatttccgaatgcaggaggtccgatctggagccgtatcttggactgcactacccagccaccgacatcccgcaggcgtccaggttcctgtttatgaagaacaaagtgcggatgatatgtgattgctgtgccactccagtgaaggtcattcaggatgatagcctagcacaacctctcagcctctgtggttccacactcagggcttcccatggttgccatgcacagtacatggcaaacatgggttctgttgcatcacttgcgatgtcagtcactataaacgaggatgaggaggaagatggggataccgggagtgaccaacaaccgaaaggcaggaagctgtgggggcttgtcgtctgccatcatacaagcccgaggttcgtccctttcccactaaggtatgcttgtgagtttctcttgcaagtatttggcatacagctcaacaaggaggtggaattggctgctcaggcaaaggagaggcacatcctcagaacgcaaacccttctttgtgatatgctcctgcgggatgctcctgttgggatatttactcggtcacctaatgtgatggatctagtaaagtgcgatggagctgcattgtattaccagaaccagcttttggtgcttggatcaacaccctctgagtcagagataaagagcattgcaacatggctgcaggataatcatgatggttcaactgggctgagtactgacagcttagtggaagcgggttatcctggtgctgttgcacttcgtgaagttgtgtgtggcatggcggccataaagatctcttccaaagattttatcttctggttccgatcgcacacaacaaaggagatcaagtggggtggggctaagcatgaaccggttgatgcagatgacgatggcaggaggatgcatccacgatcttcattcaaggccttcttggaggtggttaaatggagaagtgttccctgggaagatgttgaaatggatgctatccattctttgcagttaatattacgtggctccctgccagatgaagatgccaacagaaacaatgtaaggtccattgtaaaagctccatctgatgatatgaagaagatacaggggctacttgaactgagaacagttacaaatgagatggtccgcttaattgagacagcaactgcccctgtcttggctgtcgacattgccggtaacataaatggatggaacaataaagctgcagaactaacaggtttacctgtaatggaagccatagggaggcccctgatagatcttgttgttactgattctatagaagtggttaagcagattttggactcagctttacaaggaattgaagagcaaaatatggaaatcaagcttaaaacattccatgaacatgaatgcaatggtccagtaatcttgaaggttaactcctgctgtagtcgggacctttcagagaaagtcattggagtttgctttgtagcacaagatttgaccaggcagaagatgattatggataagtatactaggatacaaggagactatgttgccatagtaaagaaccccactgagctcatccctcccatatttatgatcaatgatcttggttcctgcttagagtggaataaagctatgcagaagattaccggtataaagagggaagatgcgataaacaaattgttaattggggaggtcttcacgcttcatgattatggctgtagggtgaaagatcatgcaactctaacgaaacttagcatactgatgaatgcagtgatttctggtcaggatcctgagaagctcttttttggtttcttcgacacagatgggaagtatattgaatccttgctgacagtgaacaagaggacagatgctgagggtaagatcactggtgctctttgctttctgcatgtggccagtccagagcttcagcatgctctccaggtgcagaaaatgtcggaacaagctgcgacaaacagctttaaggaattaacttacattcgtcaagaattaaggaacccactcaatggtatgcaatttacttgtaacttattgaagccttctgaattgacagaggaacagcggcaacttctttcatctaatgttctctgtcaggaccagctgaaaaagattttacatgacactgatcttgaaagcattgaacagtgctatatggagatgaacacagtagagttcaaccttgagcaagctctgaatacggttctgatgcaaggcattcctttgggcaaggaaaaacagatttcaattgaacgtaattggcctgtggaagtatcatgcatgtacctttatggggacaatttaaggcttcagcagatcctagcagactatctagcatgcgcccttcaattcacacaaactgctgaaggacctatcgtgctccaggtcatgtctaagaaggaaaacattggatctggcatgcagattgctcatttggagttcagctccaggcgttccagaggccctgatacaggagatgttccagcacaacccaggggtgtccagggagggcctcggcctgtacataagccagaagctggtgaaaacgatgagcggcacggtacagtaccttcgagaagccgacacctcgtcgttcatcatcctgatggagttcccggtcgcccagctcagcagcaagcggtccaagccttcgacgagtaaattctgaccctcatgctgctggaactgcagcgagtgttctgccgtgtcgaagtctcggttgtagctagccaagtggctgctactgaaacatcggttggtcggttctggtatctagcacggcctgtgtagtgcggatagatttggttgtttggctttggagagataagctagctggctaggtgtaacgtaacgtcgaccgataactgtatgtgaatgatgatgagctgtgaggacgaataaaggcttcacttgtgttctctattgctcttcttagagtatgatggccaacagctgtacaggaaagcatccacctaaatctgggctcgctgaatgacggctaaaagttgtttggtggctttaaactcttttatgctttgtaatcccttacagtcggatgttggtctttaaactgtcagttaaatgctggtacggcg

SEQ ID NO: 11189 - DNA, 4120 bp, Zea Mays
attttcgccgctccaattcgctcatccgtccgcgcgcccctcgccgaccggccggcgcggcgccggccgacgtcctctctccggggtagtcagtcgcgcactgcgcatcgctgttgttccttccggttcctttcgcgtccccccttcggagcagggcaacgtccaagagatattatcgctgccgctgccccgcgcgggccgctcgctgtcccactcgtgcgccacgcctcggactcggaggtgtattccctcttctccccccgtgcttatccgcgacggaatccaatcccttcgctcaagtccttctcctaagcaaagccccctcgcttttggcgtatgcccccgctggcgcgcccatgattcccgccgattcctccgcccgttcagtccagcaacccttgctgctgcagtgctgcggctagttcggtggcggggaaggaggaggaggcgagatcttggagtggggcgaagcggagatgtcgttgccgtcgaacaaccggaggacgtgctcccggagcagctctgcgcggtccaagcacagcgcgcgggtggtggcacagacgcccgtggacgcgcagctgcacgccgagttcgagggctcccagcgccacttcgactactcctcgtcggtgggcgccgccaaccgcccgtcggcaagcaccagcaccgtctccacctacctccagaacatgcagcggggccgctacatccagcccttcggctgcctgctcgccgtccacccggacaccttcgcgctgctcgcctacagcgagaacgcgcccgagatgctcgacctcacgccacacgccgtccccaccatcgaccagcgggatgcgctcggcatcggcgtcgatgtgcgcacgctcttccgctcgcagagctccgtcgcgcttcacaaggccgccgccttcggggaggtcaacctactcaaccccatcctcgtgcacgccaggacgtcggggaagcccttctacgccatattgcaccggatcgacgtcggccttgtcatcgaccttgagccggtcaatccagccgacgtgccagtcaccgccgcgggcgcgctcaagtcgtacaagctcgctgccaaggccatctccaggctgcagtcgctgcccagcgggaacctgtcgttgctgtgcgatgtgcttgtccgtgaggtgagcgaactcacgggctatgaccgggtcatggcctacaagttctatgaggatgagcatggcgaggtcatttccgaatgcaggaggtccgatctggagccgtatcttggactgcactacccagccaccgacatcccgcaggcgtccaggttcctgtttatgaagaacaaagtgcggatgatatgtgattgctgtgccactccagtgaaggtcattcaggatgatagcctagcacaacctctcagcctctgtggttccacactcagggcttcccatggttgccatgcacagtacatggcaaacatgggttctgttgcatcacttgcgatgtcagtcactataaacgaggatgaggaggaagatggggataccgggagtgaccaacaaccgaaaggcaggaagctgtgggggcttgtcgtctgccatcatacaagcccgaggttcgtccctttcccactaaggtatgcttgtgagtttctcttgcaagtatttggcatacagctcaacaaggaggtggaattggctgctcaggcaaaggagaggcacatcctcagaacgcaaacccttctttgtgatatgctcctgcgggatgctcctgttgggatatttactcggtcacctaatgtgatggatctagtaaagtgcgatggagctgcattgtattaccagaaccagcttttggtgcttggatcaacaccctctgagtcagagataaagagcattgcaacatggctgcaggataatcatgatggttcaactgggctgagtactgacagcttagtggaagcgggttatcctggtgctgttgcacttcgtgaagttgtgtgtggcatggcggccataaagatctcttccaaagattttatcttctggttccgatcgcacacaacaaaggagatcaagtggggtggggctaagcatgaaccggttgatgcagatgacgatggcaggaggatgcatccacgatcttcattcaaggccttcttggaggtggttaaatggagaagtgttccctgggaagatgttgaaatggatgctatccattctttgcagttaatattacgtggctccctgccagatgaagatgccaacagaaacaatgtaaggtccattgtaaaagctccatctgatgatatgaagaagatacaggggctacttgaactgagaacagttacaaatgagatggtccgcttaattgagacagcaactgcccctgtcttggctgtcgacattgccggtaacataaatggatggaacaataaagctgcagaactaacaggtttacctgtaatggaagccatagggaggcccctgatagatcttgttgttactgattctatagaagtggttaagcagattttggactcagctttacaaggaattgaagagcaaaatatggaaatcaagcttaaaacattccatgaacatgaatgcaatggtccagtaatcttgaaggttaactcctgctgtagtcgggacctttcagagaaagtcattggagtttgctttgtagcacaagatttgaccaggcagaagatgattatggataagtatactaggatacaaggagactatgttgccatagtaaagaaccccactgagctcatccctcccatatttatgatcaatgatcttggttcctgcttagagtggaataaagctatgcagaagattaccggtataaagagggaagatgcgataaacaaattgttaattggggaggtcttcacgcttcatgattatggctatgggaagtatattgaatccttgctgacagtgaacaagaggacagatgctgagggtaagatcactggtgctctttgctttctgcatgtggccagtccagagcttcagcatgctctccaggtgcagaaaatgtcggaacaagctgcgacaaacagctttaaggaattaacttacattcgtcaagaattaaggaacccactcaatggaccagctgaaaaagattttacatgacactgatcttgaaagcattgaacagtgctatatggagatgaacacagtagagttcaaccttgagcaagctctgaatacggttctgatgcaaggcattcctttgggcaaggaaaaacagatttcaattgaacgtaattggcctgtggaagtatcatgcatgtacctttatggggacaatttaaggcttcagcagatcctagcagactatctagcatgcgcccttcaattcacacaaactgctgaaggacctatcgtgctccaggtcatgtctaagaaggaaaacattggatctggcatgcagattgctcatttggagttcaggattgtccatccagctccaggcgttccagaggccctgatacaggagatgttccagcacaacccaggggtgtccagggagggcctcggcctgtacataagccagaagctggtgaaaacgatgagcggcacggtacagtaccttcgagaagccgacacctcgtcgttcatcatcctgatggagttcccggtcgcccagctcagcagcaagcggtccaagccttcgacgagtaaattctgaccctcatgctgctggaactgcagcgagtgttctgccgtgtcgaagtctcggttgtagctagccaagtggctgctactgaaacatcggttggtcggttctggtatctagcacggcctgtgtagtgcggatagatttggttgtttggctttggagagataagctagctggctaggtgtaacgtaacgtcgaccgataactgtatgtgaatgatgatgagctgtgaggacgaataaaggcttcacttgtgttctctattgctcttcttagagtatgatggccaacagctgtacaggaaagcatccacctaaatctgggctcgctgaatgacggctaaaagttgtttggtggctttaaactcttttatgctttgtaatcccttacagtcggatgttggtctttaaactgtcagttaaatgctggtacggcg

SEQ ID NO: 11190 - DNA, 3529 bp, Zea Mays
ctgcagtgcgggtctaatctagccccgcgaattccccaattttcgccgctccaattcgctcatccgtccgcgcgcccctcgccgaccggccggcgcggcgccggccgacgtcctctctccggggtagtcagtcgcgcactgcgcatcgctgttgttccttccggttcctttcgcgtccccccttcggagcagggcaacgtccaagagatattatcgctgccgctgccccgcgcgggccgctcgctgtcccactcgtgcgccacgcctcggactcggaggtgtattccctcttctccccccgtgcttatccgcgacggaatccaatcccttcgctcaagtccttctcctaagcaaagccccctcgcttttggcgtatgcccccgctggcgcgcccatgattcccgccgattcctccgcccgttcagtccagcaacccttgctgctgcagtgctgcggctagttcggtggcggggaaggaggaggaggcgagatcttggagtggggcgaagcggagatgtcgttgccgtcgaacaaccggaggacgtgctcccggagcagctctgcgcggtccaagcacagcgcgcgggtggtggcacagacgcccgtggacgcgcagctgcacgccgagttcgagggctcccagcgccacttcgactactcctcgtcggtgggcgccgccaaccgcccgtcggcaagcaccagcaccgtctccacctacctccagaacatgcagcggggccgctacatccagcccttcggctgcctgctcgccgtccacccggacaccttcgcgctgctcgcctacagcgagaacgcgcccgagatgctcgacctcacgccacacgccgtccccaccatcgaccagcgggatgcgctcggcatcggcgtcgatgtgcgcacgctcttccgctcgcagagctccgtcgcgcttcacaaggccgccgccttcggggaggtcaacctactcaaccccatcctcgtgcacgccaggacgtcggggaagcccttctacgccatattgcaccggatcgacgtcggccttgtcatcgaccttgagccggtcaatccagccgacgtgccagtcaccgccgcgggcgcgctcaagtcgtacaagctcgctgccaaggccatctccaggctgcagtcgctgcccagcgggaacctgtcgttgctgtgcgatgtgcttgtccgtgaggtgagcgaactcacgggctatgaccgggtcatggcctacaagttctatgaggatgagcatggcgaggtcatttccgaatgcaggaggtccgatctggagccgtatcttggactgcactacccagccaccgacatcccgcaggcgtccaggttcctgtttatgaagaacaaagtgcggatgatatgtgattgctgtgccactccagtgaaggtcattcaggatgatagcctagcacaacctctcagcctctgtggttccacactcagggcttcccatggttgccatgcacagtacatggcaaacatgggttctgttgcatcacttgcgatgtcagtcactataaacgaggatgaggaggaagatggggataccgggagtgaccaacaaccgaaaggcaggaagctgtgggggcttgtcgtctgccatcatacaagcccgaggttcgtccctttcccactaaggtatgcttgtgagtttctcttgcaagtatttggcatacagctcaacaaggaggtggaattggctgctcaggcaaaggagaggcacatcctcagaacgcaaacccttctttgtgatatgctcctgcgggatgctcctgttgggatatttactcggtcacctaatgtgatggatctagtaaagtgcgatggagctgcattgtattaccagaaccagcttttggtgcttggatcaacaccctctgagtcagagataaagagcattgcaacatggctgcaggataatcatgatggttcaactgggctgagtactgacagcttagtggaagcgggttatcctggtgctgttgcacttcgtgaagttgtgtgtggcatggcggccataaagatctcttccaaagattttatcttctggttccgatcgcacacaacaaaggagatcaagtggggtggggctaagcatgaaccggttgatgcagatgacgatggcaggaggatgcatccacgatcttcattcaaggccttcttggaggtggttaaatggagaagtgttccctgggaagatgttgaaatggatgctatccattctttgcagttaatattacgtggctccctgccagatgaagatgccaacagaaacaatgtaaggtccattgtaaaagctccatctgatgatatgaagaagatacaggggctacttgaactgagaacagttacaaatgagatggtccgcttaattgagacagcaactgcccctgtcttggctgtcgacattgccggtaacataaatggatggaacaataaagctgcagaactaacaggtttacctgtaatggaagccatagggaggcccctgatagatcttgttgttactgattctatagaagtggttaagcagattttggactcagctttacaaggtttgtcactttgctttcagtcgatttttttgtggtccccagcttagtctgtgaatgtctcctttttttctatgacaacctagtgcctccttgttttcaggaattgaagagcaaaatatggaaatcaagcttaaaacattccatgaacatgaatgcaatggtccagtaatcttgaaggttaactcctgctgtagtcgggacctttcagagaaagtcattggagtttgctttgtagcacaagatttgaccaggcagaagatgattatggataagtatactaggatacaaggagactatgttgccatagtaaagaaccccactgagctcatccctcccatatttatgatcaatgatcttggttcctgcttagagtggaataaagctatgcagaagattaccggtataaagagggaagatgcgataaacaaattgttaattggggaggtcttcacgcttcatgattatggctgtagggtgaaagatcatgcaactctaacgaaacttagcatactgatgaatgcagtgatttctggtcaggatcctgagaagctcttttttggtttcttcgacacagatgggaagtatattgaatccttgctgacagtgaacaagaggacagatgctgagggtaagatcactggtgctctttgctttctgcatgtggccagtccagagcttcagcatgctctccaggtgcagaaaatgtcggaacaagctgcgacaaacagctttaaggaattaacttacattcgtcaagaattaaggaacccactcaatggtatgcaatttacttgtaacttattgaagccttctgaattgacagaggaacagcggcaacttctttcatctaatgttctctgtcaggaccagctgaaaaagattttacatgacactgatcttgaaagcattgaacagtgtgctaaagatgcatgcatccgacaaggctgaccagtgac

SEQ ID NO: 11191 - DNA, 2106 bp, Zea Mays
ggcacgcgtaccgcacgtcggcgtctatattctcggcccacctcgagttgacaagctcacaaaaggccacgcggacacaggagaggggagagcccgagagcttcccttgccggcgagatccagtccggctcacgcgatctgactttcccggagggaattagctggtctggagtgaatactgaaccgaaatgcctctgctcccgtctgttctttaatcttacgttcttcaacagttgaaatccatcccaccccaatgtttccatgttcattccagaagcaattcttgcttgattcgtggacttctttcctaagctacagcttctttccaagtagagtaccagaaccagatacccgatctcaagggatgaagatagtgactgggccatgggaattagaccgagaaagaaagggccaggttgagatatcgggggcaggttgcccttccggtgcctgaagggcaaacaaaatgtcataccaagtcaggctgctgcgcttttcctatgaattggccttctcgcaatcccttctgttttgcctcgcctcaatctgttgatggtaggtggacaacgctataatagttcatcatgcttcattgctgctgttcaatttgggttcatggtatctcaatttcaattaggcttggtcatctgtacaacctgtttatatgtatgaggggaaaacctgtttatatgtagaatatgtcttgctgatgatctggatatcctcatatatatattctacctgtcattttatatgtcagtacacattcagttctctgaaatttcaggtccttgaatgtgatcgcatcattgcagcagatccaggttaagcagatggctgacaacagcattgagcaagcattgatagagaatcctcctaatgtgctgaaatggaagccatcagaaagagctaaacggtttcgacgatgcaggtcaactccctcagatcccaccgatcaaaaacctgcagaaaacggatctgtgcttaaagccaaagagttattcaaggagaaaaggccgagcttcatgcttgtaggcctcctccttttcgcctacctactagtgggtgtcatcatcttttacctattcatggatcaattatctgggaagacaactaatagagtgcttgacgccttgtacttcgttattgtcacaatgacctcggttggctatggggatcttttcccaaacagtgacacaacaaagctgcttgcttgcgcttttgtattcacaggaatggcgatcattgctctcttcatcagtaaagcggcagattaccttgttgagaaacaggaggtgttgttcttcaaagcactgcacatgaatatgaagggcagcgaggccaaaatgctaggagcaatggaaacaaataggataaagtacaaattctacactgtcgctctgcttcttgcaatggttattgttgctgggactgtatttctgtggaaggttgagaagctcagccttgttgattccttctactgtgtctgtgccacgatcactaccctgggttatggggataaaagcttctcgtccaaactggggcgtgtttttgcagtgttttggataaccacaagtactctcatcatggctcagttcttcatgtaccttgctgagctctacactgagcgccggcagaaaatcctgaccaaatgggtgatcaacaggaggataaccaccatggatcttgaggcagctgatatagatgacgaccgacaagttggtgctgctgaatttgtactttacaagctaaaagagctcggcaagatcagccaagaggagatatcttgttttctcgaggagtttgacaagcttgatgttgaccagtctggcacactctcaacttacgaccttactctaggacaaacaattcaatgactgatgatgcatatgtgattttgctgactgaatgattttgtttgatgtcgttagcatttctgttgtccatatgtaacgctgtaatgttgtaaagatgtaaattgagatgattgagaaattgtgccccgccttttctccaaagcaacttgaatcaaggctgtaaagaacaaatacttgctggagacagacgacatacctgcaaatttatgattggcttagctctgcccct

SEQ ID NO: 11192 - DNA, 1242 bp, Zea Mays
ggcacgcgtaccgcacgtcggcgtctatattctcggcccacctcgagttgacaagctcacaaaaggccacgcggacacaggagaggggagagcccgagagcttcccttgccggcgagatccagtccggctcacgcgatctgactttcccggagcagatccaggttaagcagatggctgacaacagcattgagcaagcattgatagagaatcctcctaatgtgctgaaatggaagccatcagaaagagctaaacggtttcgacgatgcaggtcaactccctcagatcccaccgatcaaaaacctgcagaaaacggatctgtgcttaaagccaaagagttattcaaggagaaaaggccgagcttcatgcttgaatggcgatcattgctctcttcatcagtaaagcggcagattaccttgttgagaaacaggaggtgttgttcttcaaagcactgcacatgaatatgaagggcagcgaggccaaaatgctaggagcaatggaaacaaataggataaagtacaaattctacactgtcgctctgcttcttgcaatggttattgttgctgggactgtatttctgtggaaggttgagaagctcagccttgttgattccttctactgtgtctgtgccacgatcactaccctgggttatggggataaaagcttctcgtccaaactggggcgtgtttttgcagtgttttggataaccacaagtactctcatcatggctcagttcttcatgtaccttgctgagctctacactgagcgccggcagaaaatcctgaccaaatgggtgatcaacaggaggataaccaccatggatcttgaggcagctgatatagatgacgaccgacaagttggtgctgctgaatttgtactttacaagctaaaagagctcggcaagatcagccaagaggagatatcttgttttctcgaggagtttgacaagcttgatgttgaccagtctggcacactctcaacttacgaccttactctaggacaaacaattcaatgactgatgatgcatatgtgattttgctgactgaatgattttgtttgatgtcgttagcatttctgttgtccatatgtaacgctgtaatgttgtaaagatgtaaattgagatgattgagaaattgtgccccgccttttctccaaagcaacttgaatcaaggctgtaaagaacaaatacttgctggagacagacgacatacctgcaaatttatgattggcttagctctgcccct

SEQ ID NO: 11193 - DNA, 1170 bp, Zea Mays
ggcacgcgtaccgcacgtcggcgtctatattctcggcccacctcgagttgacaagctcacaaaaggccacgcggacacaggagaggggagagcccgagagcttcccttgccggcgagatccagtccggctcacgcgatctgactttcccggaggtccttgaatgtgatcgcatcattgcagcagatccaggttaagcagatggctgacaacagcattgagcaagcattgatagagaatcctcctaatgtgctgaaatggaagccatcagaaagagctaaacggtttcgacgatgcaggaatggcgatcattgctctcttcatcagtaaagcggcagattaccttgttgagaaacaggaggtgttgttcttcaaagcactgcacatgaatatgaagggcagcgaggccaaaatgctaggagcaatggaaacaaataggataaagtacaaattctacactgtcgctctgcttcttgcaatggttattgttgctgggactgtatttctgtggaaggttgagaagctcagccttgttgattccttctactgtgtctgtgccacgatcactaccctgggttatggggataaaagcttctcgtccaaactggggcgtgtttttgcagtgttttggataaccacaagtactctcatcatggctcagttcttcatgtaccttgctgagctctacactgagcgccggcagaaaatcctgaccaaatgggtgatcaacaggaggataaccaccatggatcttgaggcagctgatatagatgacgaccgacaagttggtgctgctgaatttgtactttacaagctaaaagagctcggcaagatcagccaagaggagatatcttgttttctcgaggagtttgacaagcttgatgttgaccagtctggcacactctcaacttacgaccttactctaggacaaacaattcaatgactgatgatgcatatgtgattttgctgactgaatgattttgtttgatgtcgttagcatttctgttgtccatatgtaacgctgtaatgttgtaaagatgtaaattgagatgattgagaaattgtgccccgccttttctccaaagcaacttgaatcaaggctgtaaagaacaaatacttgctggagacagacgacatacctgcaaatttatgattggcttagctctgcccct

SEQ ID NO: 11194 - DNA, 1947 bp, Zea Mays
ggcacgcgtaccgcacgtcggcgtctatattctcggcccacctcgagttgacaagctcacaaaaggccacgcggacacaggagaggggagagcccgagagcttcccttgccggcgagatccagtccggctcacgcgatctgactttcccggaggtaaagaagctcgggatttgccgtagtctcttgatgccaaatcaaatctcgtttgcaagtagtacaagtgctgcttcggtctatgcatgtccatatctatgattatagcgagaactagttttttccttttctggattggacagggaattagctggtctggagtgaatactgaaccgaaatgcctctgctcccgtctgttctttaatcttacgttcttcaacagttgaaatccatcccaccccaatgtttccatgttcattccagaagcaattcttgcttgattcgtggacttctttcctaagctacagcttctttccaagtagagtaccagaaccagatacccgatctcaagggatgaagatagtgactgggccatgggaattagaccgagaaagaaagggccaggttgagatatcgggggcaggttgcccttccggtgcctgaagggcaaacaaaatgtcataccaagtcaggctgctgcgcttttcctatgaattggccttctcgcaatcccttctgttttgcctcgcctcaatctgttgatggtaggtggacaacgctataatagttcatcatgcttcattgctgctgttcaatttgggttcatggtatctcaatttcaattaggcttggtcatctgtacaacctgtttatatgtatgaggggaaaacctgtttatatgtagaatatgtcttgctgatgatctggatatcctcatatatatattctacctgtcattttatatgtcagtacacattcagttctctgaaatttcaggtccttgaatgtgatcgcatcattgcagcagatccaggttaagcagatggctgacaacagcattgagcaagcattgatagagaatcctcctaatgtgctgaaatggaagccatcagaaagagctaaacggtttcgacgatgcaggaatggcgatcattgctctcttcatcagtaaagcggcagattaccttgttgagaaacaggaggtgttgttcttcaaagcactgcacatgaatatgaagggcagcgaggccaaaatgctaggagcaatggaaacaaataggataaagtacaaattctacactgtcgctctgcttcttgcaatggttattgttgctgggactgtatttctgtggaaggttgagaagctcagccttgttgattccttctactgtgtctgtgccacgatcactaccctgggttatggggataaaagcttctcgtccaaactggggcgtgtttttgcagtgttttggataaccacaagtactctcatcatggctcagttcttcatgtaccttgctgagctctacactgagcgccggcagaaaatcctgaccaaatgggtgatcaacaggaggataaccaccatggatcttgaggcagctgatatagatgacgaccgacaagttggtgctgctgaatttgtactttacaagctaaaagagctcggcaagatcagccaagaggagatatcttgttttctcgaggagtttgacaagcttgatgttgaccagtctggcacactctcaacttacgaccttactctaggacaaacaattcaatgactgatgatgcatatgtgattttgctgactgaatgattttgtttgatgtcgttagcatttctgttgtccatatgtaacgctgtaatgttgtaaagatgtaaattgagatgattgagaaattgtgccccgccttttctccaaagcaacttgaatcaaggctgtaaagaacaaatacttgctggagacagacgacatacctgcaaatttatgattggcttagctctgcccct

SEQ ID NO: 11195 - DNA, 370 bp, Zea Mays
atagcccctcacgccagccgccaatgccccaatcccgtaatcgcagcctcgccccgctcgcatcttcctctccctctcagcgctggtgctcaatctacaggtcgtcccgctccctacacacccgccctccggtgtgaacctccatgacgtccacaaccactctccgatctgctgtcgtgacctcatccagccgtgctgtggcagtggatcggagttcgctccagctctgattggaattccactactatatgtgccacttgaagttgttatgttcaaataatatggtgaaaacgagcgtctattgggatctattttttatcttgcaaatgatcttcctgaaggagattgatatgtcaagatacgcttgttt

SEQ ID NO: 11196 - DNA, 1584 bp, Zea Mays
caccgctttaaatccgcctcctcccagcgtctccctcctcccggcctgtcccctcacctccctccccctatctctccaccgccgcagctagctgcgacgtcatgcactcgccggcgccaccgccaccgcatactatctacaattagccagccgtaggcttacctatcctgtgtcaagcaagcctctcgcaagcaacaaggaaggaagctagctagttttatagctgctgtcggcggcggcggctgaagcgacgtgcctgagctaggatttaggttgagatcaggagagggagaaggcggcggcgatggggcgcgggaaggtgcagctgaagcggatcgagaacaagatcaaccgccaggtgacattctccaagcgccgctcggggctactcaagaaggcgcacgagatctccgtgctctgcgacgccgaggtcgcgctcatcatcttctccaccaagggcaagctctacgagtactctaccgattcatgactagtatatatgtggggaacttccacataccagaactgattgaaagagctagatacaatataatgcagtcagaaagtatggacaaaattcttgaacggtatgagcgctactcctatgcagaaaaggttctcatttccgcagaatatgaaactcagggcaattggtgccatgaatatagaaaactaaaggcgaaggtcgagacaatacagaaatgtcaaaagcacctcatgggagaggatcttgaaactttgaatctcaaagagcttcagcaactagagcagcagctggagagttcactgaaacatatcagaacaaggaagagccagcttatggtcgagtcaatttcagcgctccaacggaaggagaagtcactgcaggaggagaacaaggttctgcagaaggagaaagcgttactcctgcatgcagctcgcggagaagcagaaagaccagcggcagcaagtgcaacgggaccaaactcaacagcagaccagttcgtcttccacgtccttcatgttaagggaagctgccccaacaacaaatgtcagcatcttccctgtggcagcaggcgggagggtggtggaaggggcagcagcgcagccgcaggctcgcgttggactgccaccatggatgcttagccatctgagctgctgaaggtttgccctcaccgtcgcgatgtgatagcccaaaatccagcaagtcttccccggaccccggactgtccccgcttctccgcctggtgcagtatcgtcgtgatcgcgagaagcagcagcagcggtttgccgtattttttaccactgtgtataagtagcatatctgcaatgtgtatattttgttcaccgttcctgctggggcggccgcacggtactttacgcatgtaatatatgtgcttcatcaaatcactttcactaccatagcatgtgccggtttgtggtagtttcatgtctcacataatgggtacacattcatatcccagtggtctcggttcttcacatcaaagttctatttcttcatgcagcaacttctatatcttcatggccgttcaaaaatacgtacagattaaagatgcagctgcatatgtaacatcaatagagaaa

SEQ ID NO: 11197 - DNA, 1482 bp, Zea Mays
caccgctttaaatccgcctcctcccagcgtctccctcctcccggcctgtcccctcacctccctccccctatctctccaccgccgcagctagctgcgacgtcatgcactcgccggcgccaccgccaccgcatactatctacaattagccagccgtaggcttacctatcctgtgtcaagcaagcctctcgcaagcaacaaggaaggaagctagctagttttatagctgctgtcggcggcggcggctgaagcgacgtgcctgagctaggatttaggttgagatcaggagagggagaaggcggcggcgatggggcgcgggaaggtgcagctgaagcggatcgagaacaagatcaaccgccaggtgacattctccaagcgccgctcggggctactcaagaaggcgcacgagatctccgtgctctgcgacgccgaggtcgcgctcatcatcttctccaccaagggcaagctctacgagtactctaccgattcatgactagtatatatgtggggaacttccacataccagaactgattgaaagagctagatacaatataatgcagtcagaaagtatggacaaaattcttgaacggtatgagcgctactcctatgcagaaaaggttctcatttccgcagaatatgaaactcaggcacctcatgggagaggatcttgaaactttgaatctcaaagagcttcagcaactagagcagcagctggagagttcactgaaacatatcagaacaaggaagagccagcttatggtcgagtcaatttcagcgctccaacggaaggaggagaacaaggttctgcagaaggagctcgcggagaagcagaaagaccagcggcagcaagtgcaacgggaccaaactcaacagcagaccagttcgtcttccacgtccttcatgttaagggaagctgccccaacaacaaatgtcagcatcttccctgtggcagcaggcgggagggtggtggaaggggcagcagcgcagccgcaggctcgcgttggactgccaccatggatgcttagccatctgagctgctgaaggtttgccctcaccgtcgcgatgtgatagcccaaaatccagcaagtcttccccggaccccggactgtccccgcttctccgcctggtgcagtatcgtcgtgatcgcgagaagcagcagcagcggtttgccgtattttttaccactgtgtataagtagcatatctgcaatgtgtatattttgttcaccgttcctgctggggcggccgcacggtactttacgcatgtaatatatgtgcttcatcaaatcactttcactaccatagcatgtgccggtttgtggtagtttcatgtctcacataatgggtacacattcatatcccagtggtctcggttcttcacatcaaagttctatttcttcatgcagcaacttctatatcttcatggccgttcaaaaatacgtacagattaaagatgcagctgcatatgtaacatcaatagagaaa

SEQ ID NO: 11198 - DNA, 1562 bp, Zea Mays
caccgctttaaatccgcctcctcccagcgtctccctcctcccggcctgtcccctcacctccctccccctatctctccaccgccgcagctagctgcgacgtcatgcactcgccggcgccaccgccaccgcatactatctacaattagccagccgtaggcttacctatcctgtgtcaagcaagcctctcgcaagcaacaaggaaggaagctagctagttttatagctgctgtcggcggcggcggctgaagcgacgtgcctgagctaggatttaggttgagatcaggagagggagaaggcggcggcgatggggcgcgggaaggtgcagctgaagcggatcgagaacaagatcaaccgccaggtgacattctccaagcgccgctcggggctactcaagaaggcgcacgagatctccgtgctctgcgacgccgaggtcgcgctcatcatcttctccaccaagggcaagctctacgagtactctaccgattcatgactagtatatatgtggggaacttccacataccagaactgattgaaagagctagatacaatataatgcagtcagaaagtatggacaaaattcttgaacggtatgagcgctactcctatgcagaaaaggttctcatttccgcagaatatgaaactcagggcaattggtgccatgaatatagaaaactaaaggcgaaggtcgagacaatacagaaatgtcaaaagcacctcatgggagaggatcttgaaactttgaatctcaaagagcttcagcaactagagcagcagctggagagttcactgaaacatatcagaacaaggaagagccagcttatggtcgagtcaatttcagcgctccaacggaaggagaagtcactgcaggaggagaacaaggttctgcagaaggagctcgcggagaagcagaaagaccagcggcagcaagtgcaacgggaccaaactcaacagcagaccagttcgtcttccacgtccttcatgttaagggaagctgccccaacaacaaatgtcagcatcttccctgtggcagcaggcgggagggtggtggaaggggcagcagcgcagccgcaggctcgcgttggactgccaccatggatgcttagccatctgagctgctgaaggtttgccctcaccgtcgcgatgtgatagcccaaaatccagcaagtcttccccggaccccggactgtccccgcttctccgcctggtgcagtatcgtcgtgatcgcgagaagcagcagcagcggtttgccgtattttttaccactgtgtataagtagcatatctgcaatgtgtatattttgttcaccgttcctgctggggcggccgcacggtactttacgcatgtaatatatgtgcttcatcaaatcactttcactaccatagcatgtgccggtttgtggtagtttcatgtctcacataatgggtacacattcatatcccagtggtctcggttcttcacatcaaagttctatttcttcatgcagcaacttctatatcttcatggccgttcaaaaatacgtacagattaaagatgcagctgcatatgtaacatcaatagagaaa

SEQ ID NO: 11199 - DNA, 1521 bp, Zea Mays
cccggtttcgctataccccctccccctccgatccgtcgcggcagcgctcatcaccgctttaaatccgcctcctcccagcgtctccctcctcccggcctgtcccctcacctccctccccctatctctccaccgccgcagctagctgcgacgtcatgcactcgccggcgccaccgccaccgcatactatctacaattagccagccgtaggcttacctatcctgtgtcaagcaagcctctcgcaagcaacaaggaaggaagctagctagttttatagctgctgtcggcggcggcggctgaagcgacgtgcctgagctaggatttaggttgagatcaggagagggagaaggcggcggcgatggggcgcgggaaggtgcagctgaagcggatcgagaacaagatcaaccgccaggtgacattctccaagcgccgctcggggctactcaagaaggcgcacgagatctccgtgctctgcgacgccgaggtcgcgctcatcatcttctccaccaagggcaagctctacgagtactctaccgattcatgtatggacaaaattcttgaacggtatgagcgctactcctatgcagaaaaggttctcatttccgcagaatatgaaactcagggcaattggtgccatgaatatagaaaactaaaggcgaaggtcgagacaatacagaaatgtcaaaagcacctcatgggagaggatcttgaaactttgaatctcaaagagcttcagcaactagagcagcagctggagagttcactgaaacatatcagaacaaggaagagccagcttatggtcgagtcaatttcagcgctccaacggaaggaggagaacaaggttctgcagaaggagctcgcggagaagcagaaagaccagcggcagcaagtgcaacgggaccaaactcaacagcagaccagttcgtcttccacgtccttcatgttaagggaagctgccccaacaacaaatgtcagcatcttccctgtggcagcaggcgggagggtggtggaaggggcagcagcgcagccgcaggctcgcgttggactgccaccatggatgcttagccatctgagctgctgaaggtttgccctcaccgtcgcgatgtgatagcccaaaatccagcaagtcttccccggaccccggactgtccccgcttctccgcctggtgcagtatcgtcgtgatcgcgagaagcagcagcagcggtttgccgtattttttaccactgtgtataagtagcatatctgcaatgtgtatattttgttcaccgttcctgctggggcggccgcacggtactttacgcatgtaatatatgtgcttcatcaaatcactttcactaccatagcatgtgccggtttgtggtagtttcatgtctcacataatgggtacacattcatatcccagtggtctcggttcttcacatcaaagttctatttcttcatgcagcaacttctatatcttcatggccgttcaaaaatacgtacagattaaagatgcagctgcatatgtaacatcaatagagaaa

SEQ ID NO: 11200 - DNA, 1477 bp, Zea Mays
tgtcgacctaacctatcgtcagtgccctgcggccggtggaaacgaaacctaggaggagcctagtggccacctagggtgaggaaaactgaggacgcgaggcgagagcgagatccaatctgcacccccccaccaaagaaagattcttccccgccggcctcgctctctcaacatccgtctcgctccttccaccctcgctgcgcctcaggcagcgagcgagcatatagcagcccaccacccacatgccgcagggccctcacccgtcgagccaattgagtggcagccagaaaaacccagagcgcgagcagcgagcgagcgcgggctcctgtgtgcagtgtgtctgcgctagagggcgaagggcacggaccgccttcgtcaataattgcggtacgaacggggcaaatccgtcgtttaaagaggtcgctgatagcgcctgctggtggcgagagagagaaagcagcagaatcgctgagggatcgtcgatccggagaggcaaaaaagccgagagatcaggcagggcaccatggggcgcgggaaggtggtgctgcagcggatcgagaacaagatcagccggcaggtgaccttcgccaagcgccggaacggcctgctcaagaaggcgtacgagctctccatcctctgcgacgccgaggtcgcgctcgtcctcttctcccacgccggccgcctctaccagttctcatcctcctccaaaataactatcaagaatatgtgaagctgaaggcacgagttgaggttttacagcactcacaaaggaatcttcttggtgaagatctggccctacttagcccaagtgaacttgaccagcttgagaatcaagtagacaagaccttgaagcaaataagatcaagaaagactcaagtgttacttgatgaactttgtgacttaaagagaaaggaacaaatgctgcaagatgcaaacagggttctgaaaaggaagctgggcgagtttgaggcagaggcggcttctcccccgcagttagcgtggcaaggcgaaggcggcatgttgtcccatgaccctccacagccagaacacttcttccaggctctggagagcaacccatgtctgcaacctacataccatacgatggacatgaaccagcagccagtgccagcgccgggcggctgctatcctgcatggatgtcttagccagtgcttcattccattgccttgagaagtgtcctgaccttcacagatccctacgagctttattactgcttttgcctgcccctttgctgcttgcggtgcttactgaactgtccaaatgaccacatggtcatatataggttattgctgtctttatcttatgttgatcacggcctgctcagctgctttagcgccatgcaaaatggcttgggcgatgcacgcttgaatgggtcgaactgcttatgttttgggagtataaatcacttagcaataagcattggcatgtcctctgtctcaaatacaagtacactttactgtt

SEQ ID NO: 11201 - DNA, 902 bp, Zea Mays
gtccgggcccctccgcggcgacgtcgatgaagagggttgtgtgtatagtctgcttaagactctagagcggtaccagaggtacatctatgcttcagccgatgctgcagtgccatctagcgatcagatgcagaataactatcaagaatatgtgaagctgaaggcacgagttgaggttttacagcactcacaaaggaatcttcttggtgaagatctggccctacttagcccaagtgaacttgaccagcttgagaatcaagtagacaagaccttgaagcaaataagatcaagaaagactcaagtgttacttgatgaactttgtgacttaaagagaaaggaacaaatgctgcaagatgcaaacagggttctgaaaaggaagctgggcgagtttgaggcagaggcggcttctcccccgcagttagcgtggcaaggcgaaggcggcatgttgtcccatgaccctccacagccagaacacttcttccaggctctggagagcaacccatgtctgcaacctacataccatacgatggacatgaaccagcagccagtgccagcgccgggcggctgctatcctgcatggatgtcttagccagtgcttcattccattgccttgagaagtgtcctgaccttcacagatccctacgagctttattactgcttttgcctgcccctttgctgcttgcggtgcttactgaactgtccaaatgaccacatggtcatatataggttattgctgtctttatcttatgttgatcacggcctgctcagctgctttagcgccatgcaaaatggcttgggcgatgcacgcttgaatgggtcgaactgcttatgttttgggagtataaatcacttagcaataagcattggcatgtcctctgtctcaaatacaagtacactttactgtt

SEQ ID NO: 11202 - DNA, 302 bp, Zea Mays
caacagtctaatttgtgtacttcgtgttagacaccctgaatccaggcatctcaaatgaagtggggaacttctcgacctccgcggctccgccctcagcaagtttgtacagcctgctgagggaaagccaaaacatgacatagaatcctgctatgcataccagtcaagccaagaggacgcagatcccagagaacaaggtggttctctgttccatcagtaaccaacttgtagcccttactcatcaaatggttacaaatggcaatgttatctttccctttctgcaacacagtccaggtgccttttct

SEQ ID NO: 11203 - DNA, 596 bp, Zea Mays
gccggccccttttgctgtcacttttcgcctgtgcgttcgtttgtgacttggcgctgctgctgcgacgacgagcagcagcagcggttcggccggcgtgtacagccctccagcgatgggtccgtcggccctcaacgacaacagcgctgccgccggcgtcgtcctcccgatggctggcgctgggcggctgctgatcctggcctgctgctcgctcgtcgctctctactacctcggcgcgtgatgatcgtgtgaggacgagacgccgctccccgctgccgcttgctgttgttggggtgtcttgttccttagcccttttcttttctcctctagtggcagtggcaggcaggagagaaccttgtgacgatgggcgcactgcactgccttccaccggtggaggagagcttggcagtgtgaggcccctgtaaatcttaggttctagggagggagggatgctgtgttgacttcttggacatgtgtgctcattgtttcatcggtctttgtttagggttgatgcgctaagcttcgcactgcctgacttgtggctgatgttgctcatgagccgtgttgtttcccttgccctgatggagagtggttcatct

SEQ ID NO: 11204 - DNA, 577 bp, Zea Mays
ctttggggttggaaaaatcctggaggaataaaaagtgctgctgcgacgacgagcagcagcagcggttcggccggcgtgtacagccctccagcgatgggtccgtcggccctcaacgacaacagcgctgccgccggcgtcgtcctcccgatggctggcgctgggcggctgctgatcctggcctgctgctcgctcgtcgctctctactacctcggcgcgtgatgatcgtgtgaggacgagacgccgctccccgctgccgcttgctgttgttggggtgtcttgttccttagcccttttcttttctcctctagtggcagtggcaggcaggagagaaccttgtgacgatgggcgcactgcactgccttccaccggtggaggagagcttggcagtgtgaggcccctgtaaatcttaggttctagggagggagggatgctgtgttgacttcttggacatgtgtgctcattgtttcatcggtctttgtttagggttgatgcgctaagcttcgcactgcctgacttgtggctgatgttgctcatgagccgtgttgtttcccttgccctgatggagagtggttcatct

SEQ ID NO: 11205 - DNA, 1368 bp, Zea Mays
attagtggcaaaaagttagatctcccttgatccaaacagccccatacgttgccttgggcaatcgagctaatcaatctccgtgcaattccacctcccgaagacccgaactgagtccctccaccgacccaaaccctagcgcgcacccacctccctccccctttcccggcgtgcggtccggcgttggagatgcgggcgctgctcgcggacggcgggatggcgctggcgatggcgccggaggttaacgagtcgtcgggcggtgctgcgttgtcgcaggggctgttatggtgggcgtcggagtgccacggggtgttgtacagccttgcggtgatgctgccgtcgctggccttcgtgggattcctagcatggcaggcgcggcggagcttccgtaggatcagctacggccgctctcacgtcgtcgtcgtcgcgtactacgcgctcctctgggtcgtcgccgtactcaacctcctctggtgcttcctgcaggcatggcaatgtatgcctgacagggcattttcttggaatgtattgtcactgttcacaaaatcaggaatgttattcttggaagtcagtttgatagcctttctacttcaaggaaatgatgccagtggttttgaatctttggcacgaacctttgttatctctggagctgtagttgcagctgacgcattgctcaaggaactggtgggaaatggggcctatggattctccacaaacttgtgcttactggagtttatgggttgattgttttcatgcatcattcaagatggagaaacaggctgcctgcaaaaccagcatactacaactatgtatgtgcgatgttgctattgaatggtgtatcactgtttggatgtttccttgttgcaagtggagctggatttggtttatggttatataatctcacaatcgtatgctatcattcgctttaccttcccctcctatatgtgactttcttagcggactttttccaggaggaagacatgctcctagagagcgtttactattctgaaatgaaggatgctgggttctttgatgctgactgggattaatcggtggctactgcgctctatgaccactccaatgtgaattacgatgtgtttctatctgtgtactctcaacgtagaacagaaaatgtatgtagctaaccgtggtaatgaatggaaatatgtaaatattactggcgcatacttcagatttcaagtgatttcaacactgagattgccaccccaacggttggtgataagttcacgtcagaaagtgctatagcgtgtttggtttgagggtattcccttctcactcctcattttcttatttggtttatagaatgaaatgaattttcttatttggtttatagaatgaaatgaattgatc

SEQ ID NO: 11206 - DNA, 1036 bp, Zea Mays
gttaatgcagggaaagaagggagatcgaagagggcaagatggccttttgccttagctgacacgccggtgacacgctggactgcctatttgacacaccaggcatggcaatgtatgcctgacagggcattttcttggaatgtattgtcactgttcacaaaatcaggaatgttattcttggaagtcagtttgatagcctttctacttcaaggaaatgatgccagtggttttgaatctttggcacgaacctttgttatctctggagctgtagttgcagctgacgcattgctcaagactatatatgtttttggcttcggtgttcctttgttcattgatgctgatcaaggaactggtgggaaatggggcctatggattctccacaaacttgtgcttactggagtttatgggttgattgttttcatgcatcattcaagatggagaaacaggctgcctgcaaaaccagcatactacaactatgtatgtgcgatgttgctattgaatggtgtatcactgtttggatgtttccttgttgcaagtggagctggatttggtttatggttatataatctcacaatcgtatgctatcattcgctttaccttcccctcctatatgtgactttcttagcggactttttccaggaggaagacatgctcctagagagcgtttactattctgaaatgaaggatgctgggttctttgatgctgactgggattaatcggtggctactgcgctctatgaccactccaatgtgaattacgatgtgtttctatctgtgtactctcaacgtagaacagaaaatgtatgtagctaaccgtggtaatgaatggaaatatgtaaatattactggcgcatacttcagatttcaagtgatttcaacactgagattgccaccccaacggttggtgataagttcacgtcagaaagtgctatagcgtgtttggtttgagggtattcccttctcactcctcattttcttatttggtttatagaatgaaatgaattttcttatttggtttatagaatgaaatgaattgatc

SEQ ID NO: 11207 - DNA, 2232 bp, Zea Mays
gtttgatttacaatatcgtgtgtataaatatttcatgttttttactttatttgatttgcgataccacacatataacgatttcatatgtttcccgtggcaacgcacgggcatagacctagtctaacaataaagcccaacctggcccaaacttacttcctttaccctagaccgagttgaaccgatatcataaaaaaaagacaccctgcgtcatttaccgaccaccgtccatccatggatgcagccgagggccgaggggcagagtgggccgaggggcgtggcaggcggtgagcacgccggtggtcgggacggtacggatctcgtgatccatggccttcgcgggatggcgctgctccctgcttatgacacctcccgttcaccggcagcgaatcggggcttggcatttcccatcaagcattaagcagtgaagcaccccccctcgtttccaccggcagtccggcagcgagcagacaggtttacaagcttgagcagatcctgatgcgaggaccctccatctgtgatactctcgcacgctgctctcttcaaagaaagtgccctcgctctgatcgtatcatcagcgagcagctggttgactttgtccctgatctcctccttggtgaagacgccccgctcgttggcacggatcctcaagcccgtgccccacacgtcgcagatgtacttctggttcaagaactggtcggcaaagtatggccaacacaggaacgggacgccgtgacgcaccccttccatggtcgagttccatccacagtgcgagatgaagcatgccaccgcagggtgcgagagcacgcgctgctggggagcccagccgacgacgagccccgtgtctccgacgcggcacctgaacttgtccagccagccttggtcgacgccgttggcaaagttcggccggaccacccacagaaacgggcgtcccgtgagcgccagcccgtcggcgagctcctggagccttgcggtgtcgaagactgtgaagctcccgaaggccacgtagacaactgatccggggggctgggcgtcgagccagacgaggcaggccctgtcttcgggccagagctggctggccgaggtcgaccttggcgcctcaagggggccgacggccagcgcggccgtggggaggagggccagcacctcggactcgatagcatggaacgtgttgcagacaatggtgtcagcgcgcgccaacgttgggttgctcttgacgatgccctttaccatgattcttcgtatctcggggcttccatcaaacttactccatgggaggtcggcggcgtcgatgactggcatgtctggagacgacacgggtgtttatggtgttcggttcgctcttaccactttcatcaatgatgccatcctcaatcatcttgggaataagcgtcctcagcgcgaagacggtggccgagtaggtcgagaacaaggcgacgcgcacgcccaccgtgccggccaggtccagcacccagttcatggagacatcagccacgacccaccgagtcctctgagctctggccagctcctcaaggcggccgagcatcgccgccggcaagccctgggccagcctaacgatgtccgcgcggtcgccatcggggcccatgccgtccgggaaagagaccaagtggatcccggcgtgggcagctgccctggtctctcctcctcctgccgccaaggccgtgacgatgcgggcgtggttgaagtccgtgttcacgaagtcgacctcgaagccatggtcgacgaggcggtgcgacagctccatgagcggcatgacatggccctgggcagggaagggcagcaccatgacacgaggccggggaggagccgcggccatggatcggaggctggtagcagctagcgtgtgtgcgctggaccgctggtgctggtgtggtatacggcggcaccgcacctgggttgcagcactgtcagatctcagaggttgctgttggctgcctgctgctgctcctgtgggtatcgataagtaagagagagatagagtcgccccgcccggtgttctcaggtacaagagcgaccgcatcgatgcagtcgcgtcaggtctcacatcaaaagaatccgtctcgtgctcgtctgactgcatcagcaggtctcacatcagccagcaacgaacgattggcgctcgtctgcttgcctatcggtttctctgattttgtcaatcgttcatatcgatgaatttccagccacgtcgattgtcgacaaaaaaaaaaaaaaaaa

SEQ ID NO: 11208 - DNA, 2305 bp, Zea Mays
gtttgatttacaatatcgtgtgtataaatatttcatgttttttactttatttgatttgcgataccacacatataacgatttcatatgtttcccgtggcaacgcacgggcatagacctagtctaacaataaagcccaacctggcccaaacttacttcctttaccctagaccgagttgaaccgatatcataaaaaaaagacaccctgcgtcatttaccgaccaccgtccatccatggatgcagccgagggccgaggggcagagtgggccgaggggcgtggcaggcggtgagcacgccggtggtcgggacggtacggatctcgtgatccatggccttcgcgggatggcgctgctccctgcttatgacacctcccgttcaccggcagcgaatcggggcttggcatttcccatcaagcattaagcagtgaagcaccccccctcgtttccaccggcagtccggcagcgagcagacagaatcaggcggtgtcttggaaataacttcagtgccatggcctggtctcatggaacatctccattatttccacaggtttacaagcttgagcagatcctgatgcgaggaccctccatctgtgatactctcgcacgctgctctcttcaaagaaagtgccctcgctctgatcgtatcatcagcgagcagctggttgactttgtccctgatctcctccttggtgaagacgccccgctcgttggcacggatcctcaagcccgtgccccacacgtcgcagatgtacttctggttcaagaactggtcggcaaagtatggccaacacaggaacgggacgccgtgacgcaccccttccatggtcgagttccatccacagtgcgagatgaagcatgccaccgcagggtgcgagagcacgcgctgctggggagcccagccgacgacgagccccgtgtctccgacgcggcacctgaacttgtccagccagccttggtcgacgccgttggcaaagttcggccggaccacccacagaaacgggcgtcccgtgagcgccagcccgtcggcgagctcctggagccttgcggtgtcgaagactgtgaagctcccgaaggccacgtagacaactgatccggggggctgggcgtcgagccagacgaggcaggccctgtcttcgggccagagctggctggccgaggtcgaccttggcgcctcaagggggccgacggccagcgcggccgtggggaggagggccagcacctcggactcgatagcatggaacgtgttgcagacaatggtgtcagcgcgcgccaacgttgggttgctcttgacgatgccctttaccatgattcttcgtatctcggggcttccatcaaacttactccatgggaggtcggcggcgtcgatgactggcatgtctggagacgacacgggtgtttatggtgttcggttcgctcttaccactttcatcaatgatgccatcctcaatcatcttgggaataagcgtcctcagcgcgaagacggtggccgagtaggtcgagaacaaggcgacgcgcacgcccaccgtgccggccaggtccagcacccagttcatggagacatcagccacgacccaccgagtcctctgagctctggccagctcctcaaggcggccgagcatcgccgccggcaagccctgggccagcctaacgatgtccgcgcggtcgccatcggggcccatgccgtccgggaaagagaccaagtggatcccggcgtgggcagctgccctggtctctcctcctcctgccgccaaggccgtgacgatgcgggcgtggttgaagtccgtgttcacgaagtcgacctcgaagccatggtcgacgaggcggtgcgacagctccatgagcggcatgacatggccctgggcagggaagggcagcaccatgacacgaggccggggaggagccgcggccatggatcggaggctggtagcagctagcgtgtgtgcgctggaccgctggtgctggtgtggtatacggcggcaccgcacctgggttgcagcactgtcagatctcagaggttgctgttggctgcctgctgctgctcctgtgggtatcgataagtaagagagagatagagtcgccccgcccggtgttctcaggtacaagagcgaccgcatcgatgcagtcgcgtcaggtctcacatcaaaagaatccgtctcgtgctcgtctgactgcatcagcaggtctcacatcagccagcaacgaacgattggcgctcgtctgcttgcctatcggtttctctgattttgtcaatcgttcatatcgatgaatttccagccacgtcgattgtcgacaaaaaaaaaaaaaaaaa

SEQ ID NO: 11209 - DNA, 2664 bp, Zea Mays
aacaaaacaacgcggcggcaccacactaaaaatccaccactcccgagcagcagcagcacgctgctacaaaaggcacgagcacaagcaaggcaaaccctctagcgagagcttgctagccacaccagtgacaaagagtatactcgcccgatcccgccgcgcgccgcagctagagcctagagctaggaggtcgatctgatcgcatcggccggggtctgccgccctgcccatggccggcgccgccggtgacaggtcggaggaggacgtcggcgccgactggccgttcggtggcgtcgacgccttcacggagtactcatcctttttcgcggagcccggctggccgggcggcctagccggggaactcatcccggtgctggatctgcccgaggcagcagcaccgctgcccgcccaactgtccacggagccatcggaggagcctgcgcccgccaggtcgggggacgccggcgcgtcgtcgagctcgagcggggacggcgccgcgccggggaacggcgacggcgacgacgatcggaaggcggcgccggccgccgaggcagcgtaagtgcacgcgcggcagcttctgcacctaaggtagcatacgccggcgagcggcaggcagcagcagcagggctatagtttcggagcaccaccgcgtgaaggtaagcgagactccgcaacgcgtttgtgcaccgcgcgtccgggacgggacgggacgggaggggcaatctcgtcaaataccagcgggcgcgggcggcggcacatgtccacgcagatccgcgatttgcgtgcgcggattgacccaagtttcacgcggtttcatttgttttcttccccgtctatctactctgttctgccttttatttttaattctgcgtgctgcatttccgtatatatactgttcacgtctccgtatgcatatgcacgagattgttttgttttgttctgttcggattcgaacgcagtctgtgcatcttcattcgcgtgtgtcaaatagatccaaatcaacggtttcatttcaaaggtgcatgtggtcaaactaatggatcatatatatacactccaaaacctgctccaaaatttgttcatcgaagagaagggaaaagtacgcatgcggcatacatgtatctgtcatgtgtatgtctacgactcatctagctatgtgtctatgttctagcgcggggcgacggatggagaggttttgtgctttcctcctcgctcccaccgtccttgctgatctgtatgctgtcatcagcaacgctggcggcgagcggcgtccggtgggccgcggtgcggccggacggcgtgtgtggtcacgtcgtctgcccgccgtcctggtcctggtcctgcccctgccatgatcagccgaccaatttccttgtcttacctacctttgccatgttcagtgcgcattgaatcttgcactccagcctacgcagcattaactgctcgcaggcatggatctgtcgaaacgctctgtactgttgatccagtattgctgctgctcatagacgatctgtccactgtatgaactgccgccagtactgtcttcgtaccaaagtaaagtccaatcaaatctacgtaaaagtatattgatgtctgtaatgtatgaacttgcatatgatgcaggggtaggaaaccggcggcgaagaaggggcagaagcgggcgcggcagccgcggttcgcgttcatgaccaagaccgagctcgatcacctcgacgacggctatagatggaggaagtatggccagaaagctgtcaagaacagccctttcccaaggagttactacaggtgcaccaacagcaaatgcacagtgaagaagcgcgtggagaggtcctccgacgacccctccgtggtcatcaccacctacgagggccagcactgccacagcatcggtccattccagcgcggcggcggcggaggcgcagccgcggcgcggtaccacagcgcggcggccgtcgcgctggcggagcaaatgtattcgtcgtcgacgacgtcgtcgttcatcccagcagcgcggcagcagctcttcagcttgccgccgttgcacccgcagagctccccgccgtcctcggagacgacgccgccgccggtcgttagctcggtgactactacatcttttcagcgtgctaacgacggcgacgagctgtggcggacaggcacaggctacggctccggggtgtccgtggcgcagtcgccgtcaacgccaccatcagtgcctccgccggtcgtttcggttcagaaggcggggctgctggacgacatggtgccccatggtgtaaggcatggcaccccatgatggtggcaaaatatgacatatatatacctgtcggccgtaccagcaagaggcggataaagtgatcaaccagctagcagctagggttttctcctgctggattcatcagtagtagttagatttatctattactctaccagacactgcatgcatatatatactcagcttatctgttcagatttgcttatattcagtgtcactctccaacaatctccattgcacctacatgtggatgtgtagcagtacttgtatttcttgtcaaaaaatcagagaggtatatctagaagcttcgcatgctcccttcctctataaaaccaacgtctctgtatttataggaagggttcacccttttacatgaagaattatgcaactagcag

SEQ ID NO: 11210 - DNA, 1584 bp, Zea Mays
aacaaaacaacgcggcggcaccacactaaaaatccaccactcccgagcagcagcagcacgctgctacaaaaggcacgagcacaagcaaggcaaaccctctagcgagagcttgctagccacaccagtgacaaagagtatactcgcccgatcccgccgcgcgccgcagctagagcctagagctaggaggtcgatctgatcgcatcggccggggtctgccgccctgcccatggccggcgccgccggtgacaggtcggaggaggacgtcggcgccgactggccgttcggtggcgtcgacgccttcacggagtactcatcctttttcgcggagcccggctggccgggcggcctagccggggaactcatcccggtgctggatctgcccgaggcagcagcaccgctgcccgcccaactgtccacggagccatcggaggagcctgcgcccgccaggtcgggggacgccggcgcgtcgtcgagctcgagcggggacggcgccgcgccggggaacggcgacggcgacgacgatcggaaggcggcgccggccgccgaggcagcgggtaggaaaccggcggcgaagaaggggcagaagcgggcgcggcagccgcggttcgcgttcatgaccaagaccgagctcgatcacctcgacgacggctatagatggaggaagtatggccagaaagctgtcaagaacagccctttcccaaggtgcaccaacagcaaatgcacagtgaagaagcgcgtggagaggtcctccgacgacccctccgtggtcatcaccacctacgagggccagcactgccacagcatcggtccattccagcgcggcggcggcggaggcgcagccgcggcgcggtaccacagcgcggcggccgtcgcgctggcggagcaaatgtattcgtcgtcgacgacgtcgtcgttcatcccagcagcgcggcagcagctcttcagcttgccgccgttgcacccgcagagctccccgccgtcctcggagacgacgccgccgccggtcgttagctcggtgactactacatcttttcagcgtgctaacgacggcgacgagctgtggcggacaggcacaggctacggctccggggtgtccgtggcgcagtcgccgtcaacgccaccatcagtgcctccgccggtcgtttcggttcagaaggcggggctgctggacgacatggtgccccatggtgtaaggcatggcaccccatgatggtggcaaaatatgacatatatatacctgtcggccgtaccagcaagaggcggataaagtgatcaaccagctagcagctagggttttctcctgctggattcatcagtagtagttagatttatctattactctaccagacactgcatgcatatatatactcagcttatctgttcagatttgcttatattcagtgtcactctccaacaatctccattgcacctacatgtggatgtgtagcagtacttgtatttcttgtcaaaaaatcagagaggtatatctagaagcttcgcatgctcccttcctctataaaaccaacgtctctgtatttataggaagggttcacccttttacatgaagaattatgcaactagcag

SEQ ID NO: 11211 - DNA, 1670 bp, Zea Mays
ctccgacgcgtctgccccggacaccgataaaaaatcttgacagcaacgcttcgttgataaaattaacctaccccgaacaaaacaacgcggcggcaccacactaaaaatccaccactcccgagcagcagcagcacgctgctacaaaaggcacgagcacaagcaaggcaaaccctctagcgagagcttgctagccacaccagtgacaaagagtatactcgcccgatcccgccgcgcgccgcagctagagcctagagctaggaggtcgatctgatcgcatcggccggggtctgccgccctgcccatggccggcgccgccggtgacaggtcggaggaggacgtcggcgccgactggccgttcggtggcgtcgacgccttcacggagtactcatcctttttcgcggagcccggctggccgggcggcctagccggggaactcatcccggtgctggatctgcccgaggcagcagcaccgctgcccgcccaactgtccacggagccatcggaggagcctgcgcccgccaggtcgggggacgccggcgcgtcgtcgagctcgagcggggacggcgccgcgccggggaacggcgacggcgacgacgatcggaaggcggcgccggccgccgaggcaggggtaggaaaccggcggcgaagaaggggcagaagcgggcgcggcagccgcggttcgcgttcatgaccaagaccgagctcgatcacctcgacgacggctatagatggaggaagtatggccagaaagctgtcaagaacagccctttcccaaggagttactacaggtgcaccaacagcaaatgcacagtgaagaagcgcgtggagaggtcctccgacgacccctccgtggtcatcaccacctacgagggccagcactgccacagcatcggtccattccagcgcggcggcggcggaggcgcagccgcggcgcggtaccacagcgcggcggccgtcgcgctggcggagcaaatgtattcgtcgtcgacgacgtcgtcgttcatcccagcagcgcggcagcagctcttcagcttgccgccgttgcacccgcagagctccccgccgtcctcggagacgacgccgccgccggtcgttagctcggtgactactacatcttttcagcgtgctaacgacggcgacgagctgtggcggacaggcacaggctacggctccggggtgtccgtggcgcagtcgccgtcaacgccaccatcagtgcctccgccggtcgtttcggttcagaaggcggggctgctggacgacatggtgccccatggtgtaaggcatggcaccccatgatggtggcaaaatatgacatatatatacctgtcggccgtaccagcaagaggcggataaagtgatcaaccagctagcagctagggttttctcctgctggattcatcagtagtagttagatttatctattactctaccagacactgcatgcatatatatactcagcttatctgttcagatttgcttatattcagtgtcactctccaacaatctccattgcacctacatgtggatgtgtagcagtacttgtatttcttgtcaaaaaatcagagaggtatatctagaagcttcgcatgctcccttcctctataaaaccaacgtctctgtatttataggaagggttcacccttttacatgaagaattatgcaactagcag

SEQ ID NO: 11212 - DNA, 3167 bp, Zea Mays
gtgaactgccgatgcggccacgcgggtggggttaactggggcagtggcggtgttggcttccaagtgtgctaaactccatcggctcatctgccattgcatcaaacatcaagcaccatgcagagttcgctcccttgttctctccagatcacttttctcccctgaaagcttaccatgcgactgctaaaagtgtccttgatgcgctgctgataaactggaatgcgacatatgattattacaacaaaatgaatgtaaaacaagcatattacctgtccatggagtttttacagggaagggctctcacaaatgctattggcaatctagagattaccggtgaatatgcagaagcattaaaacaacttggacaaaacctggaggatgtcgctagccaggaaccagatgctgccctgggcaatggtggtttaggccgcctggcttcttgttttttggattctttagcaacattaaattatccagcatggggatatggacttcgctatgaatatggcctctttaagcagatcataacaaaggatggtcaggaggagattgctgagaattggcttgagatgggatatccttgggaggttgtaagaaatgatgtctcttatcctgtgaaattctatggtaaagtggtggaaggcactgatggtaggaagcactggattggaggagaaaatatcaaggctgtggcacatgatgtccctattcctggctacaaaactagaactaccaataatctgcgtctttggtcaacaactgtaccagcacaagattttgacttggcagcttttaattctggagatcataccaaggcatatgaagctcatctaaacgctaaaaagatatgccacatattgtatcctggggatgaatcactagaggggaaagttctccgcttgaagcaacaatatacattgtgttcagcctcactacaggacatcattgctcgttttgagagtagagctggcgagtctctcaactgggaggacttcccctccaaagttgcagtgcagatgaatgacactcatccaacactatgcattcctgagttaatgagaatactgatggatgttaagggattaagctggagtgaggcatggagtattacagaaagctctagagaagtggagcttggacataatgcagaaacttttacctcgacatgttgagataatagaaacaattgatgaagagctgataaacaacatagtctcaaagtatggaaccacagatactgaactgttgaaaaagaagctgaaagagatgaggattctggataatgttgaccttccagcttccatttcccaactatttgttaaacccaaagacaaaaaggaatctcctgctaaatcaaagcaaaagttacttgttaaatctttggagactattgttgatgttgaggagaaaactgagttggaagaggaggcggaggttctatcagagatagaggaggaaaaacttgaatctgaagaagtagaggcagaagaagagagttctgaggatgagttagatccatttgtaaagtctgatcctaagttaccaagagttgtccgaatggcaaacctctgtgttgttggtgggcattcagtaaatggtgtagctgaaattcacagtgaaattgtgaaacaggatgtgttcaacagcttctatgagatgtggccaactaaatttcagaataaaacaaatggagtgactcccaggcgttggatccggttttgtaatcctgcattaagtgcattaatttcaaagtggattggttctgatgactgggtgcttaatacagacaaactggcagaactgaagaagtttgctgataatgaagatctgcattcagagtggcgtgctgctaagaaggctaacaaaatgaaggttgtttctcttataagggagaagacaggatatattgtcagtccagatgcaatgtttgatgtgcaggtgaaaaggatacatgaatataagcggcagctgctaaatatccttggaattgtctaccgctacaagaagatgaaagaaatgagcacagaagaaagagcaaagagctttgttccaagggtatgcatattcggtgggaaagcatttgccacatatatacaggcaaaaaggatcgttaaatttattacagatgtggcagctaccgtgaaccatgattcagacattggagatttgttgaaggtcgtatttgttccagactataatgttagtgttgccgaggcgctaattcctgccagtgaattgtcacagcatatcagtactgctggaatggaagctagtgggaccagtaacatgaagtttgcaatgaacggttgcattcttattggaactttagatggtgcaaatgtggaaatcagagaggaggttggagaggaaaactttttcctttttggtgcagaggcacatgaaattgctggtttgcggaaagaaagagccgagggaaagtttgtgcctgacccaagatttgaggaggttaaggaatttgtccgcagtggtgtctttgggacttacagctatgatgaattgatgggttctttggaaggaaatgaaggttacggacgtgcagattatttccttgttggcaaggacttccccagctatattgaatgccaagaaaaagttgatgaggcgtaccgagatcagaagttatggacaaggatgtctatcctcaacacggctggctcatccaagttcagcagcgataggacgattcatgagtacgccaaggatatctgggatatcagccctgccatccttccctagaccaggtggatatcaggttctttcgcctatatttctgtgaaccctcaggatcaaggaacagttggtgacgacattaatttgcctcagccccttagcaggaagcgctggtcacctcagttttgtgtagacaaaatctaggcatcgataaatgatgggggactatgcatggtgttttggcagcactgttcagtaccttgccttctaaatctggtttttggtgtgtgtgtgtaagctaataaatgtcgaggcaggattgtaggaacaccattgatcatttggctcgctggtgacctggtgacgtatggtgtaattagtagttgtttgcctcctggagcttgctggcttctgtaatggtattttcgtaacgaaaatggcgggaaagtacgggggccgctagtgctattgtgacgtta

SEQ ID NO: 11213 - DNA, 3468 bp, Zea Mays
cggcaacagggaggagagaagagtgaggaactgaggatagagatattttaagcgcccctcgatttccttcgccttgtcaactagccctcgctcatcgcatcgcacgcatcgcacagacactccactgcacgcgcagcaatggcgacgaccacctcgccgccgctgcagctcgccagcgcctcccgcccgcacgcctccgcctccggtggtggcggcggaggtggggttctcctcgctggcggttccggaggtggggtcgcgccaggttggggtcgagggcgattgcagcggcgggtgtcagcgcgcagcgtggcgagcgatcgggacgtgcaaggccccgtctcgcccgcggaagggcttccaagtgtgctaaactccatcggctcatctgccattgcatcaaacatcaagcaccatgcagagttcgctcccttgttctctccagatcacttttctcccctgaaagcttaccatgcgactgctaaaagtgtccttgatgcgctgctgataaactggaatgcgacatatgattattacaacaaaatgaatgtaaaacaagcatattacctgtccatggagtttttacagggaagggctctcacaaatgctattggcaatctagagattaccggtgaatatgcagaagcattaaaacaacttggacaaaacctggaggatgtcgctagccaggaaccagatgctgccctgggcaatggtggtttaggccgcctggcttcttgttttttggattctttagcaacattaaattatccagcatggggatatggacttcgctatgaatatggcctctttaagcagatcataacaaaggatggtcaggaggagattgctgagaattggcttgagatgggatatccttgggaggttgtaagaaatgatgtctcttatcctgtgaaattctatggtaaagtggtggaaggcactgatggtaggaagcactggattggaggagaaaatatcaaggctgtggcacatgatgtccctattcctggctacaaaactagaactaccaataatctgcgtctttggtcaacaactgtaccagcacaagattttgacttggcagcttttaattctggagatcataccaaggcatatgaagctcatctaaacgctaaaaagatatgccacatattgtatcctggggatgaatcactagaggggaaagttctccgcttgaagcaacaatatacattgtgttcagcctcactacaggacatcattgctcgttttgagagtagagctggcgagtctctcaactgggaggacttcccctccaaagttgcagtgcagatgaatgacactcatccaacactatgcattcctgagttaatgagaatactgatggatgttaagggattaagctggagtgaggcatggagtattacagaaagctctagagaagtggagcttggacataatgcagaaacttttacctcgacatgttgagataatagaaacaattgatgaagagctgataaacaacatagtctcaaagtatggaaccacagatactgaactgttgaaaaagaagctgaaagagatgaggattctggataatgttgaccttccagcttccatttcccaactatttgttaaacccaaagacaaaaaggaatctcctgctaaatcaaagcaaaagttacttgttaaatctttggagactattgttgatgttgaggagaaaactgagttggaagaggaggcggaggttctatcagagatagaggaggaaaaacttgaatctgaagaagtagaggcagaagaagagagttctgaggatgagttagatccatttgtaaagtctgatcctaagttaccaagagttgtccgaatggcaaacctctgtgttgttggtgggcattcagtaaatggtgtagctgaaattcacagtgaaattgtgaaacaggatgtgttcaacagcttctatgagatgtggccaactaaatttcagaataaaacaaatggagtgactcccaggcgttggatccggttttgtaatcctgcattaagtgcattaatttcaaagtggattggttctgatgactgggtgcttaatacagacaaactggcagaactgaagaagtttgctgataatgaagatctgcattcagagtggcgtgctgctaagaaggctaacaaaatgaaggttgtttctcttataagggagaagacaggatatattgtcagtccagatgcaatgtttgatgtgcaggtgaaaaggatacatgaatataagcggcagctgctaaatatccttggaattgtctaccgctacaagaagatgaaagaaatgagcacagaagaaagagcaaagagctttgttccaagggtatgcatattcggtgggaaagcatttgccacatatatacaggcaaaaaggatcgttaaatttattacagatgtggcagctaccgtgaaccatgattcagacattggagatttgttgaaggtcgtatttgttccagactataatgttagtgttgccgaggcgctaattcctgccagtgaattgtcacagcatatcagtactgctggaatggaagctagtgggaccagtaacatgaagtttgcaatgaacggttgcattcttattggaactttagatggtgcaaatgtggaaatcagagaggaggttggagaggaaaactttttcctttttggtgcagaggcacatgaaattgctggtttgcggaaagaaagagccgagggaaagtttgtgcctgacccaagatttgaggaggttaaggaatttgtccgcagtggtgtctttgggacttacagctatgatgaattgatgggttctttggaaggaaatgaaggttacggacgtgcagattatttccttgttggcaaggacttccccagctatattgaatgccaagaaaaagttgatgaggcgtaccgagatcagaagttatggacaaggatgtctatcctcaacacggctggctcatccaagttcagcagcgataggacgattcatgagtacgccaaggatatctgggatatcagccctgccatccttccctagaccaggtggatatcaggttctttcgcctatatttctgtgaaccctcaggatcaaggaacagttggtgacgacattaatttgcctcagccccttagcaggaagcgctggtcacctcagttttgtgtagacaaaatctaggcatcgataaatgatgggggactatgcatggtgttttggcagcactgttcagtaccttgccttctaaatctggtttttggtgtgtgtgtgtaagctaataaatgtcgaggcaggattgtaggaacaccattgatcatttggctcgctggtgacctggtgacgtatggtgtaattagtagttgtttgcctcctggagcttgctggcttctgtaatggtattttcgtaacgaaaatggcgggaaagtacgggggccgctagtgctattgtgacgtta

SEQ ID NO: 11214 - DNA, 3109 bp, Zea Mays
ggcacggcaacagggaggagagaagaggcttccaagtgtgctaaactccatcggctcatctgccattgcatcaaacatcaagcaccatgcagagttcgctcccttgttctctccagatcacttttctcccctgaaagcttaccatgcgactgctaaaagtgtccttgatgcgctgctgataaactggaatgcgacatatgattattacaacaaaatgaatgtaaaacaagcatattacctgtccatggagtttttacagggaagggctctcacaaatgctattggcaatctagagattaccggtgaatatgcagaagcattaaaacaacttggacaaaacctggaggatgtcgctagccaggaaccagatgctgccctgggcaatggtggtttaggccgcctggcttcttgttttttggattctttagcaacattaaattatccagcatggggatatggacttcgctatgaatatggcctctttaagcagatcataacaaaggatggtcaggaggagattgctgagaattggcttgagatgggatatccttgggaggttgtaagaaatgatgtctcttatcctgtgaaattctatggtaaagtggtggaaggcactgatggtaggaagcactggattggaggagaaaatatcaaggctgtggcacatgatgtccctattcctggctacaaaactagaactaccaataatctgcgtctttggtcaacaactgtaccagcacaagattttgacttggcagcttttaattctggagatcataccaagatatgccacatattgtatcctggggatgaatcactagaggggaaagttctccgcttgaagcaacaatatacattgtgttcagcctcactacaggacatcattgctcgttttgagagtagagctggcgagtctctcaactgggaggacttcccctccaaagttgcagtgcagatgaatgacactcatccaacactatgcattcctgagttaatgagaatactgatggatgttaagggattaagctggagtgaggcatggagtattacagaaagctctagagaagtggagcttggacataatgcagaaacttttacctcgacatgttgagataatagaaacaattgatgaagagctgataaacaacatagtctcaaagtatggaaccacagatactgaactgttgaaaaagaagctgaaagagatgaggattctggataatgttgaccttccagcttccatttcccaactatttgttaaacccaaagacaaaaaggaatctcctgctaaatcaaagcaaaagttacttgttaaatctttggagactattgttgatgttgaggagaaaactgagttggaagaggaggcggaggttctatcagagatagaggaggaaaaacttgaatctgaagaagtagaggcagaagaagagagttctgaggatgagttagatccatttgtaaagtctgatcctaagttaccaagagttgtccgaatggcaaacctctgtgttgttggtgggcattcagtaaatggtgtagctgaaattcacagtgaaattgtgaaacaggatgtgttcaacagcttctatgagatgtggccaactaaatttcagaataaaacaaatggagtgactcccaggcgttggatccggttttgtaatcctgcattaagtgcattaatttcaaagtggattggttctgatgactgggtgcttaatacagacaaactggcagaactgaagaagtttgctgataatgaagatctgcattcagagtggcgtgctgctaagaaggctaacaaaatgaaggttgtttctcttataagggagaagacaggatatattgtcagtccagatgcaatgtttgatgtgcaggtgaaaaggatacatgaatataagcggcagctgctaaatatccttggaattgtctaccgctacaagaagatgaaagaaatgagcacagaagaaagagcaaagagctttgttccaagggtatgcatattcggtgggaaagcatttgccacatatatacaggcaaaaaggatcgttaaatttattacagatgtggcagctaccgtgaaccatgattcagacattggagatttgttgaaggtcgtatttgttccagactataatgttagtgttgccgaggcgctaattcctgccagtgaattgtcacagcatatcagtactgctggaatggaagctagtgggaccagtaacatgaagtttgcaatgaacggttgcattcttattggaactttagatggtgcaaatgtggaaatcagagaggaggttggagaggaaaactttttcctttttggtgcagaggcacatgaaattgctggtttgcggaaagaaagagccgagggaaagtttgtgcctgacccaagatttgaggaggttaaggaatttgtccgcagtggtgtctttgggacttacagctatgatgaattgatgggttctttggaaggaaatgaaggttacggacgtgcagattatttccttgttggcaaggacttccccagctatattgaatgccaagaaaaagttgatgaggcgtaccgagatcagaagttatggacaaggatgtctatcctcaacacggctggctcatccaagttcagcagcgataggacgattcatgagtacgccaaggatatctgggatatcagccctgccatccttccctagaccaggtggatatcaggttctttcgcctatatttctgtgaaccctcaggatcaaggaacagttggtgacgacattaatttgcctcagccccttagcaggaagcgctggtcacctcagttttgtgtagacaaaatctaggcatcgataaatgatgggggactatgcatggtgttttggcagcactgttcagtaccttgccttctaaatctggtttttggtgtgtgtgtgtaagctaataaatgtcgaggcaggattgtaggaacaccattgatcatttggctcgctggtgacctggtgacgtatggtgtaattagtagttgtttgcctcctggagcttgctggcttctgtaatggtattttcgtaacgaaaatggcgggaaagtacgggggccgctagtgctattgtgacgtta

SEQ ID NO: 11215 - DNA, 3294 bp, Zea Mays
acggacacttcacgcaccttgcagttgcagcggcggtggcacggcaacagggaggagagaagaacactccactgcacgcgcagcaatggcgacgaccacctcgccgccgctgcagctcgccagcgcctcccgcccgcacgcctccgcctccggtggtggcggcggaggtggggttctcctcgctggcggttccggaggtggggtcgcgccaggttggggtcgagggcgattgcagcggcgggtgtcagcgcgcagcgtggcgagcgatcgggacgtgcaaggccccgtctcgcccgcggaagggcttccaagtgtgctaaactccatcggctcatctgccattgcatcaaacatcaagcaccatgcagagttcgctcccttgttctctccagatcacttttctcccctgaaagcttaccatgcgactgctaaaagtgtccttgatgcgctgctgataaactggaatgcgacatatgattattacaacaaaatgaatgtaaaacaagcatattacctgtccatggagtttttacagggaagggctctcacaaatgctattggcaatctagagattaccggtgaatatgcagaagcattaaaacaacttggacaaaacctggaggatgtcgctagccaggaaccagatgctgccctgggcaatggtggtttaggccgcctggcttcttgttttttggattctttagcaacattaaattatccagcatggggatatggacttcgctatgaatatggcctctttaagcagatcataacaaaggatggtcaggaggagattgctgagaattggcttgagatgggatatccttgggaggttgtaagaaatgatgtctcttatcctgtgaaattctatggtaaagtggtggaaggcactgatggtaggaagcactggattggaggagaaaatatcaaggctgtggcacatgatgtccctattcctggctacaaaactagaactaccaataatctgcgtctttggtcaacaactgtaccagcacaagattttgacttggcagcttttaattctggagatcataccaaggcatatgaagctcatctaaacgctaaaaagatatgccacatattgtatcctggggatgaatcactagaggggaaagttctccgcttgaagcaacaatatacattgtgttcagcctcactacaggacatcattgctcgttttgagagtagagctggcgagtctctcaactgggaggacttcccctccaaagttgcagtgcagatgaatgacactcatccaacactatgcattcctgagttaatgagaatactgatggatgttaagggattaagctggagtgaggcatggagtattacagaaagaaccgtggcatacactaaccatacagtgcttcctgaagctctagagaagtggagcttggacataatgcagaaacttttacctcgacatgttgagataatagaaacaattgatgaagagctgataaacaacatagtctcaaagtatggaaccacagatactgaactgttgaaaaagaagctgaaagagatgaggattctggataatgttgaccttccagcttccatttcccaactatttgttaaacccaaagacaaaaaggaatctcctgctaaatcaaagcaaaagttacttgttaaatctttggagactattgttgatgttgaggagaaaactgagttggaagaggaggcggaggttctatcagagatagaggaggaaaaacttgaatctgaagaagtagaggcagaagaagagagttctgaggatgagttagatccatttgtaaagtctgatcctaagttaccaagagttgtccgaatggcaaacctctgtgttgttggtgggcattcagtaaatggtgtagctgaaattcacagtgaaattgtgaaacaggatgtgttcaacagcttctatgagatgtggccaactaaatttcagaataaaacaaatggagtgactcccaggcgttggatccggttttgtaatcctgcattaagtgcattaatttcaaagtggattggttctgatgactgggtgcttaatacagacaaactggcagaactgaagaagtttgctgataatgaagatctgcattcagagtggcgtgctgctaagaaggctaacaaaatgaaggttgtttctcttataagggagaagacaggatatattgtcagtccagatgcaatgtttgatgtgcaggtgaaaaggatacatgaatataagcggcagctgctaaatatccttggaattgtctaccgctacaagaagatgaaagaaatgagcacagaagaaagagcaaagagctttgttccaagggtatgcatattcggtgggaaagcatttgccacatatatacaggcaaaaaggatcgttaaatttattacagatgtggcagctaccgtgaaccatgattcagacattggagatttgttgaaggtcgtatttgttccagactataatgttagtgttgccgaggcgctaattcctgccagtgaattgtcacagcatatcagatggtgcaaatgtggaaatcagagaggaggttggagaggaaaactttttcctttttggtgcagaggcacatgaaattgctggtttgcggaaagaaagagccgagggaaagtttgtgcctgacccaagatttgaggaggttaaggaatttgtccgcagtggtgtctttgggacttacagctatgatgaattgatgggttctttggaaggaaatgaaggttacggacgtgcagattatttccttgttggcaaggacttccccagctatattgaatgccaagaaaaagttgatgaggcgtaccgagatcagaagttatggacaaggatgtctatcctcaacacggctggctcatccaagttcagcagcgataggacgattcatgagtacgccaaggatatctgggatatcagccctgccatccttccctagaccagccccttagcaggaagcgctggtcacctcagttttgtgtagacaaaatctaggcatcgataaatgatgggggactatgcatggtgttttggcagcactgttcagtaccttgccttctaaatctggtttttggtgtgtgtgtgtaagctaataaatgtcgaggcaggattgtaggaacaccattgatcatttggctcgctggtgacctggtgacgtatggtgtaattagtagttgtttgcctcctggagcttgctggcttctgtaatggtattttcgtaacgaaaatggcgggaaagtacgggggccgctagtgctattgtgacgtta

SEQ ID NO: 11216 - DNA, 3309 bp, Zea Mays
acggacacttcacgcaccttgcagttgcagcggcggtggcacggcaacagggaggagagaagaacactccactgcacgcgcagcaatggcgacgaccacctcgccgccgctgcagctcgccagcgcctcccgcccgcacgcctccgcctccggtggtggcggcggaggtggggttctcctcgctggcggttccggaggtggggtcgcgccaggttggggtcgagggcgattgcagcggcgggtgtcagcgcgcagcgtggcgagcgatcgggacgtgcaaggccccgtctcgcccgcggaagggcttccaagtgtgctaaactccatcggctcatctgccattgcatcaaacatcaagcaccatgcagagttcgctcccttgttctctccagatcacttttctcccctgaaagcttaccatgcgactgctaaaagtgtccttgatgcgctgctgataaactggaatgcgacatatgattattacaacaaaatgaatgtaaaacaagcatattacctgtccatggagtttttacagggaagggctctcacaaatgctattggcaatctagagattaccggtgaatatgcagaagcattaaaacaacttggacaaaacctggaggatgtcgctagccaggaaccagatgctgccctgggcaatggtggtttaggccgcctggcttcttgttttttggattctttagcaacattaaattatccagcatggggatatggacttcgctatgaatatggcctctttaagcagatcataacaaaggatggtcaggaggagattgctgagaattggcttgagatgggatatccttgggaggttgtaagaaatgatgtctcttatcctgtgaaattctatggtaaagtggtggaaggcactgatggtaggaagcactggattggaggagaaaatatcaaggctgtggcacatgatgtccctattcctggctacaaaactagaactaccaataatctgcgtctttggtcaacaactgtaccagcacaagattttgacttggcagcttttaattctggagatcataccaaggcatatgaagctcatctaaacgctaaaaagatatgccacatattgtatcctggggatgaatcactagaggggaaagttctccgcttgaagcaacaatatacattgtgttcagcctcactacaggacttcccctccaaagttgcagtgcagatgaatgacactcatccaacactatgcattcctgagttaatgagaatactgatggatgttaagggattaagctggagtgaggcatggagtattacagaaagaaccgtggcatacactaaccatacagtgcttcctgaagctctagagaagtggagcttggacataatgcagaaacttttacctcgacatgttgagataatagaaacaattgatgaagagctgataaacaacatagtctcaaagtatggaaccacagatactgaactgttgaaaaagaagctgaaagagatgaggattctggataatgttgaccttccagcttccatttcccaactatttgttaaacccaaagacaaaaaggaatctcctgctaaatcaaagcaaaagttacttgttaaatctttggagactattgttgatgttgaggagaaaactgagttggaagaggaggcggaggttctatcagagatagaggaggaaaaacttgaatctgaagaagtagaggcagaagaagagagttctgaggatgagttagatccatttgtaaagtctgatcctaagttaccaagagttgtccgaatggcaaacctctgtgttgttggtgggcattcagtaaatggtgtagctgaaattcacagtgaaattgtgaaacaggatgtgttcaacagcttctatgagatgtggccaactaaatttcagaataaaacaaatggagtgactcccaggcgttggatccggttttgtaatcctgcattaagtgcattaatttcaaagtggattggttctgatgactgggtgcttaatacagacaaactggcagaactgaagaagtttgctgataatgaagatctgcattcagagtggcgtgctgctaagaaggctaacaaaatgaaggttgtttctcttataagggagaagacaggatatattgtcagtccagatgcaatgtttgatgtgcaggtgaaaaggatacatgaatataagcggcagctgctaaatatccttggaattgtctaccgctacaagaagatgaaagaaatgagcacagaagaaagagcaaagagctttgttccaagggtatgcatattcggtgggaaagcatttgccacatatatacaggcaaaaaggatcgttaaatttattacagatgtggcagctaccgtgaaccatgattcagacattggagatttgttgaaggtcgtatttgttccagactataatgttagtgttgccgaggcgctaattcctgccagtgaattgtcacagcatatcagtactgctggaatggaagctagtgggaccagtaacatgaagtttgcaatgaacggttgcattcttattggaactttagatggtgcaaatgtggaaatcagagaggaggttggagaggaaaactttttcctttttggtgcagaggcacatgaaattgctggtttgcggaaagaaagagccgagggaaagtttgtgcctgacccaagatttgaggaggttaaggaatttgtccgcagtggtgtctttgggacttacagctatgatgaattgatgggttctttggaaggaaatgaaggttacggacgtgcagattatttccttgttggcaaggacttccccagctatattgaatgccaagaaaaagttgatgaggcgtaccgagatcagaagttatggacaaggatgtctatcctcaacacggctggctcatccaagttcagcagcgataggacgattcatgagtacgccaaggatatctgggatatcagccctgccatccttccctagaccaggaagcgctggtcacctcagttttgtgtagacaaaatctaggcatcgataaatgatgggggactatgcatggtgttttggcagcactgttcagtaccttgccttctaaatctggtttttggtgtgtgtgtgtaagctaataaatgtcgaggcaggattgtaggaacaccattgatcatttggctcgctggtgacctggtgacgtatggtgtaattagtagttgtttgcctcctggagcttgctggcttctgtaatggtattttcgtaacgaaaatggcgggaaagtacgggggccgctagtgctattgtgacgtta

SEQ ID NO: 11217 - DNA, 147 bp, Zea Mays
agcctttgcccatgaaataaacaaacaaacaacagacaccacggttcaggataggcactccgatgtccgatcggaagtcgaaaccattggcgcaaactcgaggaactcggttcctccaaggctcgcagtgatgactggacctcgcgg

SEQ ID NO: 11218 - DNA, 1722 bp, Zea Mays
gagcactctgcacgctacgaatattgatgattcatagagagaaacagctaatacatataggccagactccttccgtatcccaaccgtctcatggaaacagtgtccggtggaataggaaggatatcatctgattagtgccttccaagttccaactatagacatgcacgtgagcaagaatggtggcatgcaagcctaaacaaggaaagtaataatcaatctaaatatagaaatccaacactttctactcagaacagtttctcctatcaaactttccattcctcttgataggacatgaaagtttaggcttaaagcagagaactagatcaaccttcaagcatcgccatggctgcgtcgacaagtgcaggccttgggctgttcgatgctccgccaaggacagtgtagccttcctcttgtcctcagcatcagcatcagcaccatgtctaatcaacagaagagcaacctggaacacaattgtaggagcaaaactagtaataatctctatcggtccgcatttggaatccgtccgtattgtggagttgtcccggtgtacgagcttcgccgctgatggcgctcgcgcgtctcgctcacgctttggtttagggttattacgatttacgagcgcgtttatcgattctaatcgttttggagaggacgaacagacggtttctgaatctggtggtggagaacctgaacgccgacttgtgttctctgctccgcctgaatctggcctgcggtcctgccatctcttctgttcatcagcagctgcagcctgcagctgaggccgcaatggcgcggtcagaagcagcaatatcctgacgaacgcggagagacaggccaacagaagtatttcagagttcggattcttgtgggggaaaaggcaattgacaattcactaattcacttacgcaaaagatggcagcaatatactattacagtgcacactgtacagtcaccatgacgcggccggcacagctaggagcctaggatggtccctccctcctgctcatcagtgctcactctaggtggtcatgcggccgtagcgacatgaacatggccgcgtagtgtctgagccgccggtccccgtcgtcgggcccgcccaccaacggcggcgccgccaggtccgccgacgtccgggccctgtacctgcgccacgcgagctggatgttgacggcggcccacgtccgccagttggacgagtagtaccgcgccgtgcgcttgagcttctcgttggcgaagttgtaccggaagtgctcggtgatgaaccgcaggtccggcgcgccgaggcagaacgcctgcgccgcttccacgcactcgaacgtggccgacgacgcggggagccggtccacgaaggggcggcgcaggcaccacgacagcagctcgtcgcccaggaagctgcccgcgcccagcatgcacgtcgccaccacgcctttggtcagcggctgcgtgctccggagcttgccctgcaggatgaacaccatgcgctgcacggggtcgccctcccggatcaccttctccccgctggacaacaccagaggccgcagccggtcgcagatgttgtccaggatcaggtcgtccatgccatggaacagtggaacctggcaagttaatttttttttagcaatctcatggctcattcatcatgtaaaaaaacattgaacatttactaaaagctcttgattttacctgcttaactagctcaaggcacaggtagcgcttgatgtc

SEQ ID NO: 11219 - DNA, 1100 bp, Zea Mays
ccgcgatgaaaccggcgcggtacaccgcctgggcgccccatgtgccccgcgcccccgcccccgcgcctttaattaggccgcacccggcgccccactgccggccccagatcactggcagtcgcaagtagcaacccgcatcacgagttcacccacgctccccgcacaggcacagctcactagcgaccagggagttcaaacaagaggcaacgagaacgaacgccaccaccgcgctccggtcgctttgcttggttcgggccactgcaccgccattgttgatctgttctccttctccttggaggagaaagaagaggggagaggaatgatggggcggacgagcgtggcggcggcggcggcggccctgctggtgctggcggcgtgcgcggctctgccggcgaggacggcggcgaacaagatcagcatcaactggaagcccaacgtgaactacaccgactggctgaagcagcacagccccttctacaaggacgactggctgggtggacgaggtgggctacaacaagtgcgactccaccaacgccatctacaactacagcaaggggcgcagcttcgccttccagctcaacgagaccaagacctactacttcatctgcagctacggctactgcttcggcgggatgcgcctcgccatcaaggccgagaagttgccgccgccgtcgccgccgccgtccgccagcgaccgctccgccgccgccatcgccgccttcgccaggtcccacgcgcccgtcatctacgccgccgtcgccgtgctcgccgcgctgctcaggatggtctagctgggaagaatctacccgccggcccctttgttggttcgaattgggactcctttttttttttgttcgttcatcctctccatcttttccgtagtgtgcttgggctctcgagaggagcagtagctggtgctggagtgctgcgttgggttcattaattaattagcggtgtggatttgccgaagcgattgattgagctgagattgatttttcaagtgtgaagaactctagctgccttgctgaattaaagtaactccagccttttcgtctacgagtaaaagtgattggagattaaaaaaacctattgtatctttt

SEQ ID NO: 11220 - DNA, 2429 bp, Zea Mays
aaagcagaggcatcaaccatcaacacacgctatagggtcctcctcccgctgctatttctctaatcgcatgcacatcacgttctcgtgtggaggagggcgtgctgcctcgctcgcacttgttgccattgcggatcgccagtagctaggcggaggcagcagctgaggattaagcagccaggttgcttaattattctgcccgcttcagaattgccgcccgtgatgagtcgtccgtcatccgtgaccttcgataaaagcaggagactttcttcgtcttagcattatccgccgagaaatagaggttagagcgagagcgggagacagttggaggccggccatccattgctggatccatctgttgtccaaggctgctgattaattctgcgacgagggtgcaacttgctttccttggtggcagcagatccagctccaggtgcgtacgtgcgtagcgccgtagcctcgctactagccactagccagcgcgcgctaagcagccgggcatccatgggttcttgcgtgtcggtgtcgtcgacgaggcaccggcggcggcggtcgaggaagctgtcggtcgcggcgaggaagttccggcggaagctgtccacggcgatcgccgccgacgcgccgatcgtccgcggcgccggcagcgcggcgacctgcctcgcccggcacggggtcgtccacgtggaggcgccggactccaacgtcaccctgcgcctcaccaagctgcagtggcagcacagccagatggacgccgggagcgtggtttgcgaagaagcgtggtacgattctgtcagcatcctggagtcgccggactccgacgacgatctcgacaacgatttcgctagcgtcagcggaggtaatgctaccctctccctgatgtcaccggcggctcggacgcaccgcagtgcaaggaggcagcgtgcttcttggacaccatgcagctcctcaggagcatcgcaaacgcagaagcatacgaccaaagtgaacaacctgctgacaagagtgacgacgacgactcgaacgtcgctgccactgcaactaataatagcggtagctgcaataatgacgagggctgctgcagtagtacactgaaggagcttcaggctgcaatgtcgccgcggccgttcccggcgtcggttccgagcaacaaggtccagccgatgccggtcgttggtgtcagcccggtcccgcccccgcaccagcagcagcagcagcagaagaagaaaacggccgtggtcaggctctcgttcaggcgaaggtcatatgagggcgacgagatgaccgaaatgagtggttctgcgaattatctgtaccgcccaagggcaggtttcacggtgccgtgttcgaccggcgagaaactgccacaaggttgctggtcggttcttgagccatcgacgttcagagtccgaggggagagcttcttcaaagacaagaggaagtacccagctccaggctgctccccttacacccccatcggagtggacatgttcgcctacacgaggaagattcaccacattgcgcagcacctctcgcttccgtctctgaagacacacgagacatttcctaccctgctcatcgtcaacattcagttgcccacctaccctgctacagtgtttggcgataacgacggcgatgggataagcctagttctgtatttcaagttatctgacagttttgacaaggagatttctcctcagttgcaggacagcataaagaggctcatgaacgaggaaacggaaaaggtgaaggggttcccagtagacagcattgtgccctacaccgagaggctgaaaatcctggctggtttggcgaaccctgaggacctgcaactgagcaccgcagagaggaagcttgtgcagacctacaatatgaagcctgtgctatctcgcccacaacacaaattctacaagggttcaaactactttgagatcgatctggatgtccatcggttcagcttcatatcacggaaagggctcgagaccttccaggagcggctcaagcatggcgttcttgatcttggtctaactatccaggcacagaaggctgaggagttgccagagcatgtcctgtgctgcatgaggctgaacaagatcgacttcgccaacaacgggcagataccgacgctgataactgcagctgatgagtaaatctgtcctgttactgtaaggcgctaactttctggaaaagcaaaagagactgttgcttttcgagatgctgttgtatagatcggcagatagttgtagggactaactcaagtttgtgagctaagaaacacctaatcactgaggagggaaaagaagatattgcagcaatctgcattctgaactctgaagacgatgtgtatacatgtctgtgttttctttttctttttttgaaacgaaatacatgtctgtatttccagttcaggcttactaatgttgcaggtacatcac

SEQ ID NO: 11221 - DNA, 2452 bp, Zea Mays
gccgtgcctttgcggagcagaaaagcagaggcatcaaccatcaacacacgctatagggtcctcctcccgctgctatttctctaatcgcatgcacatcacgttctcgtgtggaggagggcgtgctgcctcgctcgcacttgttgccattgcggatcgccagtagctaggcggaggcagcagctgaggattaagcagccaggttgcttaattattctgcccgcttcagaattgccgcccgtgatgagtcgtccgtcatccgtgaccttcgataaaagcaggagactttcttcgtcttagcattatccgccgagaaatagaggttagagcgagagcgggagacagttggaggccggccatccattgctggatccatctgttgtccaaggctgctgattaattctgcgacgagggtgcaacttgctttccttggtggcagcagatccagctccaggtgcgtacgtgcgtagcgccgtagcctcgctactagccactagccagcgcgcgctaagcagccgggcatccatgggttcttgcgtgtcggtgtcgtcgacgaggcaccggcggcggcggtcgaggaagctgtcggtcgcggcgaggaagttccggcggaagctgtccacggcgatcgccgccgacgcgccgatcgtccgcggcgccggcagcgcggcgacctgcctcgcccggcacggggtcgtccacgtggaggcgccggactccaacgtcaccctgcgcctcaccaagctgcagtggcagcacagccagatggacgccgggagcgtggtttgcgaagaagcgtggtacgattctgtcagcatcctggagtcgccggactccgacgacgatctcgacaacgatttcgctagcgtcagcggagaccctctccctgatgtcaccggcggctcggacgcaccgcagtgcaaggaggcagcgtgcttcttggacaccatgcagctcctcaggagcatcgcaaacgcagaagcatacgaccaaagtgaacaacctgctgacaagagtgacgacgacgactcgaacgtcgctgccactgcaactaataatagcggtagctgcaataatgacgagggctgctgcagtagtacactgaaggagcttcaggctgcaatgtcgccgcggccgttcccggcgtcggttccgagcaacaaggtccagccgatgccggtcgttggtgtcagcccggtcccgcccccgcaccagcagcagcagcagcagaagaagaaaacggccgtggtcaggctctcgttcaggcgaaggtcatatgagggcgacgagatgaccgaaatgagtggttctgcgaattatctgtaccgcccaagggcaggtttcacggtgccgtgttcgaccggcgagaaactgccacaaggttgctggtcggttcttgagccatcgacgttcagagtccgaggggagagcttcttcaagtacgaagcgagacaagaggaagtacccagctccaggctgctccccttacacccccatcggagtggacatgttcgcctacacgaggaagattcaccacattgcgcagcacctctcgcttccgtctctgaagacacacgagacatttcctaccctgctcatcgtcaacattcagttgcccacctaccctgctacagtgtttggcgataacgacggcgatgggataagcctagttctgtatttcaagttatctgacagttttgacaaggagatttctcctcagttgcaggacagcataaagaggctcatgaacgaggaaacggaaaaggtgaaggggttcccagtagacagcattgtgccctacaccgagaggctgaaaatcctggctggtttggcgaaccctgaggacctgcaactgagcaccgcagagaggaagcttgtgcagacctacaatatgaagcctgtgctatctcgcccacaacacaaattctacaagggttcaaactactttgagatcgatctggatgtccatcggttcagcttcatatcacggaaagggctcgagaccttccaggagcggctcaagcatggcgttcttgatcttggtctaactatccaggcacagaaggctgaggagttgccagagcatgtcctgtgctgcatgaggctgaacaagatcgacttcgccaacaacgggcagataccgacgctgataactgcagctgatgagtaaatctgtcctgttactgtaaggcgctaactttctggaaaagcaaaagagactgttgcttttcgagatgctgttgtatagatcggcagatagttgtagggactaactcaagtttgtgagctaagaaacacctaatcactgaggagggaaaagaagatattgcagcaatctgcattctgaactctgaagacgatgtgtatacatgtctgtgttttctttttctttttttgaaacgaaatacatgtctgtatttccagttcaggcttactaatgttgcaggtacatcac

SEQ ID NO: 11222 - DNA, 2471 bp, Zea Mays
ctcccccgtccgtctccgatgattcatatgccgtgcctttgcggagcagaaaagcagaggcatcaaccatcaacacacgctatagggtcctcctcccgctgctatttctctaatcgcatgcacatcacgttctcgtgtggaggagggcgtgctgcctcgctcgcacttgttgccattgcggatcgccagtagctaggcggaggcagcagctgaggattaagcagccaggttgcttaattattctgcccgcttcagaattgccgcccgtgatgagtcgtccgtcatccgtgaccttcgataaaagcaggagactttcttcgtcttagcattatccgccgagaaatagaggttagagcgagagcgggagacagttggaggccggccatccattgctggatccatctgttgtccaaggctgctgattaattctgcgacgagggtgcaacttgctttccttggtggcagcagatccagctccaggtgcgtacgtgcgtagcgccgtagcctcgctactagccactagccagcgcgcgctaagcagccgggcatccatgggttcttgcgtgtcggtgtcgtcgacgaggcaccggcggcggcggtcgaggaagctgtcggtcgcggcgaggaagttccggcggaagctgtccacggcgatcgccgccgacgcgccgatcgtccgcggcgccggcagcgcggcgacctgcctcgcccggcacggggtcgtccacgtggaggcgccggactccaacgtcaccctgcgcctcaccaagctgcagtggcagcacagccagatggacgccgggagcgtggtttgcgaagaagcgtggtacgattctgtcagcatcctggagtcgccggactccgacgacgatctcgacaacgatttcgctagcgtcagcggagaccctctccctgatgtcaccggcggctcggacgcaccgcagtgcaaggaggcagcgtgcttcttggacaccatgcagctcctcaggagcatcgcaaacgcagaagcatacgaccaaagtgaacaacctgctgacaagagtgacgacgacgactcgaacgtcgctgccactgcaactaataatagcggtagctgcaataatgacgagggctgctgcagtagtacactgaaggagcttcaggctgcaatgtcgccgcggccgttcccggcgtcggttccgagcaacaaggtccagccgatgccggtcgttggtgtcagcccggtcccgcccccgcaccagcagcagcagcagcagaagaagaaaacggccgtggtcaggctctcgttcaggcgaaggtcatatgagggcgacgagatgaccgaaatgagtggttctgcgaattatctgtaccgcccaagggcaggtttcacggtgccgtgttcgaccggcgagaaactgccacaaggttgctggtcggttcttgagccatcgacgttcagagtccgaggggagagcttcttcaaagacaagaggaagtacccagctccaggctgctccccttacacccccatcggagtggacatgttcgcctacacgaggaagattcaccacattgcgcagcacctctcgcttccgtctctgaagacacacgagacatttcctaccctgctcatcgtcaacattcagttgcccacctaccctgctacagtgtttggcgataacgacggcgatgggataagcctagttctgtatttcaagttatctgacagttttgacaaggagatttctcctcagttgcaggacagcataaagaggctcatgaacgaggaaacggaaaaggtgaaggggttcccagtagacagcattgtgccctacaccgagaggctgaaaatcctggctggtttggcgaaccctgaggacctgcaactgagcaccgcagagaggaagcttgtgcagacctacaatatgaagcctgtgctatctcgcccacaacacaaattctacaagggttcaaactactttgagatcgatctggatgtccatcggttcagcttcatatcacggaaagggctcgagaccttccaggagcggctcaagcatggcgttcttgatcttggtctaactatccaggcacagaaggctgaggagttgccagagcatgtcctgtgctgcatgaggctgaacaagatcgacttcgccaacaacgggcagataccgacgctgataactgcagctgatgagtaaatctgtcctgttactgtaaggcgctaactttctggaaaagcaaaagagactgttgcttttcgagatgctgttgtatagatcggcagatagttgtagggactaactcaagtttgtgagctaagaaacacctaatcactgaggagggaaaagaagatattgcagcaatctgcattctgaactctgaagacgatgtgtatacatgtctgtgttttctttttctttttttgaaacgaaatacatgtctgtatttccagttcaggcttactaatgttgcaggtacatcac

SEQ ID NO: 11223 - DNA, 1267 bp, Zea Mays
gcaatactgcctagctcagaggttatcctgaggaaagatggcttctacctgcaagaatactttcattgagagcatggtgggatcttactgcaaagctccctgtgatgctcttttcatcctaaggaacagaaaaaatcctaaggatggaagtacttaaatcgagacttgggttaggaacaggtgatgttctacccaggttgattaaggattggatgcgtatgtaggcctgctagcgcaaggactatcttagctagccgcataccctggaaatgggacagggtaagctttgcctcgggcagactaaggccagaataagataacacgaaatgggcgtggagcggtggcgagagtagcgtgtaccctccgtggcaagaggctggacggtggtgtatctgtgctctcggtttgcgtgaacctgatctggtcttaagaaccctggggtcgagttgacatatgcaaggattaagtgctacatatgttgtgtggttagagatcctcagctgagtaaatcgattcggatcgccgttatatccccggagagtggagacttgatcactgacctacaacctaagtcaggatgtgaacttcatgaataaaaatgatgttgtattgatgagatgatgaaattagactagaggcaaacatagtctattaatatttaatctggcgttaaaatgttgaaagtaaggactcactttagtaagctatttctgcaaaagtatctaagttgattcttgctaaagcctctccttgattcctatttatccagcatacccttgagagtctttttcttagtcgggtgagacttgctgagtaattccatactcagggttttattccctgttatttttcaggtcatagctttgtgctgctgatgatggtgttaagtgccggtgggctcggccttcttattagtctaagtaacccttctatacttcttactgaggatggtcacttgagctagcatatatttcaaatttatacttttgtaatcacttcgataaaataatgtaaaatttttgtaacctgtaaaatttggtaataaggtttccgctgcaaaaatgtgatgtgtgtgatttgtgttacttaatcccgcggttctggttgtaagtggtttatccgatgtccttggggcaatcagacggatcctgttaagttatctggtgcacatgcatgtcgtctgaggtctttgacgaggacaagtgcatgtgggcccaataacttgggaggttctgccacagtttgtaaggagcaccttaaggtttcc

SEQ ID NO: 11224 - DNA, 405 bp, Zea Mays
taagctccagccatagtccactatgtgggcgtggggatcctggggttttgctgatgttaaccttccccacagctacctagtttgcttcagccagcgagtgcatcatgtgaccatggtgaccatgcaacccgagtgctcttctcaccgtggctaggtcatagctttgtgctgctgatgatggtgttaagtgccggtgggctcggccttcttattagtctaagtaacccttctatacttcttactgaggatggtcacttgagctagcatatatttcaaatttatacttttgtaatcacttcgataaaataatgtaaaatttttgtaacctgtaaaatttggtaataaggtttccgctgcaaaaatgtgatgtgtgtgatttgtgttacttaatcccgcggttctggt

SEQ ID NO: 11225 - DNA, 2038 bp, Zea Mays
taagctccagccatagtccactatgtgggcgtggggatcctggggttttgctgatgttaaccttccccacagctacctagtttgcttcagccagcgagtgcatcatgtgaccatggtgaccatgcaacccgagtgctcttctcaccgtggctaggtaatttcaaggtttccttagccaagctatacatgttttgtgctctacataagatagagaagctcatatgatggtgaacaaatctccttaagatagttttgttgcatgttatatgaaaattggagtaaaagtgggtctacattagggttatcagatttcagacttagtgcaaattcagagtctgaatttgtatgttttggtgcagctttggagctctttgctgctctatccataaatttatagcttatgaccactataacaaagttgtagatctgttgttggagtacaagtttgattaagcgatctgatccaaaaactatatagaactgagagtaaagcttgctcaaaagtggatcatcaacttctgggtttcagacttagctaattggctaattctgaatttcagtaaactttagccatgtttgtacctttgtagtggctaacctgtagggaattaaattaggtctcttatagcaaagcaatagagctataatagaagaccaggtttggttgaaggccataccctagaagctatttggaattggagaaaagggttggctaaagttggaccgtcagactgtacataactgaattttgttattcagttctgagaactgaattacagcaggatgcctagtttggaattcatttgtgactgattcgtggggttttggattaaagtttccatagcaaatctagagaccatagtaaagagagtaagttttgtaaagtgaggtggacttggttccacataaatttggaaataaaagtggccaaaaggtggactgtcagatgttaggattcagacttagaataatatttaagtctgaatttgtgtgtttttattcagttttgggtccttgtggtaattaatccaagaaaaattggggtaagaatgctatagcaaagtgaaagaccatgtaaaggagagcaagtctcatgcaaagcgttggcttgctattgtgcagaatttggagaaaaaggagtgacaaaactctctgtcagacctagtaatgtgctgtttcagattgggaaaatggattttccatgtgtttactcaactttaatgcagcctaacgcttggtatgtatggttataagctaaagaccatatagaagagatttgtagctgtgttgggtgaacaagtttcttatagagaaataagtttggtgctgtctgtaagccatttgctcagaaatccttgtagagtccctaattggaataataagaagaacataatcacatgtggattagaaattttggaaaaaaaagaacaagtttaacaagtgaaacctgatctttggataaagaagcaaaagtgcctagtgggatctagatttttggcgtagtttgaagattgttctaatcctctagaagttcaagttgtaggattcaaatcagaaaagtaagtccttacttaaggcaagcatagagttcttggttatggacgcagagttccctagtatggtttgagagcttagtgatgatattagaatatttagctcccctgttgtttggttagttttgtgtgcacctttagtaaggtgtagtttgtactgctttaaagtatcttctttgtagttgcacaagtatatgcattcatgttcatatcattacatgtagaattcccagaagaagaagaagatgaaattcaagaagtggtttctgaagaggagtctgcttcagtgactgctcatcaagtgatgggagccatctaactggggtttaatagagggatctagaactccgtctttgcaacgaaggcaagccccggtgcatgcaaccccttccttgtgttttaaatacttttcgcacacttaagtctagtgaaatgtgcattaggtttataggagttgcttgaaaccctttgatgcattgccttcc

SEQ ID NO: 11226 - DNA, 415 bp, Zea Mays
taagctccagccatagtccactatgtgggcgtggggatcctggggttttgctgatgttaaccttccccacagctacctagtttgcttcagccagcgagtgcatcatgtgaccatggtgaccatgcaacccgagtgctcttctcaccgtggctagaattcccagaagaagaagaagatgaaattcaagaagtggtttctgaagaggagtctgcttcagtgactgctcatcaagtgatgggagccatctaactggggtttaatagagggatctagaactccgtctttgcaacgaaggcaagccccggtgcatgcaaccccttccttgtgttttaaatacttttcgcacacttaagtctagtgaaatgtgcattaggtttataggagttgcttgaaaccctttgatgcattgccttcc

SEQ ID NO: 11227 - DNA, 2081 bp, Zea Mays
aacagcaaagcccaggctgcccagcacacgcgacgcgaaccagctggcgaggaaccctagcggagcactgtgcaggcgaccgcggcgcgctatcacttacggggggatacggcggcatcgtccccctcggcccctcctccatccctggtgcggcggcgccagcctgcaggtgttgaatgctgatttgttgtggctgattaatcgggttgatcgtcgattaatcgtgattagtcggctgatcgcccttctggcgatcagaaacgataaggcaatctgaaaacattggccgccaaacctccagagcgactcccgcgagccgtgaccaccatagctaaatcaacgcaccagaagctttcacggagctgtctcgtccacgagtgttccagctgactcctattccctgcgtcaatggcgagctctggcaatgaagggcgtgtggtggtggaccttggctccgcggcggagtcggtggctgctgacgaggaggcgcacgccacgcctctccacgagattgagtccctttgcatgcgctgcggcgagaacggcatcacgaggcttttgctgacgttgatcccgcacttccgggaggtggttctgatggccttcgagtgcccacattgtggtgagaggaacaacgagattcagtttgctggacaactccaacccaagggatgctgctacagcttggaggttccgttggggcagagtgagatgctgaatcgtcaggtcgtgaagtctgattcagcgactatcaagattccagagctcgactttgagatccctccagaagctcaacgtggaacactttctactgtggaagggattattatgcgagctgtggatgagctgcaggctcttcaagatgaacggaagaaggccgaagctatcgatcaatttttactgaagttgagatctcttgggtcaggagaggctgcattcacttttattcttgatgatcctgcaggaaacagctttattgagaatccgcatgctccgttattagatcctttactatctgtgagattctacgaaagaactcgtgaacaacaagcagcacttggctttcttgctgaaccaccaaaagaacaacctggagaggctgtattgcctgcttcagcagtggaatccaattctgatgggttgcaaagcgtgccccatggctcagttggagctgttgcaggtcgtcgtgctatagctcagggaaaccctgatgaagttgctgcagcattgtgtagatattcagcaccagaagaggttgatactttaccatcaacatgtggagcctgtggaacagaatgcgtcacacgtttctttgctacaaaaatcccatatttccgggaggtgattgttatggcaacaacatgtgacatgtgtggttatcgcaattcagagctgaagcctgggggtgaaattccagctaagggaaagaaaattacactgcgtgttcaaaatgcacaagaccttactcgtgatgtcataaagtcagattcagctagcgtaaaagtacctgaacttgagttggaactttcatgtggaacgttgggtggtatggtcacaactgttgaaggtttaattgtgaaaatatgtgaggctctggagagaatacatggatttcaattaggcgatagtacactggaatggaaaaagaagaaatgggatgacttcaaggagagactatccaagcttctgagtttacaagaagcctggactctaataattgatgatggattggcggcttcatttgtggccccggctactgattcgttagaagatgacagccaactaaccattgaagagtatcagaggagttgggagcagaacgaggaacttggtctgaatgacatggatacgtcctctgcagacgcggcttacaacacgaccaacacataatttttttagttttgttgtgccgaatgtatttgttacgctatcagtttactttgatgaactttcagtgtgtatactaatatcaacaacttatatttcctctgacgataaacatcgagcgaacgtgcgaggcgcaaacccgatttgctgtcacccgtgcaggtccatgaattgccaacgttggttcggaggca

SEQ ID NO: 11228 - DNA, 570 bp, Zea Mays
aaacctcagaaagcgagaaaaagggcaaagattccggtgctcggctcgacccaaaaaatggccgcgtcgccggagtactctgcgcggcgcggcgcggcggcgaagtccggtcaagaggacgaagtcactagactacttgcctcaggagctgacgcgacccacagcccacttcgatgctgacggattgacgccgctcatgcacgcggccgcggggggcacgccgtcgttgcgcttgcgcgcctcctcctcctcgactgcggtgcgccctggaacgcgctcttcccctcgggcctctcagcaggggacctagcccccgactctgacacctacgacctcctcctagaccacgccctccgctccgagctcgtccttggcagttggcaccgtcgtgtggtgcggcggcaagcggcccccgggaacgcccggacggtcctccggctgagagctgttacaaagttaggcatttttagttttaatttaatccagaaaaacagtgcgatatatgtgatgacatgtatgtgcatgtgtgtataactactcgcataaccagtaaacagcaatgaaacatgc

SEQ ID NO: 11229 - DNA, 1071 bp, Zea Mays
aattccaaccatcgttttaaatgctcaaggaatgtggtgtcccttttcatagatcaagtgctcagggcagtacaagtttcaatatactggttggcagtttgacccttttcatgtagtagtattgtagtagtgacttgtgcctgaacaagttggcagtatggcacgaagtcctcaagttcagaacatggacacttgtgactacaccggtccttgaaggattcttgtgctgaagttcgagtcttaaaatacacatgtagttcattgctgaaatacgagtcttaaaataaatgctgaaactcttgatacatggaccatatgtagttcattgcttttggaggactcaagttcgagtcttaaaatacaaaaagtttcccggtgagataaaatatcagcagttcagcattttggccatcaggtgtttgacaattgatagtcgtaatggtcgagtgggacgacaaaaacacagccatggtttggttaggcatccattcatcctttagggtcgatttggcgacaaggggatcacggagggattagaggggattgagggggaaatgactaattttctcctcaatcccctccaatccttctatgatcctgggtcaccaaagcaatccttaactgggaacatttattcataaagcctaaatgataactgatattctcagcagctggagtggcacatgaaccatgaagagtatatcagcaacagaaactcagatatagaataatactccctccattccaaaatatagttctttttagccttcttttttcgtccacatttgaataaatgataatgaacatggacatacatataatttataaactacattcatagattaattaatgaatgcatatttaatctaaatgaattatattttgggcgggggagtaaataatactgcaaattaaagaatgaagaaataagagcagatattttgagcatctacccatcccatattaaccacgtgtatccatatagatgacaggagtaagcattcataccaatggagaagtgaagggtcaatcaaacaaaggttcttgagcgaggatcttcattttctcgac

SEQ ID NO: 11230 - DNA, 2581 bp, Zea Mays
ctaatgtctatctctctctctctccacccggctcctcactcacgcagtcacgccttcccgtccgatcgatgccgctgaagcagcggtccatctgttcccctttgtcctgttgcaatcattcgaggccccgttctcgattctataaaaccactgccccgatctacctctctcacacgctcaattccactgccaagattcgccactccgtccgttaccttcactcgctcactcacaatgcggcgccatggcgaggtacgcgtgatcttagctatggccgccgccgccgccgccgcgctcttggcgtcggcggccgtggccggacgagacggccggcagacctacatcgtccacatgtcccattccgccatgccggacgagttcgcggagcatgaggaatggtacgccgcgtcgcttcaggcggtgtcggatgccgccaccgtgctgtacacctacagcaccctcctccacggctactcggcgcggctgacgcgcgcggaggccgcggcgctggagtcgcagccaggggtgatcgtcgtcaacccggaggtgcggtacgagctgcacaccacccggacgcccgagttcctggggctggacggcacggacgcgctgttcccgcagtcgggcaccgggaccgacgtcgtcgtcggggtgctcgacaccggcgtctggccggagaggccgagctacgacgacaccgggttcggccccgtgcctgcgggctggaagggcaagtgcgaggacggcaacgacttcaacgcctccgcgtgcaacaagaagctcatcggcgcgaggttcttcctgacgggctatgaggcggccaagggccccgtggacacgtccaaggaatcccggtcgccgagggacaacgacggccacgggacgcacacgtccagcaccgcggcgggcggcgccgtccagggcgccgacctgctcggctacgctgccggcacggccaagggcatggcgccccgcgcccgcgtcgccacgtacaaggtgtgctgggtcggcgggtgcttcagctccgacatcctcaaggccatggaggtcgccgtgacggacggcgtcgacgtgctctcgctctcccttggcggcggcacggcggagtactaccgcgacagcatcgcggtgggcgctttcagcgccatggagaaggggatcttcgtgtcctgctccgcgggcaatgccggcccgggcgccgcgacgctgtccaacggcgcgccgtggatcaccaccgtgggcgccgggaccatcgaccgcgacttccccgcctacgtcacgctcggcaacggcaagaactacacgggggtgtccctgtacagcggcaagccgttgcccaccacgccgatgcccttcatctacgcggggaacgcgtccaacagcagcatgggccagctctgcatgtccggcagcctgatcccggagaaggtggccggcaagatcgtcctttgcgaccgcggcaccaatgccagggtccagaagggcttcgtcgtcaaagacgccggcggcgccggcatggttctcgccaacaccgccgccaacggcgaggagctcgtcgccgacgcgcacgttctcccgggctccggcgtgggggagaaagccggcaacgccatgagggactacgccatgtcggatccgaaagcgacggccaccatcgtgttcgccgggacgaaggtcggcgtcaagccgtctcccgtcgtcgcggcattctcctcccggggccccaacactgtgacgtcgagcgtcctgaagccggacatcatcgcgcccggcgtgaacgccgctggacgtgggcgccggccacgtcgaccccgcgaaggccgtcgacccggggctggtgtacgacatcgcggcggcggactacgtggacttcctctgcgccaacaactacgaggcggcgcagatcgcggcgctcaccaggcagcacgcgtccgaggggtgcagcgccaaccgcacctacgcggtgaccgcgctcaactacccgtccttctccgtggcgttcccggccgccggcggcacggcgaagcacacccgcacggtaaccaacgtcgggcagcccgggacgtacaaggtggccgcgagcgccgccgccggcggcaccccggtgacggtgaccgtggagccgtcgacgctgagcttcagcagggccggcgagaagcagagctacacggtgagcttcacggcgggcgggatgccgtcgggcaccaacgggttcgggcggctcgtctggtccagcgaccaccacgtggtcgccagcccgatcgcggcgacgtggacctaatggctagcggcggccgtaccgtagcaatagcgagataaaatcccgattgggggacggcaatggcgagcgcgcgccattctcgaatgcgagagagatggcggatatcgtcgaggatgtgctgttgtattgtgtgcatgagtccgctccggtgtgtaagctgccggtgtagtgtaatctatctgtagctgacccgattgtagcgatgcagcaattaaatctcaaaagggttgcagacttgagcacttcttcgaaaatgatccgaatttgaacatggataatgaatggctctggcgtattggg

SEQ ID NO: 11231 - DNA, 2266 bp, Zea Mays
atgaaacagctagcttttgcttattatatttattgttttgcacattgtcacacccgggttctaggggcaccaaaacccgggcgtaaaaataatcaccaagtatgctgggatcaagcctcacacatatgatggctcatgctacagaaacgaatgtcacatctttactataggagttctatacaaaataaataaataaatacatcatacgaatacatcgatccagcaaccatagttgactgggagacgatggtctagaccactcatgaactcatcacaacatccttcatgcgcatcatcctgcggtacctgttcttgacctggggggatgtgagtacagcgagggtaagctcacatatgttcatcgctcaacaagttgtggggaataatgtgcatgaacacaccaaaggtgggagctcatgtgaagtgtaaggcttaccaaagaagatggttaaagctgagcattgcttttagagttggtcaaaattttattagcagttactaagtataagtagataccaatccaaataagtaagagattaaaattaataacaatacccatgatgcaatgcgaatgacaaattaagtttagtttcataaattactcatgtgagggtccgagctgctcataaccttgagcacgtctgatatactagttttacactctacagaggttgcgcatctttacccacaagtcgtgttacccatttgacaagggatcacgacttcccattcatctctaccgaggagacgaggcagggtaccactacgaagcctttacaaagttccactagcttccgaaaacccgctacggtttctgagaagggcaatataggaattcctcatccgaaaagccattgcagcatgatcgacccgagaacctccctgtacacagctcccctactgcccttgcccctttcgggtaagatagtcttccactagctttcctaattagttagccaaaggcgtctcataccacccttatggtagcactgttttcccgggtggtcgctccatgttccaattaacataataatcttatcatgaaaaataattaaaacaacagtataactagaacatgatcataatgtaacattaatttcccaaaaccaggtagagcaatagcaaaactacccaatagtgcttttgtttgcaaggtaggggataaaatgctagggaaacctattgggtcccatcaaattaacatgagcatgtcacaatgattaacatgaacattattaggtaaagaaaagtgattaagggcacaacttgtcttagactcgagattccaggtaccaagttagtcttcagattcccgtgacctcatcgctactcgtagcaaaacatacaaatagacaaagagtacataaaaataacaatacaccaatcatgagaacaaacagcgtaagaatcttctacgcgatgctacgagatcgtggattcgagaaccactaaattcggagttacagttgaaaagatatggttttatgaagttttaggtgattaatcaattaaattatattctatgttgattaatataaatcatgtgagaaaatattacaaataaataatcattttcatttttaacccaagttacaatcggattagagattatatcttggtcagttcataattatgggcatatttaactttgattagtatggttaatctactacatacatgttaaataaatatttaattataaaaatgtatgatatgataaagataacgttgtgatggagtaggtaatttcattccggaaccaacgcaatttaaacggattaaatcggagttaacatgatccaaatatgaattatccatgcttcttatatttggttttatactaaaaacagatttctctatttatttttacatttatacgacttttggaccgcgggtaccaattatccataacccagggggttaatgcgctaaaatttgtacttggtatcagttgtcttcgaactagaaaggatggcgggttaatttcctaaaactctagggaatctttatgaattttgccacgacgaagaggtacagatcgagctaagccgtagaatctaaattaaacgtcccagactagatcagagtcaggacaccacggcaacactcggatcgcaatccaccggtccaaacccaatactgaattgttatgcactcgtaatcgctagatcaaagatcaatggcatggatcacatcgcacgaaacggtattcataatctaattgcaaccattcctgtcgagatctacggttagtggccgagctact

SEQ ID NO: 11232 - DNA, 1181 bp, Zea Mays
cccacgctgccgcaactaccatctcgtgtgaaggaagcgctgtgcgcgagaaagctctccacaagacagcagcaagcgcaggacagcgacgagttgggtggaggcgctgacacaattcttgcgatgttgtgggattcggacagcgatgatgaagtgcacgtggttgaccatcctactgagcatcgtgctgctactcacgcagagaaaggaaagaccatggctgatgccaacgcatcttctagtggtgctgatgtggtgcttgatcgatatgggaaaccagtgaagctaaatggaccaattgatgtgacttggagccatggtgaaccatatcctggacctcatggggctggctttaagtgcttttattgttttaccaccaaaaaaggcggggggtgtctcgattaaaagagcatctaggtcacatactagggagtgtggaggcggggggtgtctagatttactatggtgctgtccttgagagttgcttcattatttgtgatgattgtcctattttttcatattttcatagctgattggtgggatcaatatggtggagactacccagaattacaagagtttgcacgtcgtattgtttctcaatgcatgtcctctagtggttgcgaacgtaattggagtacctttgctttggttcatacaaaattgaggaatcggttgagttatgataagttgcataaactagtttatgttcactacaacttgaagttgcgcattcaacattacgaaactgatatggaaagtcttgaacaaatgaaaaactctaaagataggaacatagatccatgtagcatcatgatagatgttgctatgtatgatgaaggcaacccgattatggaatggttgtgtagttctaggagtgaatcattgccgacacttgatgaaaatgatgagcctgaatcacctaacagaccaagtggattcgttttagaggagttaggaggattgaatgaagaagagatggttcttttaaattctaggattggttctcgtaggaaaaatgttaggaaaaggaatgcagaagaagatattggagatgatttcctatcagatagtagtgagggagcgggtagcccaacctatgacgagtcaggtgacagtgagtcaaatgatggtggtggtgatgatgaagatggtgaccctagtggtccaagttctgcagctag

SEQ ID NO: 11233 - DNA, 1463 bp, Zea Mays
caaaatactactcatgtgtaaatatggaaccctaaaacatctccagccgccacctgctagccagccgcccagctgccgccgttcagttttttttccctggcttctgctgttcgcctgttctagcgttcttcacggtcacgggcaggctgcagctttgcagattgtctccatcccgccagcagcccagcgctggtcagatttgctgctagcttcttccgtgtggctgttctccaactccaagagtccgacgcccacaaatttgctgctagcttccaccctctgactcccacgctgccgcaactaccatctcgtgtgaaggaagcgctgtgcgcgagaaagctctccacaagacagcaagcgcaggacagcgacgagttgggtggaggcgctgacacaattcttgcgatgttgtgggattcggacagcgatgatgaagtgcacgtggttgaccatcctactgagcatcgtgctgctactcacgcagagaaaggaaagaccatggctgatgccaacgcatcttctagtggtgctgatgtggtgcttgatcgatatgggaaaccagtgaagctaaatggaccaattgatgtgacttggagccatggtgaaccatatcctggacctcatggggctggctttaagtgcttttattgttttaccaccaaaaaaggcggggggtgtctcgattaaaagagcatctaggtcacatactagggagtgtggaggcggggggtgtctagatttactatggtgctgtccttgagagttgcttcattatttgtgatgattgtcctattttttcatattttcatagctgattggtgggatcaatatggtggagactacccagaattacaagagtttgcacgtcgtattgtttctcaatgcatgtcctctagtggttgcgaacgtaattggagtacctttgctttggttcatacaaaattgaggaatcggttgagttatgataagttgcataaactagtttatgttcactacaacttgaagttgcgcattcaacattacgaaactgatatggaaagtcttgaacaaatgaaaaactctaaagataggaacatagatccatgtagcatcatgatagatgttgctatgtatgatgaaggcaacccgattatggaatggttgtgtagttctaggagtgaatcattgccgacacttgatgaaaatgatgagcctgaatcacctaacagaccaagtggattcgttttagaggagttaggaggattgaatgaagaagagatggttcttttaaattctaggattggttctcgtaggaaaaatgttaggaaaaggaatgcagaagaagatattggagatgatttcctatcagatagtagtgagggagcgggtagcccaacctatgacgagtcaggtgacagtgagtcaaatgatggtggtggtgatgatgaagatggtgaccctagtggtccaagttctgcagctag

SEQ ID NO: 11234 - DNA, 1017 bp, Zea Mays
gctctccacaagacagcgcaggacagcgacgagttgggtggaggcgctgacacaattcttgcgatgttgtgggattcggacagcgatgatgaagtgcacgtggttgaccatcctactgagcatcgtgctgctactcacgcagagaaaggaaagaccatggctgatgccaacgcatcttctagtggtgctgatgtggtgcttgatcgatatgggaaaccagtgaagctaaatggaccaattgatgtgacttggagccatggtgaaccatatcctggacctcatggggctggctttaagtgcttttattgttttaccaccaaaaaaggcggggggtgtctcgattaaaagagcatctaggtcacatactagggagtgtggaggcggggggtgtctagatttactatggtgctgtccttgagagttgcttcattatttgtgatgattgtcctattttttcatattttcatagctgattggtgggatcaatatggtggagactacccagaattacaagagtttgcacgtcgtattgtttctcaatgcatgtcctctagtggttgcgaacgtaattggagtacctttgctttggttcatacaaaattgaggaatcggttgagttatgataagttgcataaactagtttatgttcactacaacttgaagttgcgcattcaacattacgaaactgatatggaaagtcttgaacaaatgaaaaactctaaagataggaacatagatccatgtagcatcatgatagatgttgctatgtatgatgaaggcaacccgattatggaatggttgtgtagttctaggagtgaatcattgccgacacttgatgaaaatgatgagcctgaatcacctaacagaccaagtggattcgttttagaggagttaggaggattgaatgaagaagagatggttcttttaaattctaggattggttctcgtaggaaaaatgttaggaaaaggaatgcagaagaagatattggagatgatttcctatcagatagtagtgag

SEQ ID NO: 11235 - DNA, 1363 bp, Zea Mays
gaattaaggcacaactgaactcttcaccaaattgagagtacgagtgagcaggatgactatgaagttgtcagaaaagttggaagaggtaaatatagtgaggtctttgaaggcatcaatgttaacaattatgagaaatgcatcattaagatccttaagcctgtcaagaaaaagaagatcaaaagggagatcaaaatacttcagaatctctgtggaggtccaaacattgtgaagttgcttgatattgtcagagatcagcattcaaagactcccagtttgatatttgaattcgtcaacaacacagacttcaaagtcttgtaccccacattgacggattatgacatccgctactacatatatgagctactcaaggctctagattactgccattctcaaggcatcatgcatcgagatgtcaagccccataatgtcatgatagatcacgagcttcgcaaacttcggttgatagactggggcttagctgagttttaccatccaggcaaggaatataatgtccgcgttgcatcgaggtatttcaagggacctgaactccttgttgatttacaagactatgattattctttggacatgtggagtcttggttgcatgtttgctggaatgatatttcgcaaggaaccattcttttatggccatgacaaccatgaccaacttgtgaagattgcaaaggtccttggaacagatgggttgaatgcttatttgaacaagtatcacattgagctggaccctcaacttgaagctcttgttggaaggcatagtagaaaaccctggtcaaagttcatgaatgctgataaccaacatctagtatcacctgaggccatagattttctcgataagctcctgcgctatgatcaccaagataggctcactgcacgtgaagctatggcacatccctacttcctccaagtcagagctgtggagaacagtagaacgagaccacaataatcgttgtctacaccctcgaaatgaagttgttgctaatttctggaacatcataggctaaaaccgttcaataagcatctcgctccaggaatctgggccatgactccgtggcagtgaatcagatagtatgggtcgcatcatgtgggcaaccttggcagatgtttttattgttgtctttaatcttgggactactgtagctttaaacctacaggctgtgcttgaatgacatgatattcatatcatatcgtctcctgtggtgggatatgaaattgtatgttatctttaaacataaacatactggttgtattatggtgtgctattatgtatgtatgattcttatttattttgtgtgatattgtgatgaaatactcatggatctcatagatgacatgagtttccggataga

SEQ ID NO: 11236 - DNA, 1704 bp, Zea Mays
ggtcatcccaggtcccagtccaccggtatcctcacgcagccacgctaaattcgtctccacctcctccctcgtgacatcgtctcgcacggtcgctcccacctttccgcccgccgaaaccctagcccgccccgcctcgccgacggcgatgggcgctgcatgatcggtgcgtccccttggaaccgcctgccttctggcatcgccaagcccgctgccgcggctgccgtcgtcgtagcggcgctcgcgtcctccttcctcgccctcccgcgtcctcgcgccgccccgcccccagcgggatccgggcccctcatgtcgaaggcaaaggtctacaccgacgtcaacgttctgcgtcccaaggagtactgggactacgaggcgctcaccgtccaatgggggatgactatgaagttgtcagaaaagttggaagaggtaaatatagtgaggtctttgaaggcatcaatgttaacaattatgagaaatgcatcattaagatccttaagcctgtcaagaaaaagaagatcaaaagggagatcaaaatacttcagaatctctgtggaggtccaaacattgtgaagttgcttgatattgtcagagatcagcattcaaagactcccagtttgatatttgaattcgtcaacaacacagacttcaaagtcttgtaccccacattgacggattatgacatccgctactacatatatgagctactcaaggctctagattactgccattctcaaggcatcatgcatcgagatgtcaagccccataatgtcatgatagatcacgagcttcgcaaacttcggttgatagactggggcttagctgagttttaccatccaggcaaggaatataatgtccgcgttgcatcgaggtatttcaagggacctgaactccttgttgatttacaagactatgattattctttggacatgtggagtcttggttgcatgtttgctggaatgatatttcgcaaggaaccattcttttatggccatgacaaccatgaccaacttgtgaagattgcaaaggtccttggaacagatgggttgaatgcttatttgaacaagtatcacattgagctggaccctcaacttgaagctcttgttggaaggcatagtagaaaaccctggtcaaagttcatgaatgctgataaccaacatctagtatcacctgaggccatagattttctcgataagctcctgcgctatgatcaccaagataggctcactgcacgtgaagctatggcacatccctacttcctccaagtcagagctgtggagaacagtagaacgagaccacaataatcgttgtctacaccctcgaaatgaagttgttgctaatttctggaacatcataggctaaaaccgttcaataagcatctcgctccaggaatctgggccatgactccgtggcagtgaatcagatagtatgggtcgcatcatgtgggcaaccttggcagatgtttttattgttgtctttaatcttgggactactgtagctttaaacctacaggctgtgcttgaatgacatgatattcatatcatatcgtctcctgtggtgggatatgaaattgtatgttatctttaaacataaacatactggttgtattatggtgtgctattatgtatgtatgattcttatttattttgtgtgatattgtgatgaaatactcatggatctcatagatgacatgagtttccggataga

SEQ ID NO: 11237 - DNA, 980 bp, Zea Mays
tcgcgtcgcccacgactcgtcgtacacccggtcttccctccgtcgccgatttcgttccccttcccctacccctgtcccgatcgcgcagctacggcgaaaccctagcgacgaattccccgccgaatcgaggattccaagaaccttggtaggcaggatgacagagctgaatgcctgaatgcaaccaggtgcttaatatccttattgaagccacctggaataaccagttcaaataaggttttgttaacaggcaacttacacagttacactgcatgtgaaatccccaagtttctgctgtctgagatctaagaacccgtacatgggttgagaaatactgcccccccccaaatttcttcgcaatgaaattacctgaattcttatgtctaccatactgaccattatctcgagatcttgtactttgcagttgtcttgcaggttagttgttcgtggactgcacctcatagcccatggacagagatggagattcagcaaggtgcaatcaaacttattcacctgttgctgaatttgtgaatgccatccgctgattcctgttgatcaaatctgcgttgtcaaacaaacagtcttttgctgttatggattctcatcaagagattatctccatttctgtctgttctgccaatttacagggctctggagtcacaaactcactgtcaagaagtgcaggatatctggttagcgttgcttaagcatagcttatgatgtttcactgttcccaagtgagtaaactaagaaatttacgaaatagctagattactatagttttttttttgaaattatttgagtgaagattgttcatgccatttatgggcattggcttgggttgattctgttttctcttatgcctcacccctcggatattacagattctgacaggagcagaattagaacagccccccctaacatcacaaatggatatggtttgtgctgtaaatcatcatctagtcatttgcatagaaatcttt

SEQ ID NO: 11238 - DNA, 3151 bp, Zea Mays
gaccccgccaaccacccttcgcgtcgcccacgactcgtcgtacacccggtcttccctccgtcgccgatttcgttccccttcccctacccctgtcccgatcgcgcagctacggcgaaaccctagcgacgaattccccgccgaatcgaggattccaaggttccgaccgcgccgagcgcggggaccgcattccgggaacgggtgatggtgacctgccgcaagatggcacgcgtcgacgtcgccgagctgaagcagcgcctggtgaagcggctgggccgggagcgggcggccaagtacttcgcacacctcaccaggctgctgaatctgaagctcaccaaggtagagttcgacaggctctgcttcgccaccatcggcaaggacaacatcgcgctgcacaacgcgctcattagggggatcataggcaatgctctgtcgggagtgcctccgcccagccggcaggcggtgacggggcagtcgggcaccaccaccgccccgagcgggcagtgcgtgggcgtcgcgctgcccgtggtggggaatgtgggggcagtggtcgattcgggtgatggtgagctggcgagggagcttggggcgccggttgggaaggtggtgtccgtggaagatggggaggaggtggagcagatcaggtctgttccgtgtgtccagagccggagcccgataacacagcccttggggatttcagtcgctgggggcagtggtacgagggtaaggaggaggctggatgatcctttggtgtcatgctacgattgtggacatttgctggatacgggctctctgtgcgaggatttgcatcggcgactgcacagtaccggcactggagtgacggtgcaagctgtcgatgctttgaaccgtggattagatgagttgttgcgaaggttgattaaaccgtgcatggatttgtcgagggtaagagccagcagtagaagaattagcaaagtcaatgaaaaggttgctggtagagtgaattcattgcaacaactaaatcagggtcagcgtacaacgatgcaagattttgcagttgctgtgcaatctgatccacatttgcttggtccaaattggcccacacaaatcgagaaggtacaggcaatgtcatttggaggagaatgatacatagtggcctgttatagctgatgaacatgaacttctctaaaggagatgctgtttgctggcattgaagtaaatgaaacggcagaccaacaccatgactacaaaatctgagtattgcgttgctcacaagcaggagataccaaggcccaccaggtgaacaaagggagatgcaatggacagtgtagcataatttcttccttgggaatctagcctgttgtcaataaatcgaagaatcgatagggttggctgatgttcaggccaagctaagaaactcgtcgacaaacataccctcagctcttggctcaaaaaacatgttctgatagtacttttagagatttgttgtgacgttgtaatagagcattttccccttattagatttaaatggaatcatttttctcagtgatcataaatgatgccttcaatggctcattgctcctgtacattgtattcagattatggcaatgatcacttgcaattaagataaaagtttaaccctgttggataaatatataagctttatttgctcaaggacttcaagttctctcctatgactggaatgtaaattttctaaacatgcactcatctatctgagttacaattgccaagaattatgatacgtacttttctaatcgaattaattctctggtttgtttgaaccattgatttcacttctcttcaaaaaactcgtccggggaggaaatgaccgtcctcccggtcgagaaaatccccaaactttggccttccatcactaacgggtcgatgccaaccgtccactctgcaacagcccaaccggagggtcacgtacaggacatcgtaacccgagaacggatggggtagaatgagcggatttttttaaccaatccggacaattcgccccggaggggatttcacttctcttattactgtagtttcgtttattctagcattagaagaatttcatactctgttttggaatttgtttgactgctccttgttctagcatacatgaactgcgcaacagttattcaaatgtttatttgataacattttttaatgtttccttggagttggtattcttctttgtgaaattttcagcatatctggtccagttcaaagattgcatcagttgttttgggaacaaatgtctcagttgagtaatttgggttatattttgagttttttgacacaaaacttatgcttcgtttctgtacattcttataaaacttcatttgtcctgagcatatttttctttttgttatcttcctggaagtggtatatacatatagtgtctgtaatttttttttaccttcttagaatggtaagcttgagttctgactatcctcttgttgagaagcatggtgtctttgttgaactttttgctatattctttagcatgtcaaatgccggttcaactctaatttgacgatataattttcttgcaaatgatgtttatttatcagttgtcttcttgttctttgacgttcccatatgtctatgctgcccgctaggaaccttggtaggcaggatgacagagctgaatgcctgaatgcaaccaggtgcttaatatccttattgaagccacctggaataaccagttcaaataaggttttgttaacaggcaacttacacagttacactgcatgtgaaatccccaagtttctgctgtctgagatctaagaacccgtacatgggttgagaaatactgcccccccccaaatttcttcgcaatgaaattacctgaattcttatgtctaccatactgaccattatctcgagatcttgtactttgcagttgtcttgcaggttagttgttcgtggactgcacctcatagcccatggacagagatggagattcagcaagggctctggagtcacaaactcactgtcaagaagtgcaggatatctggttagcgttgcttaagcatagcttatgatgtttcactgttcccaaattctgacaggagcagaattagaacagccccccctaacatcacaaatggatatggtttgtgctgtaaatcatcatctagtcatttgcatagaaatcttt

SEQ ID NO: 11239 - DNA, 1770 bp, Zea Mays
cagcactccgctacacgcccgccgcagcccgacgccccgtgctcgacgactccccctccatcctctcgccgaggctgccctcgtcctcccccacacccactgcatcgcccgaatctgcgctcgcgatgtcttcacttcccctcgcgccgccgtttcctctgcatcactagccatgtcgccgacttgcctaggacggagcccgtccgaccaaccatgccaggcaccacgccgtcccctcagcgtcgtcctctccacggtgtggtcggccgtctcgaagccctcgcgtcccctagcccatgcacccgcctcggatgccccaactgcccaaacgccatgcccccgcctcaccgtcccctctgcgcagccgcgcagtcgaggtgcgaccgaccgtggaggagccctcgcgacccctagcccaaccagccatgggcccccatcgtttccccttccgcgcagccagggccccaaatttggcaatgcaccatcccccccaacaatcgtgctcgatctggcaattgcgtgcatgatatccgccgctgatttggaaagcgcacgatctacaacgatgatttggaaagtgccttgccaaacgattccaacacaaatcccccaaatcgtgcacccatcatcattaaaaaggtcgcaattgccagactgctacaaccatcctacagctacggaaatccttcgctcacactcctccaggtgaagacagttaccttccctttgcaatccaaccatatatagagatcaacgtcaaaaggaacctcaggctttgtaaacgactaacttaaatcggcgaggaagcatatttgagacgttgcggctcggcaaaccgcttatcgtcgtcataaacaaggatctgatggacaatcaccagagcgaactagcagaagaattggctgaaaggaagcacctcttctgtgcacgcccacaaacactgggagagaccatccgagcgatggacctggagacgctggttccttacgagccaggggatgccaagccagtcgtcgccctgatcaacaggtttcttggcttcccagttggttgacaaacaaaccatgagatacctccattaaggcgtcagttcctgtacctgtttgatgtaaaatgaattaactggcatggaaacaacaagactgtccttgattgttgcagttgggtttaattaggggggcgtccattcgttgttcttgtcatgcccgcccttgacacgagaagacaatagtattaaacttgtcaatttctggaatgatgtgtggttggatggcatcgctgaagccaataatactttaagatcgtgagaggcccgaagaagacggaagtcacgtcaccctttttcatagttcaatagtcagggcagtcaataataccagggcttgattcaagaaggtgcaaagctgctggtcagggcagcgagcgttaagttggatgctcgtgttgtcgatcaagtggaagaggagaacgatgatacagagaactaaaagtttggtatagtgatcagctttctggtggaagcccgacgaggattgtctacttctagatcttggtcgtatagctttgttctacttctcttgtgttgctcttgttcgagtataaggtctacaatgacataatgcttgtaccatcttttttgtggtaacttattttttctcatgcagtgcatgtgacttgaaactttgttaggacatagtttgtgaaagggaaaatggacccaacatttcctatagtcgattttggtatctgacgttcatcacaaacgattat

SEQ ID NO: 11240 - DNA, 1776 bp, Zea Mays
cagcactccgctacacgcccgccgcagcccgacgccccgtgctcgacgactccccctccatcctctcgccgaggctgccctcgtcctcccccacacccactgcatcgcccgaatctgcgctcgcgatgtcttcacttcccctcgcgccgccgtttcctctgcatcactagccatgtcgccgacttgcctaggacggagcccgtccgaccaaccatgccaggcaccacgccgtcccctcagcgtcgtcctctccacggtgtggtcggccgtctcgaagccctcgcgtcccctagcccatgcacccgcctcggatgccccaactgcccaaacgccatgcccccgcctcaccgtcccctctgcgcagccgcgcagtcgaggtgcgaccgaccgtggaggagccctcgcgacccctagcccaaccagccatgggcccccatcgtttccccttccgcgcagccagggccccaaatttggcaatgcaccatcccccccaacaatcgtgctcgatctggcaattgcgtgcatgatatccgccgctgatttggaaagcgcacgatctacaacgatgatttggaaagtgccttgccaaacgattccaacacaaatcccccaaatcgtgcacccatcatcattaaaaaggtcgcaattgccagactgctacaaccatcctacagctacggaaatccttcgctcacactcctccaggtgaagacagttaccttccctttgcaatccaaccatatatagagatcaacgtcaaaaggaacctcaggctttgtaaacgactaacttaaatcggcgaggttcaggaagcatatttgagacgttgcggctcggcaaaccgcttatcgtcgtcataaacaaggatctgatggacaatcaccagagcgaactagcagaagaattggctgaaaggaagcacctcttctgtgcacgcccacaaacactgggagagaccatccgagcgatggacctggagacgctggttccttacgagccaggggatgccaagccagtcgtcgccctgatcaacaggtttcttggcttcccagttggttgacaaacaaaccatgagatacctccattaaggcgtcagttcctgtacctgtttgatgtaaaatgaattaactggcatggaaacaacaagactgtccttgattgttgcagttgggtttaattaggggggcgtccattcgttgttcttgtcatgcccgcccttgacacgagaagacaatagtattaaacttgtcaatttctggaatgatgtgtggttggatggcatcgctgaagccaataatactttaagatcgtgagaggcccgaagaagacggaagtcacgtcaccctttttcatagttcaatagtcagggcagtcaataataccagggcttgattcaagaaggtgcaaagctgctggtcagggcagcgagcgttaagttggatgctcgtgttgtcgatcaagtggaagaggagaacgatgatacagagaactaaaagtttggtatagtgatcagctttctggtggaagcccgacgaggattgtctacttctagatcttggtcgtatagctttgttctacttctcttgtgttgctcttgttcgagtataaggtctacaatgacataatgcttgtaccatcttttttgtggtaacttattttttctcatgcagtgcatgtgacttgaaactttgttaggacatagtttgtgaaagggaaaatggacccaacatttcctatagtcgattttggtatctgacgttcatcacaaacgattat

SEQ ID NO: 11241 - DNA, 1771 bp, Zea Mays
cagcactccgctacacgcccgccgcagcccgacgccccgtgctcgacgactccccctccatcctctcgccgaggctgccctcgtcctcccccacacccactgcatcgcccgaatctgcgctcgcgatgtcttcacttcccctcgcgccgccgtttcctctgcatcactagccatgtcgccgacttgcctaggacggagcccgtccgaccaaccatgccaggcaccacgccgtcccctcagcgtcgtcctctccacggtgtggtcggccgtctcgaagccctcgcgtcccctagcccatgcacccgcctcggatgccccaactgcccaaacgccatgcccccgcctcaccgtcccctctgcgcagccgcgcagtcgaggtgcgaccgaccgtggaggagccctcgcgacccctagcccaaccagccatgggcccccatcgtttccccttccgcgcagccagggccccaaatttggcaatgcaccatcccccccaacaatcgtgctcgatctggcaattgcgtgcatgatatccgccgctgatttggaaagcgcacgatctacaacgatgatttggaaagtgccttgccaaacgattccaacacaaatcccccaaatcgtgcacccatcatcattaaaaaggtcgcaattgccagactgctacaaccatcctacagctacggaaatccttcgctcacactcctccaggtgaagacagttaccttccctttgcaatccaaccatatatagagatcaacgtcaaaaggaacctcaggctttgtaaacgactaacttaaatcggttcaggaagcatatttgagacgttgcggctcggcaaaccgcttatcgtcgtcataaacaaggatctgatggacaatcaccagagcgaactagcagaagaattggctgaaaggaagcacctcttctgtgcacgcccacaaacactgggagagaccatccgagcgatggacctggagacgctggttccttacgagccaggggatgccaagccagtcgtcgccctgatcaacaggtttcttggcttcccagttggttgacaaacaaaccatgagatacctccattaaggcgtcagttcctgtacctgtttgatgtaaaatgaattaactggcatggaaacaacaagactgtccttgattgttgcagttgggtttaattaggggggcgtccattcgttgttcttgtcatgcccgcccttgacacgagaagacaatagtattaaacttgtcaatttctggaatgatgtgtggttggatggcatcgctgaagccaataatactttaagatcgtgagaggcccgaagaagacggaagtcacgtcaccctttttcatagttcaatagtcagggcagtcaataataccagggcttgattcaagaaggtgcaaagctgctggtcagggcagcgagcgttaagttggatgctcgtgttgtcgatcaagtggaagaggagaacgatgatacagagaactaaaagtttggtatagtgatcagctttctggtggaagcccgacgaggattgtctacttctagatcttggtcgtatagctttgttctacttctcttgtgttgctcttgttcgagtataaggtctacaatgacataatgcttgtaccatcttttttgtggtaacttattttttctcatgcagtgcatgtgacttgaaactttgttaggacatagtttgtgaaagggaaaatggacccaacatttcctatagtcgattttggtatctgacgttcatcacaaacgattat

SEQ ID NO: 11242 - DNA, 1711 bp, Zea Mays
caagtgagcgaatcgacttctacgtaatgagagatggctggtggttttcgagtactgcatcttgtgaggccatttctggctttcttgccagaagtacagagtgctgataggaaaataccattcagagagaaagtgatctacacggtcatttctctcttcatttttctgtgggatcaaagattattgaagttgacaacagtgtgagggaggatcgtgctctgctaaatggtgcgcagaagttgcttggtatccttattgccattggagaagccgtggcgtatgttctctctggaatgtatggcagtgtgagccaacttggaactgggaatgctatcctcattatacttcagcttttctttgctggtatcattgtcatctgtctagatgaactcctacagaaaggctatggtttgggatctggtatctctctgttcattgctacgaatatctgtgagaatatcatctggaaggcgtttagcccaacaaccatcaacagtgggcgtggtgctgaatttgaaggggcagtcattgcattgttccatctattgattactcgcacagataaatgaggtcaaagaatgcccgtggtcaacaaggctcatacccaatcaagttgttctatacttccaacatgcctatcattctgcactctgcactaattaccaacctctatttcatatcccagcttctctacaggaaatacagtggaaatttccttgttaaccttcttgggaaatggaaggaatctgagtactctggccattctgttccggttggtggtcttgcttactatgtgactgcgccatcaagcttggctgatgttctggcaaatccagtccatgcattgttctatgtggtctttatgctgtcagcctgtgctctcttctcaaagacatggattgaagtttctggttcatcagcgaaggacgttgctaagcagctgaaggagcaacaaatggtgatgccaggccatcgtgagtcaaacctgcaaagggaactgaacagatacatcccaactgctgcagcatttggaggagtgtgcattggcgcgctaactgtcctagctgatttcatgggcgcaattggctcaggaactggcattctgctcgctgtcactatcatataccagtactttgagacattcgagaaggaaagggcaaccgagcttggtttctttggtttctaatcttcgtcgctggggtaaaagactgaatcttcctgcaagtgacagtaaatgcttggccggctgtttatgtttgtaattggagagcttatagtcagtttaggttgcgggctaatttacactgggaaatttgtagcaggttctgcatgcgtttttggggccaggatgggcattaagttgtgctcaattataaccacggtcatcatctcttgggattttccgttctcctgtattgactatagaattttggatcaattttgccgtcttgaactgaatacttattcattactatccacgtgattggttgcccaaccaaatatgcgaggctccagacgcaccgcatgccattgaccagacgaagcatgtgattgattggctggatggtagcagcctacacccgtgtggccgcgtgtgcaccgtagcctttgttttgctgcctcgcctgcatgacgctgctctgctgcgttcccacgcgaggcgagcgttagatattcgggcaaccattcaaatggtatatgtaccaaagac

SEQ ID NO: 11243 - DNA, 831 bp, Zea Mays
ctactgatctaccagatcggcggccgcctccaacttaattgtgggcctcggaccctctctttgttcttccgtttccaccctctctctcgtggttctcccgtgctctgtgtccgtagcggcgacgactgggcgatcgccgccgccttaagccaggtgctcaggtctgccacttggcacttcgccggcgacgagcacctaacagaaatggtgcgcagaagttgcttggtatccttattgccattggagaagccgtggcgtatgttctctctggaatgtatggcagtgtgagccaacttggaactgggaatgctatcctcattatacttcagcttttctttgctggtatcattgtcatctgtctagatgaactcctacagaaaggctatggtttgggatctggtatctctctgttcattgctacgaatatctgtgagaatatcatctggaaggcgtttagcccaacaaccatcaacagtgggcgtggtgctgaatttgaaggggcagtcattgcattgttccatctattgattactcgcacagataaagtccgtgctctacgcgaggctttctaccgtcagaatcttccaaatgtgaccaatttacttgctactgtattggtcttcctcatagttatctatttccaaggtttccgtgttgtacttccagtgaggtcaaagaatgcccgtggtcaacaaggctcatacccaatcaagttgttctatacttccaacatgcctatcattctgcactctgcactaattaccaacctctatttcatatcccaggaaatacagtggaaatttccttgttaaccttcttgggaaatggaag

SEQ ID NO: 11244 - DNA, 523 bp, Zea Mays
cccgggtgaccagccatcccaatttaacgtgttaattataggtgcagagccccctcgccttcaagaagccccgcctcctcatgaccgcgtgaaaccgctgcgcgcgcgggcggcggatctcatctcatcacccgtccaagattttggtccgcagctgccgagttcagcggtggaagtggaacacactattcgttcattcatttcgtatggtgccagtagcgctattgtttgatttttgtggctgctcctcttgtacagtaccgagtgcgagaaaagatgcatagtcatcgtatacataccaatacaataccgtacctataggtcttcctattcctgtggaagagtagaacttgtatccttattagctgtcagtacactacagttcatacacacttggttctcattatcagagatcattggtgaattagtggttttgtatcataagcttattgtaaatgatggattggagattagtatggaatcagatacccatttgttccatgcctggttcaagtctctgtag

SEQ ID NO: 11245 - DNA, 750 bp, Zea Mays
caaggcttgccgagctgcctagccattataatgcttggtccttgaattgaagtcaattgatttccgatttaataaggcacagtttgtttgagcttctgctgtcgtcttcacatattttaatttttaatgcatgtggggattactgaaattgttgtgcagacatgtgttttgagattgtgtgctatttgtgcctgattttattgcacaggcagggtggtctatctcaaagatttttgaaagttgtttcttattatggtctcacgactctgccatataaactggatgctctggaaccttacatgagaaagagaacagttgaacttcactagggtaagcaccatcaagattacgtggatggcttgaataagtagctggctaccagccctctgtatgtatatacaccctggacgatctgataaaagaagcccacaacaatggtctcgaatcatcactttttctgggaatcgatgcaaccagaaggtggtggcttacctgagggaggtgtgctatagcagattgaaaaggattttggcttgtttactaattttagggaagagtttattcgttcagccttacaactattggggtctggttgggtttggcttgctttgaagagaaataagagaaagctttcagtagttcatacacgaaacattatctacccacttgcttttggtatattgtatgttcatacacaatgaatgatatagaaccaccaaagagttgattgtatattgatcctttttctgc

SEQ ID NO: 11246 - DNA, 668 bp, Zea Mays
cgccatggcagccttgccccgctcccccaacagcgcccgcctgcccctttccttgcgcgacgcgagatggatcggtgaatccatggcagcttggatgctctggaaccttacatgagaaagagaacagttgaacttcactagggtaagcaccatcaagattacgtggatggcttgaataagtagctggctaccagccctctgtatgtatatacaccctggacgatctgataaaagaagcccacaacaatggtctcgaatcatcactttttctgggaatcgatgcaaccagaaggtggtggcttacctgagggaggtgtgctatagcagattgaaaaggattttggcttgtttactaattttagggaagagtttattcgttcagccttacaactattggggtctggttgggtttggcttgcttgtaagtttctttctattttctttgaagtacagacaccaccggttcaaactaccgatttcctgattgctctttctaaagctaatattctgctggatatttgttgcagtgaagagaaataagagaaagctttcagtagttcatacacgaaacattatctacccacttgcttttggtatattgtatgttcatacacaatgaatgatatagaaccaccaaagagttgattgtatattgatcctttttctgc

SEQ ID NO: 11247 - DNA, 880 bp, Zea Mays
cttgttcatccatttaattgcattgttcatatgtgtttacactaattcttaacaggatcaacaccctttgcaccaatgtgaagcaaagtggtggacaataccaagtcctgttgataattgcagatgggaagttgcaggacgccatggcagccttgccccgctcccccaacagcgcccgcctgcccctttccttgcgcgacgcgagatggatcggtgaatccatggcagcttggcagggtggtctatctcaaagatttttgaaagttgtttcttattatggtctcacgactctgccatataaactggatgctctggaaccttacatgagaaagagaacagttgaacttcactagggtaagcaccatcaagattacgtggatggcttgaataagtagctggctaccagccctctgtatgtatatacaccctggacgatctgataaaagaagcccacaacaatggtctcgaatcatcactttttctgggaatcgatgcaaccagaaggtggtggcttacctgagggaggtgtgctatagcagattgaaaaggattttggcttgtttactaattttagggaagagtttattcgttcagccttacaactattggggtctggttgggtttggcttgcttgtaagtttctttctattttctttgaagtacagacaccaccggttcaaactaccgatttcctgattgctctttctaaagctaatattctgctggatatttgttgcagtgaagagaaataagagaaagctttcagtagttcatacacgaaacattatctacccacttgcttttggtatattgtatgttcatacacaatgaatgatatagaaccaccaaagagttgattgtatattgatcctttttctgc

SEQ ID NO: 11248 - DNA, 956 bp, Zea Mays
tccatgtttcggatttggagatgcatcaacgcatgatcaagacgtctttgtttctctcctgacgagaaaccttgtaatggatctgaagaaacttttggacaatgcagggaacttgtaccacattttcgtttagctcggaagttgttatgccttgttcatccatttaattgcattgttcatatgtgtttacactaattcttaacaggatcaacaccctttgcaccaatgtgaagcaaagtggtggacaataccaagtcctgttgataattgcagatgggaagttgcaggacgccatggcagccttgccccgctcccccaacagcgcccgcctgcccctttccttgcgcgacgcgagatggatcggtgaatccatggcagcttggcagggtggtctatctcaaagatttttgaaagttgtttcttattatggtctcacgactctgccatataaactggtctgtaagcttgttggtgccaatctcagaaggatgctctggaaccttacatgagaaagagaacagttgaacttcactagggtaagcaccatcaagattacgtggatggcttgaataagtagctggctaccagccctctgtatgtatatacaccctggacgatctgataaaagaagcccacaacaatggtctcgaatcatcactttttctgggaatcgatgcaaccagaaggtggtggcttacctgagggaggtgtgctatagcagattgaaaaggattttggcttgtttactaattttagggaagagtttattcgttcagccttacaactattggggtctggttgggtttggcttgctttgaagagaaataagagaaagctttcagtagttcatacacgaaacattatctacccacttgcttttggtatattgtatgttcatacacaatgaatgatatagaaccaccaaagagttgattgtatattgatcctttttctgc

SEQ ID NO: 11249 - DNA, 1491 bp, Zea Mays
tgtttgtcttatttcattgtcttacaatttgatgaaatgcctcacctcctgctaatgatttccttcattctaccaggcaaattctccttccaacacaccaaatccatatgaacaaggcatctcgattattgggcgaacactatcgaaattcgatgaagataatctgattccatgtttcggatttggagatgcatcaacgcatgatcaagacgtctttgtttctctcctgacgagaaaccttgtaatggatctgaagaaacttttggacaatgcagggaacttgtaccacattttcgtttagctcggaagttgttatgccttgttcatccatttaattgcattgttcatatgtgtttacactaattcttaacaggatcaacaccctttgcaccaatgtgaagcaaagtggtggacaataccaagtcctgttgataattgcagatgggaagttgcaggacgccatggcagccttgccccgctcccccaacagcgcccgcctgcccctttccttgcgcgacgcgagatggatcggtgaatccatggcagcttggtaagtccacctctcgtcctccctggtcctccgttgcatgatacccgcccccagcccctgctccgatgtggcgaggtgccccctccccgccccgatgcgccgaagacgtggagcaaatccacctcaatgatgcacgctgacagcgggctcgtcggcactctaggtggagcacgacgtcctttttgaaaatggtttggtcatacacaaacttgtggggtgaaatttcggctttggcctccttctgcgaggtggatttggatagcgcggtgcagaaaaaatggcggcttcagctctccacctctgccgcctccccaagccacggcaggtgtgaagcttcagcagaggcagttgcgcccgatgagccatgatgctctggaaccttacatgagaaagagaacagttgaacttcactagggtaagcaccatcaagattacgtggatggcttgaataagtagctggctaccagccctctgtatgtatatacaccctggacgatctgataaaagaagcccacaacaatggtctcgaatcatcactttttctgggaatcgatgcaaccagaaggtggtggcttacctgagggaggtgtgctatagcagattgaaaaggattttggcttgtttactaattttagggaagagtttattcgttcagccttacaactattggggtctggttgggtttggcttgcttgtaagtttctttctattttctttgaagtacagacaccaccggttcaaactaccgatttcctgattgctctttctaaagctaatattctgctggatatttgttgcagtgaagagaaataagagaaagctttcagtagttcatacacgaaacattatctacccacttgcttttggtatattgtatgttcatacacaatgaatgatatagaaccaccaaagagttgattgtatattgatcctttttctgc

SEQ ID NO: 11250 - DNA, 1490 bp, Zea Mays
tgtttgtcttatttcattgtcttacaatttgatgaaatgcctcacctcctgctaatgatttccttcattctaccaggcaaattctccttccaacacaccaaatccatatgaacaaggcatctcgattattgggcgaacactatcgaaattcgatgaagataatctgattccatgtttcggatttggagatgcatcaacgcatgatcaagacgtctttgtttctctcctgacgagaaaccttgtaatggatctgaagaaacttttggacaatgcagggaacttgtaccacattttcgtttagctcggaagttgttatgccttgttcatccatttaattgcattgttcatatgtgtttacactaattcttaacaggatcaacaccctttgcaccaatgtgaagcaaagtggtggacaataccaagtcctgttgataattgcagatgggaagttgcaggacgccatggcagccttgccccgctcccccaacagcgcccgcctgcccctttccttgcgcgacgcgagatggatcggtgaatccatggcagcttggtaagtccacctctcgtcctccctggtcctccgttgcatgatacccgcccccagcccctgctccgatgtggcgaggtgccccctccccgccccgatgcgccgaagacgtggagcaaatccacctcaatgatgcacgctgacagcgggctcgtcggcactctaggtggagcacgacgtcctttttgaaaatggtttggtcatacacaaacttgtggggtgaaatttcggctttggcctccttctgcgaggtggatttggatagcgcggtgcagaaaaaatggcggcttcagctctccacctctgccgcctccccaagccacggcaggtgtgaagcttcagcagaggcagttgcgcccgatgagccatgcagggtggtctatctcaaagatttttgaaagttgtttcttattatggtctcacgactctgccatataaactggtctgtaagcttgttggtgccaatctcagaaggatgctctggaaccttacatgagaaagagaacagttgaacttcactagggtaagcaccatcaagattacgtggatggcttgaataagtagctggctaccagccctctgtatgtatatacaccctggacgatctgataaaagaagcccacaacaatggtctcgaatcatcactttttctgggaatcgatgcaaccagaaggtggtggcttacctgagggaggtgtgctatagcagattgaaaaggattttggcttgtttactaattttagggaagagtttattcgttcagccttacaactattggggtctggttgggtttggcttgctttgaagagaaataagagaaagctttcagtagttcatacacgaaacattatctacccacttgcttttggtatattgtatgttcatacacaatgaatgatatagaaccaccaaagagttgattgtatattgatcctttttctgc

SEQ ID NO: 11251 - DNA, 1562 bp, Zea Mays
tgtttgtcttatttcattgtcttacaatttgatgaaatgcctcacctcctgctaatgatttccttcattctaccaggcaaattctccttccaacacaccaaatccatatgaacaaggcatctcgattattgggcgaacactatcgaaattcgatgaagataatctgattccatgtttcggatttggagatgcatcaacgcatgatcaagacgtctttgtttctctcctgacgagaaaccttgtaatggatctgaagaaacttttggacaatgcagggaacttgtaccacattttcgtttagctcggaagttgttatgccttgttcatccatttaattgcattgttcatatgtgtttacactaattcttaacaggatcaacaccctttgcaccaatgtgaagcaaagtggtggacaataccaagtcctgttgataattgcagatgggaagttgcaggacgccatggcagccttgccccgctcccccaacagcgcccgcctgcccctttccttgcgcgacgcgagatggatcggtgaatccatggcagcttggtaagtccacctctcgtcctccctggtcctccgttgcatgatacccgcccccagcccctgctccgatgtggcgaggtgccccctccccgccccgatgcgccgaagacgtggagcaaatccacctcaatgatgcacgctgacagcgggctcgtcggcactctaggtggagcacgacgtcctttttgaaaatggtttggtcatacacaaacttgtggggtgaaatttcggctttggcctccttctgcgaggtggatttggatagcgcggtgcagaaaaaatggcggcttcagctctccacctctgccgcctccccaagccacggcaggtgtgaagcttcagcagaggcagttgcgcccgatgagccatgcagggtggtctatctcaaagatttttgaaagttgtttcttattatggtctcacgactctgccatataaactggtctgtaagcttgttggtgccaatctcagaaggtttgtgtgctgtcattaaaggaatatccaaattttaactttgttaaactttgttctctggtacaatgtccaggatgctctggaaccttacatgagaaagagaacagttgaacttcactagggtctcgaatcatcactttttctgggaatcgatgcaaccagaaggtggtggcttacctgagggaggtgtgctatagcagattgaaaaggattttggcttgtttactaattttagggaagagtttattcgttcagccttacaactattggggtctggttgggtttggcttgcttgtaagtttctttctattttctttgaagtacagacaccaccggttcaaactaccgatttcctgattgctctttctaaagctaatattctgctggatatttgttgcagtgaagagaaataagagaaagctttcagtagttcatacacgaaacattatctacccacttgcttttggtatattgtatgttcatacacaatgaatgatatagaaccaccaaagagttgattgtatattgatcctttttctgc

SEQ ID NO: 11252 - DNA, 3205 bp, Zea Mays
aagaaaattagacttttttacacgaagctattcacaatatatcgcacattttctatttatactatttttttattcttagaaaatttttgatgtttttttaaggatctcgactgaagcatctcacaccttttttaagcataaaagatttgtagattttttccttttccttttttctttcactataatctattctagtctattctcgtattattttactctcccttcttggattctttcgatgaagaattatcttcgatttttttattttgactcgattgaaattaagtggatgcagtgaaaacagaagttgatataagagccaacaaaaacaccaacaaaaacgaggctgaagggaaaagctgcatagagaccacgaaacaggaaggaaagcgtgtaggcgtgtacagtgcatgtacagtgcacactacgtgatgtgtgtgcatcggaggggcattgactcgctggactttctttcccccaaagccgcgtggccgccgaggcgccgatagccaccagacgggagctgatctcccagaaaacaaccaaccaaccccgacccccgagaccagtgagtaactaaaaaaaaaaaagccaaaatggcggggggaggtcgtcgtctcccctccctgcgatcccctccatccgcgacgccatctcggccacttcatgatcactagggtttcgctcttctacccataagccctcgtcccgatgcgctggtggaagcgctcctcctccccctcctgccccgcctcctcatcctcagcatcgacccccgcttcccccgcccgcgcctccaccccccgtctcatcggcggttggggtagcggccctagctcacgccgcgatggcagcggggccagcaacgatccgcagccgcggctgatcagagcgcggcggatgcgctacgtcgtcgatgacctcgaggtcggggtctccgcgctcggcgtggactctccggcgaggagggacgcggcggcggggtttgcgcttgagacagtgagctccgcgccgatctcgtggtctccgagcaacatggaggtggcgccggcgagatcctcgtcgacccccgtgctgctgccgcatccgctgccccttccaggcgagggggaatcgccgtgccgcgggccggggaggccgcttccgccaccggtgccaaggatgctcgacggggaggggaaagggcctgcagcggacgctcccggtgttttagagactgggagccaaaggatgacgccgttactcgcacggagagtggcggtccaaactctaccaaaggctcatgagcacaacgactttcggttaaatgggactacctgttgtcagcggagaaaggcttttaaagagaagttccaggataagaactgtgatgaaactttgaacttcagattgaacattcctgctaaaagtgctccaagcagtgggttttcaagccctgtacaaagtcctcgaagactgagtaatgtagatttctcatctgctgcaatctctatccaagataccaatgtggtcaggagcgttctcctctctctagtccactgagaagtccagttttaaaatcaagaaacccaagtgcacctccatcaccaatgcatccaaagttgttcccggagaaccatgtttctcgccctgatggcaatggaagtgctagttttcacccattaccgctccctcctgcttctaaaggaaaactcttgggtagtggcacctttggatgcgtgtatgaggccaccaataggcacactggagctctttgtgccatgaaagaggtgaatataattccagatgatgctaaatcagtcgagtctctgaagcaattggaacaggaaattaagtttcttagtcaatttaagcatgaaaatattgtgcagtactatggcagtgaaactatcgaagatagattctacatatacctggagtatgttcatcctggttcaatccataagtatgttcatcaacactgtggatcgctgacagaagcagtcatccgtaacttcacacgtcatattctcaagggtcttgcttttttacatagccaaaagattatgcatagggatatcaaaggggcaaatttgttagttgatattaacggtgtagtgaaattggctgacttcggaatggcaaagcatttgagtactgcagctcctaatctttcattgaagggaacaccatactggatggctcctgaggttgttcgggctacactcgataaaagtgcaggttatgatcttgctgttgatatttggagccttggctgcacaatcattgagatgtttacaggaaagccaccttggagtggtcttgaagggccggctgcaatgtttaaggtgttgcgcacggacccaccaattccagataacctgtcccctgaagggaaggattttctgagatgctgcttcaagagaaaccctactgagcgaccaacagcaaacaagttgctcgaacacccatttatccaaactttgaaccactacagcccacatagcgttgtacattcattttcgggaattaaatctccagatactgtgcacagcagtgcaagagataaagtaccctggaaaagtgattcatatatgagagggaaacatgcaaatggtgaaacaagcagtgctcggtcgtcagagtcattggcttatcggttgatgacacccctacccaacttgggaaccaatagtttgtcacctccacctttgagttcggcctccagttctggctctgcagcacatacaccgaacacatgccacctatcacaacatctgggcaaagtccacataaacagcgcaagtgtatccgtccctagcgtctgacccttgtactgccagtaatagctaacaattttctgggtcgtgtaaaaataatttccatgtaaagagatcaccgcgatatgatcacagggaaatgctgctaaatgagggagctttgtgaaatctgttgtatcgtttgatttctgggaaactgattggattgcccatgtaacatatttttattagggtgtagctgtaggtgaaactaatggtcaagattgtgccgacaaataggacattagggttgtagctgtagcgtgttgttgatgctgtgtaatgatcatacttgatgtaatcattattgatttttttggggaaggtaataatgcacgtcaattggcaaaaggggattgagatcgcagatccatgtactccctccgttaataaatatatgacctttt

SEQ ID NO: 11253 - DNA, 3268 bp, Zea Mays
aagaaaattagacttttttacacgaagctattcacaatatatcgcacattttctatttatactatttttttattcttagaaaatttttgatgtttttttaaggatctcgactgaagcatctcacaccttttttaagcataaaagatttgtagattttttccttttccttttttctttcactataatctattctagtctattctcgtattattttactctcccttcttggattctttcgatgaagaattatcttcgatttttttattttgactcgattgaaattaagtggatgcagtgaaaacagaagttgatataagagccaacaaaaacaccaacaaaaacgaggctgaagggaaaagctgcatagagaccacgaaacaggaaggaaagcgtgtaggcgtgtacagtgcatgtacagtgcacactacgtgatgtgtgtgcatcggaggggcattgactcgctggactttctttcccccaaagccgcgtggccgccgaggcgccgatagccaccagacgggagctgatctcccagaaaacaaccaaccaaccccgacccccgagaccagtgagtaactaaaaaaaaaaaagccaaaatggcggggggaggtcgtcgtctcccctccctgcgatcccctccatccgcgacgccatctcggccacttcatgatcactagggtttcgctcttctacccataagccctcgtcccgatgcgctggtggaagcgctcctcctccccctcctgccccgcctcctcatcctcagcatcgacccccgcttcccccgcccgcgcctccaccccccgtctcatcggcggttggggtagcggccctagctcacgccgcgatggcagcggggccagcaacgatccgcagccgcggctgatcagagcgcggcggatgcgctacgtcgtcgatgacctcgaggtcggggtctccgcgctcggcgtggactctccggcgaggagggacgcggcggcggggtttgcgcttgagacagtgagctccgcgccgatctcgtggtctccgagcaacatggaggtggcgccggcgagatcctcgtcgacccccgtgctgctgccgcatccgctgccccttccaggcgagggggaatcgccgtgccgcgggccggggaggccgcttccgccaccggtgccaaggatgctcgacggggaggggaaagggcctgcagcggacgctcccggtgttttagagactgggagccaaaggatgacgccgttactcgcacggagagtggcggtccaaactctaccaaaggctcatgagcacaacgactttcggttaaatgggactacctgttgtcagcggagaaaggcttttaaagagaagttccaggataagaactgtgatgaaactttgaacttcagattgaacattcctgctaaaagtgctccaagcagtgggttttcaagccctgtacaaagtcctcgaagactgagtaatgtagatttctcatctgctgcaatctctatccaagataccaatgtggtcaggagcgttctcctctctctagtccactgagaagtccagttttaaaatcaagaaacccaagtgcacctccatcaccaatgcatccaaagttgttcccggagaaccatgtttctcgccctgatggcaatggaagtgctagttttcacccattaccgctccctcctgcttctgtaagcccaaagcagacaaatgctagccaccagttagttccaaaagctgagatgccttcggtggctggtcaatggcagaaaggaaaactcttgggtagtggcacctttggatgcgtgtatgaggccaccaataggcacactggagctctttgtgccatgaaagaggtgaatataattccagatgatgctaaatcagtcgagtctctgaagcaattggaacaggaaattaagtttcttagtcaatttaagcatgaaaatattgtgcagtactatggcagtgaaactatcgaagatagattctacatatacctggagtatgttcatcctggttcaatccataaggatatcaaaggggcaaatttgttagttgatattaacggtgtagtgaaattggctgacttcggaatggcaaagcatttgagtactgcagctcctaatctttcattgaagggaacaccatactggatggctcctgaggttgttcgggctacactcgataaaagtgcaggttatgatcttgctgttgatatttggagccttggctgcacaatcattgagatgtttacaggaaagccaccttggagtggtcttgaagggccggctgcaatgtttaaggtgttgcgcacggacccaccaattccagataacctgtcccctgaagggaaggattttctgagatgctgcttcaagagaaaccctactgagcgaccaacagcaaacaagttgctcgaacacccatttatccaaactttgaaccactacagcccacatagcgttgtacattcattttcgggaattaaatctccagatactgtgcacagcagtgcaagagataaagtaccctggaaaagtgattcatatatgagagggaaacatgcaaatggtgaaacaagcagtgctcggtcgtcagagtcattggcttatcggttgatgacacccctacccaacttgggaaccaatagtttgtcacctccacctttgagttcggcctccagttctggctctgcagcacatacaccgaacagtatgcatttttcagtcccataccatcagcctagtcctttgccaaagcctaacgggaaggaagcaataaatttggtttcgcattgaataacagcatgccacctatcacaacatctgggcaaagtccacataaacagcgcaagtgtatccgtccctagcgtctgacccttgtactgccagtaatagctaacaattttctgggtcgtgtaaaaataatttccatgtaaagagatcaccgcgatatgatcacagggaaatgctgctaaatgagggagctttgtgaaatctgttgtatcgtttgatttctgggaaactgattggattgcccatgtaacatatttttattagggtgtagctgtaggtgaaactaatggtcaagattgtgccgacaaataggacattagggttgtagctgtagcgtgttgttgatgctgtgtaatgatcatacttgatgtaatcattattgatttttttggggaaggtaataatgcacgtcaattggcaaaaggggattgagatcgcagatccatgtactccctccgttaataaatatatgacctttt

SEQ ID NO: 11254 - DNA, 1801 bp, Zea Mays
caggcctcccgcctccctgcacagcacagcacagcacagcaccccgcatctctccccttcctcaccaaccccgccgcctccgacgttcacctcggcggccgccaccggcgaggccgcacctcgccggtcacccacccccgctactcgatattatatcctactccgaggatccgcgtagccgcctccggctgcccacccgcggaactctagatctccgataccccgcgctccctcccgccgacggccacccgaccggaatgggccgctgtcttcagtaaggtctaaggacccaagggaaccctcctccgccttcgctcgtgcgcgaagcgcggccgcgatggcgatccgcattacggtgtcctactcgggctacgtggcgcagaacctggccgcgtccttcggcctccgctgcaccgtggctgcgggcgcaagcgcggcgctcggcccggggtgccgcttcctccaggacgcgctatcccaccccttctgcctcttcgcttcctcccgccgcgccgacccccaccatgacgccgaggatcacaaccacccgaagcccaggtccaaggctctagcccccgccgccgcagcaagaggaggcggccactcattgctgctgccgcggtcgtgttccgggaaggcggcgccgccggtggatgaccccccagcctcgttggccgtggggctgctgtcggtgttcgcgtctgggatgggatcgactggtggcattgctggtgcgtcctcccttgctgcgtcgccgtcaatatcagccgggttcaaccctgcggcgctcctcccgttcttgcaggcgagcaagtggctcccctgcagcgacatagtcactgttgcaacgacgtcgcgcagctcaggacgcccagcaggttcaactgcttcgcctgtaccgcggacaactgcaccatcgccccgtcctacacaacgcgcagccgctccatctccctgccctgtgccatcacctgctgttgctgctccttccaaggtcggcatacaagcattggttggtagtgctagcatcgcctcaggttcagctgagattggaaggggagccattgcctctggtgtggctggaatggtgaagaagagtggtgctagtattcctgctggtgcaggggtgagaaggaagactggttggctctcaaagtgggtgagctcatgctcagatgatgcaaagacagtcttcgccgccgtgaccgtgccactgctctataaatcatccctagctgagccgagatccatcccatccaggtcaatgttcccaacatttgatgttggtgaccggatccttgctgagaaggtttcgtacattttccgggagccagaaattttggacattgtgatatttcgtgcacctccagtccttcaggcattgggctacaactcaggtgatgtgttcatcaagagagttgtggctaagagcggggacaccgttgaagtacgtgatggtaacttgttggttaatggagtagttcaggaggaggaatttgtgctggaaccagccaactatgaaatggatccgctgactgtgcctgaaggctatgtctttgtcctgggggataacagaaacaacagctttgattcacataactggggtccacttccatttaagaacatccttgggagatctgtgctccgatactggccaccatcgaggataacagatacaatatatgagcatgacatagtgcagtacacagctgctgcatcctgatagtacattgtggcaataccacatgctgcaggagtccacttccatttaagaacatccttgggagatctgtgctccgat

SEQ ID NO: 11255 - DNA, 1834 bp, Zea Mays
cggcttccagggtccaggcctcccgcctccctgcacagcacagcacagcacagcaccccgcatctctccccttcctcaccaaccccgccgcctccgacgttcacctcggcggccgccaccggcgaggccgcacctcgccggtcacccacccccgctactcgatattatatcctactccgaggatccgcgtagccgcctccggctgcccacccgcggaactctagatctccgataccccgcgctccctcccgccgacggccacccgaccggaatgggccgctgtcttcagtaaggtctaaggacccaagggaaccctcctccgccttcgctcgtgcgcgaagcgcggccgcgatggcgatccgcattacggtgtcctactcgggctacgtggcgcagaacctggccgcgtccttcggcctccgctgcaccgtggctgcgggcgcaagcgcggcgctcggcccggggtgccgcttcctccaggacgcgctatcccaccccttctgcctcttcgcttcctcccgccgcgccgacccccaccatgacgccgaggatcacaaccacccgaagcccaggtccaaggctctagcccccgccgccgcagcaagaggaggcggccactcattgctgctgccgcggtcgtgttccgggaaggcggcgccgccggtggatgaccccccagcctcgttggccgtggggctgctgtcggtgttcgcgtctgggatgggatcgactggtggcattgctggtgcgtcctcccttgctgcgtcgccgtcaatatcagccgggttcaaccctgcggcgctcctcccgttcttgcaggcgagcaagtggctcccctgcagcgacatagtcactgttgcaacgacgtcgcgcagctcaggacgcccagcaggttcaactgcttcgcctgtaccgcggacaactgcaccatcgccccgtcctacacaacgcgcagccgctccatctccctgccctgtgccatcacctgctgttgctgctccttccaaggtcggcatacaagcattggttggtagtgctagcatcgcctcaggttcagctgagattggaaggggagccattgcctctggtgtggctggaatggtgaagaagagtggtgctagtattcctgctggtgcaggggtgagaaggaagactggttggctctcaaagtgggtgagctcatgctcagatgatgcaaagacagtcttcgccgccgtgaccgtgccactgctctataaatcatccctagctgagccgagatccatcccatccaggtcaatgttcccaacatttgatgttggtgaccggatccttgctgagaaggtttcgtacattttccgggagccagaaattttggacattgtgatatttcgtgcacctccagtccttcaggcattgggctacaactcaggtgatgtgttcatcaagagagttgtggctaagagcggggacaccgttgaagtaagcttttatcccaatggtacgtgatggtaacttgttggttaatggagtagttcaggaggaggaatttgtgctggaaccagccaactatgaaatggatccgctgactgtgcctgaaggctatgtctttgtcctgggggataacagaaacaacagctttgattcacataactggggtccacttccatttaagaacatccttgggagatctgtgctccgatactggccaccatcgaggataacagatacaatatatgagcatgacatagtgcagtacacagctgctgcatcctgatagtacattgtggcaataccacatgctgcaggagtccacttccatttaagaacatccttgggagatctgtgctccgat

SEQ ID NO: 11256 - DNA, 1336 bp, Zea Mays
ctcccgcctccctgcacagcacagcacagcacagcaccccgcatctctccccttcctcaccaaccccgccgcctccgacgttcacctcggcggccgccaccggcgaggccgcacctcgccggtcacccacccccgctactcgatattatatcctactccgaggatccgcgtagccgcctccggctgcccacccgcggaactctagatctccgataccccgcgctccctcccgccgacggccacccgaccggaatgggccgctgtcttcagtaaggtctaaggacccaagggaaccctcctccgccttcgctcgtgcgcgaagcgcggccgcgatggcgatccgcattacggtgtcctactcgggctacgtggcgcagaacctggccgcgtccttcggcctccgctgcaccgtggctgcgggcgcaagcgcggcgctcggcccggggtgccgcttcctccaggacgcgctatcccaccccttctgcctcttcgcttcctcccgccgcgccgacccccaccatgacgccgaggatcacaaccacccgaagcccaggtccaaggctctagcccccgccgccgcagcaagaggaggcggccactcattgctgctgccgcggtcgtgttccgggaaggcggcgccgccggtggatgaccccccagcctcgttggccgtggggctgctgtcggtgttcgcgtctgggatgggatcgactggtggcattgctggtgcgtcctcccttgctgcgtcgccgtcaatatcagccgggttcaaccctgcggcgctcctcccgttcttgcaggcgagcaagtggctcccctgcagcgacatagtcactgttgcaacgacgtcgcgcagctcaggacgcccagcaggttcaactgcttcgcctgtaccgcggacaactgcaccatcgccccgtcctacacaacgcgcagccgctccatctccctgccctgtgccatcacctgctgttgctgctccttccaaggtcggcatacaagcattggttggtagtgctagcatcgcctcaggttcagctgagattggaaggggagccattgcctctggtgtggctggaatggtgaagaagagtggtgctagtattcctgctggtgcaggggtgagaaggaagactggttggctctcaaagtgggtgagctcatgctcagatgatgcaaagacagtcttcgccgccgtgaccgtgccactgctctataaatcatccctagctgagccgagatccatcccatccaggtcaatgttcccaacatttgatgttggtgaccggatccttgctgagaaggaagactggttggctctcaaagtgggtgagct

SEQ ID NO: 11257 - DNA, 2304 bp, Zea Mays
ataaaacacgcgacatccagtttttacccacccacacgggccagccactggcctgtggccaccgcactcgttccaactagttgggccaaaaatccggtaactccgcgtcgtcccttccctcccggcttccagggtccaggcctcccgcctccctgcacagcacagcacagcacagcaccccgcatctctccccttcctcaccaaccccgccgcctccgacgttcacctcggcggccgccaccggcgaggccgcacctcgccggtcacccacccccgctactcgatattatatcctactccgaggatccgcgtagccgcctccggctgcccacccgcggaactctagatctccgataccccgcgctccctcccgccgacggccacccgaccggaatgggccgctgtcttcagtaaggtctaaggacccaagggaaccctcctccgccttcgctcgtgcgcgaagcgcggccgcgatggcgatccgcattacggtgtcctactcgggctacgtggcgcagaacctggccgcgtccttcggcctccgctgcaccgtggctgcgggcgcaagcgcggcgctcggcccggggtgccgcttcctccaggacgcgctatcccaccccttctgcctcttcgcttcctcccgccgcgccgacccccaccatgacgccgaggatcacaaccacccgaagcccaggtccaaggctctagcccccgccgccgcagcaagaggaggcggccactcattgctgctgccgcggtcgtgttccgggaaggcggcgccgccggtggatgaccccccagcctcgttggccgtggggctgctgtcggtgttcgcgtctgggatgggatcgactggtggcattgctggtgcgtcctcccttgctgcgtcgccgtcaatatcagccgggttcaaccctgcggcgctcctcccgttcttgcaggcgagcaagtggctcccctgcagcgacatagtcactgttgcaacgacgtcgcgcagctcaggacgcccagcaggttcaactgcttcgcctgtaccgcggacaactgcaccatcgccccgtcctacacaacgcgcagccgctccatctccctgccctgtgccatcacctgctgttgctgctccttccaaggtcggcatacaagcattggttggtagtgctagcatcgcctcaggttcagctgagattggaaggggagccattgcctctggtgtggctggaatggtgaagaagagtggtgctagtattcctgctggtgcaggggtgagaaggaagactggttggctctcaaagtgggtgagctcatgctcagatgatgcaaagacagtcttcgccgccgtgaccgtgccactgctctataaatcatccctagctgagccgagatccatcccatccaggtcaatgttcccaacatttgatgttggtgaccggatccttgctgagaaggtttcgtacattttccgggagccagaaattttggacattgtgatatttcgtgcacctccagtccttcaggcattgggctacaactcaggtgatgtgttcatcaagagagttgtggctaagagcggggacaccgttgaagtaagcttttatcccaatggtacgtgatggtaacttgttggttaatggagtagttcaggaggaggaatttgtgctggaaccagccaactatgaaatggatccgctgactgtgcctgaaggctatgtctttgtcctgggggataacagaaacaacagctttgattcacataactggggtccacttccatttaagaacatccttgggagatctgtgctccgatactggccaccatcgaggataacagatacaatatatgagcatgacatagtgcagtacacagctgctgcatcctgatagtacattgtggcaataccacatgctgcaggtccatttttcctttccctgctgacaaagggttatgctgagcctttaggttctttatttactggctgtagccttgcctcaaatgtcgattgcgcagcttggcagacagattgatttttttttcactccctacgggcagatgcttgttcgaaagcaacaaattttctctgtagctaagaatgaatgtcatataaatgttgcagaagtagatgaacgagcatcaatgagtgataaggatgtcagttctcttgttttatgtgacgacatgttgttcaaaacttatgtaaaaaggaaatacaaagcataaaaggctgctcaacttgtgctatgtatctattcattattgcatctaggaccaaagattaaggcaaggtcagcctggtgcaaaggttttgg

SEQ ID NO: 11258 - DNA, 3570 bp, Zea Mays
cttattagccaatcatgtaacgtctttcaaactcagttgtttgatttcttttattactaggtgagtgtccgtgcgttgcaacgggaacatataataccaccgtttgcatttgagtcgtctaatttagacatattgtaaaggtcttggtgttcaatagaggcgttgagtgcacaaccactggcttgataacctcatgcagagcttgtgcaacttctggtggcccacaataaaaaggaatataatcgtagcagtgcacaggcacaaaaacagtattgatagtatgaaggaagaatcagcactcggtaaagattgggagtcgtggctcctggcatcaccgtccctgcctctccagcaattgaacttgtggcatcttagtcctgttccataggctgagatatcatcactggagatgaaactggaactgagacctgaactgccgaactggcgatggaactgaagcgagcttccacaggcacaagaggaaataccacaatagctagagagaccacaggtgcaggcttgcaggtagggccgcaacaggttgtggatcgtccaaatgttgctgctccatttcttgtgaagatgaacataagagcgaaagttgatcaggcgactaaaaagaaaaacgcaagaaacttcttattagcaaagaaggggtcaagaaataaataaatgtttttatgataataaggagctccaacaaaaatggggtgctacattaataaggaactcaaaactctcatactttagcgtcactatatattactcccgtaccacagagaaggtaacatgtagtgaagaataaaaataatttaggtgtctgcgttgctacgaggttaacaaaaatcattacaaatcattcatcagagttaaatgaatgagttaaatattggagagaggctaaaacgccatggagttttaataaaagagatggtttaattttaggaaatgaaaagagagcatattttaaggcaaaacgggaagcttcaaataaccatttccttctttgcctaaaacttatacatgtgggaacaaattaagaatgcaacaagttatgatatctaaaagaatgctaagtagcaaaattgacctgcaaagagagcagaactttaaaagcaaaaattcgttataatgattttacaatgctcgccatactatttggatttgggagttattttagatattctttcttgaatgcattcataaccagacaaacattactactccctgtcccatatacctccccatgctaatccctgtgattattagagttagaaacattcctctacatgatccaaaaaattctaattaacaatacaaagttgcctgaatagctccttgagagaaattacatttgtaaagttgtattcactgccaaccttttgaagaaaaccataaaaggcataaacatgtatcaactcacgattggtagaagaccatcattcaggcattaatatgttctgaatttaagagaagacatacgttataaggcactaatatgttctgaattactcctcaaaagaacaattttaaatgtaagaataaaaatgatgaacctgctcagcttagatgaaacgttcaattttatgtgttggatgctcatgaaaattaagagagaaaaatggcaccagctgttgtttgaaagaattctttagtctcatccttgttctcagcatacaactcaaatataacccgaatccctcacaaatacctgtttccacaaaaatgtggtgggttcctactaatatagaaccgtgcacataagaagctagaaacgttgctaaaagcagtacttacggcgtaaccagctcaggatggaacagcgagccgtcagtggccaatgtgtacaccagcgtggccaccacgagcaagcctagcgctgagaagaccgccctccacatgacgagggatacctgagtcgccatggtcacaatcgagaagaaatgatcgcagatttagtagggaagggcgaatagttgccggtgtaaaccaaagccttggggagtggggacgtgatcgatctgcggcatggaggcggagcaccgggtgtagagctggtggcggggggcgtggaatcatggagacgtgcggggcttgcggatggagccagactgctagagaacggtggggcggggtgggggcggctcgagaggatcgcgggtttgggggcagggccacgggggaggtggcggctggctgttgcggctcccgagcatcacgaccgcacctcggcacctgggcagccgccacgcgcagcccaccctaccacggcaccgtctctagagctaggggcgaccatgccggagatggccattttcgccgtggacaagcccgccgcctccctcccttcatcatttgctgccacgatcggtgcaggtgctgtcgccctggacaagcccaccacctccctctcttcctctgctgccacgatcggtgctggggcctcggcggcggcgtcgagatctcgcgagcgacgagtgcgctagagacgggatttgcgcgcttggggatcgcggaggataggggcataaccgtggatatggacgcctacactattgtcttaaagagtagtatagatgtgattaaatataaatatccacaaagcttcttttcttctactgaaaataggatatgaaaaataccataagcatcaaggcatcaatgtacagatatactagtgatgggaagcacaaagtacaccgagcaccaaattatccaagcatggaaaaggtttcgtacattttccgggagccagaaattttggacattgtgatatttcgtgcacctccagtccttcaggcattgggctacaactcaggtgatgtgttcatcaagagagttgtggctaagagcggggacaccgttgaagtacgtgatggtaacttgttggttaatggagtagttcaggaggaggaatttgtgctggaaccagccaactatgaaatggatccgctgactgtgcctgaaggctatgtctttgtcctgggggataacagaaacaacagctttgattcacataactggggtccacttccatttaagaacatccttgggagatctgtgctccgatactggccaccatcgaggataacagatacaatatatgagcatgacatagtgcagtacacagctgctgcatcctgatagtacattgtggcaataccacatgctgcaggtccatttttcctttccctgctgacaaagggttatgctgagcctttaggttctttatttactggctgtagccttgcctcaaatgtcgattgcgcagcttggcagacagattgatttttttttcactccctacgggcagatgcttgttcgaaagcaacaaattttctctgtagctaagaatgaatgtcatataaatgttgcagaagtagatgaacgagcatcaatgagtgataaggatgtcagttctcttgttttatgtgacgacatgttgttcaaaacttatgtaaaaaggaaatacaaagcataaaaggctgctcaacttgtgctatgtatctattcattattgcatctaggaccaaagattaaggcaaggtcagcctggtgcaaaggttttgg

SEQ ID NO: 11259 - DNA, 1337 bp, Zea Mays
tctttcaaactcagttgtttgatttcttttattactaggtgagtgtccgtgcgttgcaacgggaacatataataccaccgtttgcatttgagtcgtctaatttagacatattgtaaaggtcttggtgttcaatagaggcgttgagtgcacaaccactggcttgataacctcatgcagagcttgtgcaacttctggtggcccacaataaaaaggaatataatcgtagcagtgcacaggcacaaaaacagtattgatagtatgaaggaagaatcagcactcggtaaagattgggagtcgtggctcctggcatcaccgtccctgcctctccagcaattgaacttgtggcatcttagtcctgttccataggctgagatatcatcactggagatgaaactggaactgagacctgaactgccgaactggcgatggaactgaagcgagcttccacaggcacaagaggaaataccacaatagctagagagaccacaggtgcaggcttgcaggtagggccgcaacaggttgtggatcgtccaaatgttgctgctccatttggcgtaaccagctcaggatggaacagcgagccgtcagtggccaatgtgtacaccagcgtggccaccacgagcaagcctagcgctgagaagaccgccctccacatgacgagggatacctgagtcgccatggtcacaatcgagaagaaatgatcgcagatttagtagggaagggcgaatagttgccggtgtaaaccaaagccttggggagtggggacgtgatcgatctgcggcatggaggcggagcaccgggtgtagagctggtggcggggggcgtggaatcatggagacgtgcggggcttgcggatggagccagactgctagagaacggtggggcggggtgggggcggctcgagaggatcgcgggtttgggggcagggccacgggggaggtggcggctggctgttgcggctcccgagcatcacgaccgcacctcggcacctgggcagccgccacgcgcagcccaccctaccacggcaccgtctctagagctaggggcgaccatgccggagatggccattttcgccgtggacaagcccgccgcctccctcccttcatcatttgctgccacgatcggtgcaggtgctgtcgccctggacaagcccaccacctccctctcttcctctgctgccacgatcggtgctggggcctcggcggcggcgtcgagatctcgcgagcgacgagtgcgctagagacgggatttgcgcgcttggggatcgcggaggataggggcataaccgtggatatggacgcctacactattgtcttaaagagtagtatagatgtgat

SEQ ID NO: 11260 - DNA, 899 bp, Zea Mays
tccagggccggcttaaaattgcagattttggatgggcggctcgttcaaatgctaaacgccacacactctgtggcacaatcgattatctggcaccagagatggtagagaaaaaagctcatgaccatgctgtggacaactggacattaggaatcctgtgctatgagttcttatatggttcacctccttttgaagctgatgaacaggatgataccttgagaagttagggtggatttggcattcccttcatctccttgtgtatcttcagaggctaaggatctcatttccaagcttctagttaaggattcaagcaagaggctttgccttgaagacatcatgaagcatccatggataaagaagaatgcagacccttcaggcagttgcattaagcaaaaagatgtcacaagatcaaagcttctgtaatatcagtacaacgtgcttgccagtgggcaagaaccttctgatgtggtgccaaactcgtcactactggaggacaaatataatgacctgttgtagttttaagttccgatagttctggagtggattggtgtgtgtgtgtatccctgcaagctttctcctacaggctggagttctagttctgatacagcgtttgtgttacccttttgaactgagtggtgaaaccaatgttcactggagaggaatgtagttttcaactgagttgttgaaccttcgcgaattggagggtcaatggtctgtggagattggagaggaacgtggctttcgctgtggcgatcgtattttgtaattgtcgaatctacagtattttggtctttagcaatgatatatggaatggagatgcacgtagtttttttatgacgcgaaaagggagggaaaaaactggtaaatttcaaatggccatatatctattattatgagtttaa

SEQ ID NO: 11261 - DNA, 1562 bp, Zea Mays
gaaaaagcctagttcgcgttactcgacacacctaggaccgtgtccgactcgagcccaaaccgcgtcacccactcaccccctcccccaatcgtctcgctcgcaagtcgcatcgcacgtacggtctcaggcgcatcggcctcgccgctgcacaacgccggagacgatacgacggcggctacgggatgacggtcttccacttcctcaactgcgccttcctcaccttcgggcctcacgtcagagtatgatacaatcggcacttctataaaagcagctgctgtttatcttggaactgcgcttgtaaagcttgtttgcttggcaacattgctcaaagtacctgagaatgatagctttgacccctatcaggagttaatgaaagtttttattggattcatagatgtagctggactgtattttgctttgacccagctgacccacagaaacatctctcagaatcataagttccaggctgttggtcttggttgggcttttgctgattcagttttgcaccgactggcacctctctggattggggcaagagggcttgaatttacatgggagtacatatttcaaggacttgaagcgaatgctaatcttgtgatgaccctctcccttgctgcattggggtccttgatgtggcttaggaagaacaagcctaggactttggttccaataatttatgcatgtgctctgctcttggcaacaatgccatctatcaccagctacttgaggaggtcattggagtggcagacaccaaaggtggttggcttcgagctcttctcctcccttgttatggctttcatcagctggcagctgttctcggcttgtcagagaccgatgtaacaagacatccataccactgccaattttacgtgcaatttgaagctcctgagtacgtcagaagaattaggaagatcctttgaactttgagctacaactcttcttcttggcgttcggttacagaacattttacttagaacatctgttgtaacttgtgagctgtagagcagaaacacatgcctgaaatgagttattctataacagatgctcatgtaggcgtttgatctgaaacatttgtttattattattgcggtgtgcatttcagatgctctctttaaagtcgcatcatctagcgtatagatcatgtcccagagaccgttttttttttaaattgaccttttttgtcaaaaatattcatatataccctttgcatccttggatcataggtctcggtccgtatcctttgcgtggtgacggacatgacgttgacgtggcatattttggtgttaaccatgtaggcattgccaggcttagcgttgacctttagaattgtcgtgttgtagcgtgtaaaagttgcttgtagcctgtgtaaacgcatgtataatatatattaatgcatcatgagagcatgtccaagagactatttttgacattgtatttgactttatttacctcttaataaagattaaactctataaatagcatctcactctaactctaatagataagttagtttggttagtgagaaagttaatttaaaaagctagatagcttaacaaattgga

SEQ ID NO: 11262 - DNA, 1563 bp, Zea Mays
gaaaaagcctagttcgcgttactcgacacacctaggaccgtgtccgactcgagcccaaaccgcgtcacccactcaccccctcccccaatcgtctcgctcgcaagtcgcatcgcacgtacggtctcaggcgcatcggcctcgccgctgcacaacgccggagacgatacgacggcggctacgggatgacggtcttccacttcctcaactgcgccttcctcaccttcgggcctcacggtcagagtatgatacaatcggcacttctataaaagcagctgctgtttatcttggaactgcgcttgtaaagcttgtttgcttggcaacattgctcaaagtacctgagaatgatagctttgacccctatcaggagttaatgaaagtttttattggattcatagatgtagctggactgtattttgctttgacccagctgacccacagaaacatctctcagaatcataagttccaggctgttggtcttggttgggcttttgctgattcagttttgcaccgactggcacctctctggattggggcaagagggcttgaatttacatgggagtacatatttcaaggacttgaagcgaatgctaatcttgtgatgaccctctcccttgctgcattggggtccttgatgtggcttaggaagaacaagcctaggactttggttccaataatttatgcatgtgctctgctcttggcaacaatgccatctatcaccagctacttgaggaggtcattggagtggcagacaccaaaggtggttggcttcgagctcttctcctcccttgttatggctttcatcagctggcagctgttctcggcttgtcagagaccgatgtaacaagacatccataccactgccaattttacgtgcaatttgaagctcctgagtacgtcagaagaattaggaagatcctttgaactttgagctacaactcttcttcttggcgttcggttacagaacattttacttagaacatctgttgtaacttgtgagctgtagagcagaaacacatgcctgaaatgagttattctataacagatgctcatgtaggcgtttgatctgaaacatttgtttattattattgcggtgtgcatttcagatgctctctttaaagtcgcatcatctagcgtatagatcatgtcccagagaccgttttttttttaaattgaccttttttgtcaaaaatattcatatataccctttgcatccttggatcataggtctcggtccgtatcctttgcgtggtgacggacatgacgttgacgtggcatattttggtgttaaccatgtaggcattgccaggcttagcgttgacctttagaattgtcgtgttgtagcgtgtaaaagttgcttgtagcctgtgtaaacgcatgtataatatatattaatgcatcatgagagcatgtccaagagactatttttgacattgtatttgactttatttacctcttaataaagattaaactctataaatagcatctcactctaactctaatagataagttagtttggttagtgagaaagttaatttaaaaagctagatagcttaacaaattgga

SEQ ID NO: 11263 - DNA, 1557 bp, Zea Mays
gaaaaagcctagttcgcgttactcgacacacctaggaccgtgtccgactcgagcccaaaccgcgtcacccactcaccccctcccccaatcgtctcgctcgcaagtcgcatcgcacgtacggtctcaggcgcatcggcctcgccgctgcacaacgccggagacgatacgacggcggctacgggatgacggtcttccacttcctcaactgcgccttcctcaccttcgggcctcacgtcgtctactactccgccacgcccctgtcagagtatgatacaatcggcacttctataaaagcagctgctgtttatcttggaactgcgcttgtaaagcttgtttgcttggcaacattgctcaaagtacctgagaatgatagctttgacccctatcagatgtagctggactgtattttgctttgacccagctgacccacagaaacatctctcagaatcataagttccaggctgttggtcttggttgggcttttgctgattcagttttgcaccgactggcacctctctggattggggcaagagggcttgaatttacatgggagtacatatttcaaggacttgaagcgaatgctaatcttgtgatgaccctctcccttgctgcattggggtccttgatgtggcttaggaagaacaagcctaggactttggttccaataatttatgcatgtgctctgctcttggcaacaatgccatctatcaccagctacttgaggaggtcattggagtggcagacaccaaaggtggttggcttcgagctcttctcctcccttgttatggctttcatcagctggcagctgttctcggcttgtcagagaccgatgtaacaagacatccataccactgccaattttacgtgcaatttgaagctcctgagtacgtcagaagaattaggaagatcctttgaactttgagctacaactcttcttcttggcgttcggttacagaacattttacttagaacatctgttgtaacttgtgagctgtagagcagaaacacatgcctgaaatgagttattctataacagatgctcatgtaggcgtttgatctgaaacatttgtttattattattgcggtgtgcatttcagatgctctctttaaagtcgcatcatctagcgtatagatcatgtcccagagaccgttttttttttaaattgaccttttttgtcaaaaatattcatatataccctttgcatccttggatcataggtctcggtccgtatcctttgcgtggtgacggacatgacgttgacgtggcatattttggtgttaaccatgtaggcattgccaggcttagcgttgacctttagaattgtcgtgttgtagcgtgtaaaagttgcttgtagcctgtgtaaacgcatgtataatatatattaatgcatcatgagagcatgtccaagagactatttttgacattgtatttgactttatttacctcttaataaagattaaactctataaatagcatctcactctaactctaatagataagttagtttggttagtgagaaagttaatttaaaaagctagatagcttaacaaattgga

SEQ ID NO: 11264 - DNA, 1113 bp, Zea Mays
atggccttcttagacgactcaagtggtgctctggagttcgatgtcgcgcaccatggagttgcaaagcgccggagttcgacgctgcctattcgctgtatcgttttctaattacccggggaggaccggtaacaagtttctacaggactggtattaaaccaacgactcaacatgcatgcagccagagttaactatacaacgggcccatttgctgcctctaagtatatattcttggatggatatcttttggctctaacgatattattataataactcatgggtaaggttatgggtacaataatggaaacttggatggatatatctggatggatatatctacatatcaacgtctttttagattatctcatgtataatgacatgcaagttttttatatgatatggaggagagatatataagtgaaaggaaataaatgcgcataggtcattattgtttcatggaccaaccatcttgtgagtaagaatttagaactacgaggcaatgtttcactatattgtttggtttgagaaaccactccatccaaaataaggtggtgcagtatggatcaatgtatttctcaaatttggtgggaatgatctcattcctaatattagtactaactaactatgaggaatgaggttgtgatggatcaactcatgttattccataaaccaaacaaaaaaagtgaggagtaagaagatgatgaattagctcattctcaaaccaaacaccctatatataggtctcgtggttatgtgaatatatgaatcgtctgtatatgagacaacacaaatatacttgcatatgtacccttgaatttctgttatttgatttacaaatggcaaaaaaatctgccgggtgatgagatttatctgcggagaaaataatgccaaacattttttttaaaaaaaaagcaaagaaaacaatgcagaacatttcatgcagatagtgtttcacaagctgtatactagcaagagataaatataattcagttggaggatgtaatttgatgttaattaggtaagtctgtaagcactagagagagtttgtaatgcttatgcactgcctttccaaaacagctggatttgaactagggaacatgtagggatggcaacggg

SEQ ID NO: 11265 - DNA, 1268 bp, Zea Mays
cccccccgccatccttcaccggagtccgatgctggtcccgtccgtcctcttcgctccacccccgcccccggtggggcctgcgccggccaaggaccctcgcctgcgtcgtgccgcccgactccgcggagccacagacgggtgagcaagatgcgaaagttgagtctgccgaagaagaggctcggactagtataccccaggatgctgagcttccagctctcccaaacaaggatctcaacagaagggtagcactactgtctactcttgggggctggggcggtagctctctttgcatcccagaggctcaatcttagcgagatatctcttaaagatgttgcagccaatgcggttccatatgaagagggaccgtgtcaatttcgtaatgctgaatgttgacagcacaaagtgggaacaggagctcgacgagatcggggtggaaggcattccccactttgcctttctggataaggaaggaaatgaggaaggcaatgttgttgggagacttccaaagcagtatttccttgacaacgtggttgcgctcgcttctggtaatcccagtgtacccgatgcacgagtggtcggtcagttctcgagcgctgagtctaggaaagttcaccaagttgctgatgccaggagtcatggctagcagttgtttatgtgggggcagcagtggttctagtttaactggcaagaccatgtgacagttatagcaagattctatagtgggtcaccacaagtctagaaaccgtggatttcttttgcacactgaaatgacttctggccatcaaaaaaacattggaccttttgtgaaggcaggttttggaaccaaggagagatggaaggctatactatagtgtattcaatcttctcggtatcgagcatgcgggcgctggaaagagctgttagattccacagatcacagaagaaaagggcgtgatatgctgtgcatgtgcgtgtggattccgggtccactcccatcgtcggcgcgggttcgtcagcgacactggaacggttgcatgctgtacggcaaatgcagagatgctgtatgtttttttagacacagcagggtgtgggtggctcacgaaagaagcttttgcttgtattcgttgctcgtgtaacacatgttcacgctgcccttttcaagaattcaaggtgccgtttggttcacataattgtaacgtaatgggtaacggataacgttaaatcatgtttgttttagtccaactgtaatcagataccacactaaaatttgataccagtctattcaaatt

SEQ ID NO: 11266 - DNA, 1296 bp, Zea Mays
cccccccgccatccttcaccggagtccgatgctggtcccgtccgtcctcttcgctccacccccgcccccggtggggcctgcgccggccaaggaccctcgcctgcgtcgtgccgcccgactccgcggagccacagacgggtgagcaagatgcgaaagttgagtctgccgaagaagaggctcggactagtataccccaggatgctgagcttccagctctcccaaacaaggatctcaacagaagggtagcactactgtctactcttgggggctggggcggtagctctctttgcatcccagaggctcaatcttagcgagatatctcttaaagatgttgcagccaatgcggttccatatgaagagatatttttcttcactacaaatgcttaaatttaacctgataaattcatctgcgggctctttcaaatggcaagcccactgttgttgagttttatgcggactggtgtgaagtctgcagagagttatctccagatatctacaaagttgaacaatacaaggaccgtgtcaatttcgtaatgctgaatgttgacagcacaaagtgggaacaggagctcgacgagatcggggtggaaggcattccccactttgcctttctggataaggaaggaaatgaggaaggcaatgttgttgggagacttccaaagcagtatttccttgacaacgtggttgcgctcgcttctggtaatcccagtgtacccgatgcacgagtggtcggtcagttctcgagcgctgagtctaggaaagttcaccaagttgctgatgccaggagtcatggctagcagttgtttatgtgggggcagcagtggttctagtttaactggcaagaccatgtgacaggagagatggaaggctatactatagtgtattcaatcttctcggtatcgagcatgcgggcgctggaaagagctgttagattccacagatcacagaagaaaagggcgtgatatgctgtgcatgtgcgtgtggattccgggtccactcccatcgtcggcgcgggttcgtcagcgacactggaacggttgcatgctgtacggcaaatgcagagatgctgtatgtttttttagacacagcagggtgtgggtggctcacgaaagaagcttttgcttgtattcgttgctcgtgtaacacatgttcacgctgcccttttcaagaattcaaggtgccgtttggttcacataattgtaacgtaatgggtaacggataacgttaaatcatgtttgttttagtccaactgtaatcagataccacactaaaatttgataccagtctattcaaatt

SEQ ID NO: 11267 - DNA, 2847 bp, Zea Mays
gagacttattttataaacttgatctcacaaactttctcttatttggtctctgtatgatggaattatgtcattttataatctctgttcattcagtcaatcgttgtgaactctcttctaatcgctcacttcattggctgtgttgtaccaagacatatttgcatggagtaaacaataacatcagttagccaaatcaaaaaatatattatacagagaggggagacaatcaataaaaaaatcttgaaatttttttgatggatagtttacgtgggtattgttgtaagccgtcacaacgcacgggcaaccgactagtattcacatcaaggacagctaatattttgaccaaaatctcaaggtacctgaacactgaagtagcatactattagcagtccggtgagtgaagctactgatactgaagacgcgggagaagaaaagacgcgtccagtcgtaggcgtcgtccgaacaagcgtgttcatgggccagagtgtgccaaatgagttctagctttaggcgagtcggccaaatgagtgtgggctccgtcccagggtagtataagtactatgagtctgtaataatcaggacaagaagaatttgggtaaaggaatacatctatcgccatcttcctgtcattctctcccacacgctactctcttctctgatcttctctccctcgaatcccagtagcatccagtagctaacatctgatatcagactagcgcaatccgggatcgtcatccgcgttcgattgctgtggtcggaatggaatccgcgatgcatcatattctggaagctttgggtcagatggaggagcgattgacggcaacgctggaaggcagatgcggcgcactcgagcaacgcaacacaacggccatggcgcatctgaggcgcggctgcgtcgggctgggcgatggcgcgtgcgcgtcagtggccacggccatggacaacttctccttcgactcgttcaagggccccaccactaccaccacctccgccgccgccgcgctacagtacgacaacgacgagctggtcctcgatgcagggcctattttcggtgaggaacctatcttcgatggagagtcgtctccgtccacgaggttcgactcgccctcgccgttcaacccgtactacttcacgctgccgcagacgccagctgagctggtggacgagccaaaccacaacgaggcaagtcctctgtctctcgtccacgacgactgggtcgacctcttcctccagaccggctcctgccccgagtgctcgcgatactgcctcctcctggaccacatggccctcggctacttcccctactctgagctcgccgccgtgcccaccaagtgttcaatgctggtcctcaaccgtggcaccgacgaagggggcaaccttcaattgcaacattccaccacctcacagctgcttaacagcgggtacctgttcgacatccggccggacctggtgaagggcgactctgtcgtgctgccactggaattcgcttccgccgtagagggtcgcgtgttgctgacgacgtggtggccacaggatgcggcgctccagcatgaggcggttggggtgtttctcactcactccaactggaactcctcccaagagagcctctgcgcgggggtgcccatgccgagcgttcgtgctccagcaggtgttgttcagtgctcgtcaacagggccacccgtgttcacgctcatcaacagggccaccggcctcgccatcaagcactcgctcggccagttccatcccatgctggtcccttacaacccggagtacctggataggaccctgacatcaagtttatcacacatgcttccatatgcaaagacattttcagctgctgatggacgtttgccccaatggcgcgcttctgagtatgatgttgaatcaagtttctctagtgatgccatcctaaaggtcagtgcggctgctgaaacagtcgagaaagtttaccaggggcaattggttggtccaaccacatttgcagcaaagttgcagccttatctttggagttttaatcaggtgaaagagaacatcctcttccagcacatcaacgttgcctgtggctactaccctgttggaaaggggtttgtgctggtagctgacaacttgggtgatggcctctttgctgtcagcaatgagtttcactcagtcatcgtcgtatcccagaatattgtggaccatatccggccaaggtttttcactgctaatctcaccaatgcaacctcaattgatgatgcgattgtttggttctgttctgcaaccaatgccacacatgctgtttcgaaactttaccaccgtgaggcgacgaaccagaggttgaaggtggcagaggcggccatgaggagccaggacaagaacgccatcatggcagacagctggtacctcccgcagaacgtcggggagctgtgggatccatggagctggaggaggaggtcgatcaccgcggcgctcgagcaggcggcggcgaacgagactatcgacagggcctgcgagatttcagatttgcacttgaactctttttttttaaaaattttgaattggcacgccgggacgcagaagaagactgtagagagatacgtacgcagtctcctaccacgacgatgaccatgacgcccggcacgcgcagagggcatcccacgaacacggagtacacgtcgatcatggccagcgtgcagctccaggggatgaccagccccatgatcgtcaccaggaagctgtttagcagccagcgtcacacacacaggattaggacgaccgcccgaccacacgttcgatcagcctgacggccttcagcgctggcgctgtggctgaaataccaaaacagatggcgcggatgcaacagagagaagg

SEQ ID NO: 11268 - DNA, 1812 bp, Zea Mays
tcaaataatgggtcacaatcacaacaagattcttcagctcgagaagcacctcaaggatcaacaggctgtgcgtggtgcgctggaaaaggctttagggcctaacgctggccctgtcagcttgtcgccagagaatccaatgccacaggcagctaatgaattgatacgggagattgctacattggagctggaggtcaagaacatggagcagtatctcctgacgctgtaccggaaagcatttgagcagcagcaagcgcctgcgttttccccccctgaccgccgggaagcttcgaagccgtcagtgagctcgcgttctgggcagctccgggaaacgcccatggcaacgaagtcttcttgcaagagtagaggggacgcagcactgcggtccagttacccgccagcgcataagaaactgaacgatccattggcggattgctgcacatctgctcgatttgatagagtggttgattcagacgtcctccgctgccagtctgcgttgtcataccgtggagtttgttcgtccaggatattgccttcggaggacgatagtcttgcaagggctcttcgctcgtgccactcgcagcctttctcattcgtagaggaaggagacaccggtgcatcagggatgataagcttagcagagtatctaggaactaatgtagctgaccacatccctgaaactccaaacaacctgtcagaggagatggtgagatgcatggcggggatatactgcagactcgcagatcctcccttggttcaccacggctcgtcctcttcaccgtcgtcgtcgttctcctcgactagcgcaatctctccgcagtatgtgggggacatgtggagtcccaaatacaggagagaggcgactctggactcccgtctgataaacccgttccatgtcgatggtctgaaggagttcagtggaccttacaacacaatggttgaggttcctatgattagccgggacagtcggaggctgaaagaagccgaggacctgctccagacttacaagttgattttgtatcggttggaagccgttgatctgaggagaatgacagatgaagaaaagatcgcattctgggtcaacatacacaatgctttgctgatgcatgcttatctgaagaatggcgtcccacagaacaatctaaagaaaacatccctacttgttaaggctgcctgcaaaatagccggacgcaacatcaacgccgccgtcatccagagcattgttcttgggtgcaacacacactgccccggacaggtgagggtgtacactccgaagcggctgttccaccagctggagtcggccaaggaggagttcatccgggcgacggccggcgtgtggaaggagcagaagctgctgctccccaagctggtggaggcgtacgccaaggacgtgaagctctcgccgcagggcctcgtggacatggtccagcgctacctcccggagagcatgaggatggccgtgcagcggtgccagcacggcggcaggtcgtcgggcaaggtcgtggagtgggtgtcctacaacccggccttccgctacctgctcgccagggacctcgcgttccctcacctcagctgaccgttcgttaatctttagtagtatatgcgtgtgtgccatagggttagaagtagagaagggatcatgtgcagtttttgtgtggtggttgtcaatggcttttgtagatgatgaacaggaaacaggggaagaaatgagagaaagcacgtttgacaatggactctgtttgtgacatgtgtcgtcgccttccttctcttgctcatgtcatcgccatggtcacctccttgcgctacagaattagc

SEQ ID NO: 11269 - DNA, 2693 bp, Zea Mays
ggaaaagttgcgtgtggcgtttttcacaagatgtcacagtcaacggcctttttgcaggctcgccactagcgttggcgctcgcttgtgctgtatatatgcacatacacacgcagacgcagtgctcagtgggggtggatgcagagcagttggatcggggacacacacagagagagagagggctttgctttccgttttcctctccaaatggctcatttagctcttgaccggaagagtggagggtggtggtgcgggtagagatagagatagatggcactcgtcggtgtggacagtgctgggttccttggagcttagcgtgacttcatcagaagacgccgtttgcctgcctggctgcttggtcttgggtcgacgaccggagccccctccctcgtgctcgccttcttcctccctgtccctgtccctgctaccgagtttccgggcgctgaccactgggcaactacagctgatctctctctgccgcggcatggaggtggaggctctggagaagaaggggcacgcagcttttgccaaggcgatgaaatctttcggctcttccgagcggtacaagcgatccacgagtggcagatattttgaggatatgtatgctacagacgctttgcgttcttcagacaagacgattgttctacctatgccggaagtggtaaaagctaaggtcaaatgtgatatcactaaggaagctcaacccgggaggggagcacaaagcaccttgagaaaggagattcttcagctcgagaagcacctcaaggatcaacaggctgtgcgtggtgcgctggaaaaggctttagggcctaacgctggccctgtcagcttgtcgccagagaatccaatgccacaggcagctaatgaattgatacgggagattgctacattggagctggaggtcaagaacatggagcagtatctcctgacgctgtaccggaaagcatttgagcagcagcaagcgcctgcgttttccccccctgaccgccgggaagcttcgaagccgtcagtgagctcgcgttctgggcagctccgggaaacgcccatggcaacgaagtcttcttgcaagagtagaggggacgcagcactgcggtccagttacccgccagcgcataagaaactgaacgatccattggcggattgctgcacatctgctcgatttgatagagtggttgattcagacgtcctccgctgccagtctgcgttgtcataccgtggagtttgttcgtccaggatattgccttcggaggacgatagtcttgcaagggctcttcgctcgtgccactcgcagcctttctcattcgtagaggaaggagacaccggtgcatcagggatgataagcttagcagagtatctaggaactaatgtagctgaccacatccctgaaactccaaacaacctgtcagaggagatggtgagatgcatggcggggatatactgcagactcgcagatcctcccttggttcaccacggctcgtcctcttcaccgtcgtcgtcgttctcctcgactagcgcaatctctccgcagtatgtgggggacatgtggagtcccaaatacaggagagaggcgactctggactcccgtctgataaacccgttccatgtcgatggtctgaaggagttcagtggaccttacaacacaatggttgaggttcctatgattagccgggacagtcggaggctgaaagaagccgaggacctgctccagacttacaagttgattttgtatcggttggaagccgttgatctgaggagaatgacagatgaagaaaagatcgcattctgggtcaacatacacaatgctttgctgatgcatgcttatctgaagaatggcgtcccacagaacaatctaaagaaaacatccctacttgttaaggctgcctgcaaaatagccggacgcaacatcaacgccgccgtcatccagagcattgttcttgggtgcaacacacactgccccggacaggcatgctaatttcagcttcggcccttttaatgcagtggctacggacgctgctttaccccaggatcaaaagcaaggtgagcaaagcggggcatgagtggcgggcctttgccgttgcgcaaccggagcctcttttacgctttgcgctttgttccggcagccattctgatcccgcggtgagggtgtacactccgaagcggctgttccaccagctggagtcggccaaggaggagttcatccgggcgacggccggcgtgtggaaggagcagaagctgctgctccccaagctggtggaggcgtacgccaaggacgtgaagctctcgccgcagggcctcgtggacatggtccagcgctacctcccggagagcatgaggatggccgtgcagcggtgccagcacggcggcaggtcgtcgggcaaggtcgtggagtgggtgtcctacaacccggccttccgctacctgctcgccagggacctcgcgttccctcacctcagctgaccgttcgttaatctttagtagtatatgcgtgtgtgccatagggttagaagtagagaagggatcatgtgcagtttttgtgtggtggttgtcaatggcttttgtagatgatgaacaggaaacaggggaagaaatgagagaaagcacgtttgacaatggactctgtttgtgacatgtgtcgtcgccttccttctcttgctcatgtcatcgccatggtcacctccttgcgctacagaattagc

SEQ ID NO: 11270 - DNA, 2687 bp, Zea Mays
gtcacagcaaggaacgaacggaaccccaggacaggggaaaagttgcgtgtggcgtttttcacaagatgtcacagtcaacggcctttttgcaggctcgccactagcgttggcgctcgcttgtgctgtatatatgcacatacacacgcagacgcagtgctcagtgggggtggatgcagagcagttggatcggggacacacacagagagagagagggctttgctttccgttttcctctccaaatggctcatttagctcttgaccggaagagtggagggtggtggtgcgggtagagatagagatagatggcactcgtcggtgtggacagtgctgggttccttggagcttagcgtgacttcatcagaagacgccgtttgcctgcctggctgcttggtcttgggtcgacgaccggagccccctccctcgtgctcgccttcttcctccctgtccctgtccctgctaccgagtttccgggcgctgaccactgggcaactacagctgatctctctctgccgcggcatggaggtggaggctctggagaagaaggggcacgcagcttttgccaaggcgatgaaatctttcggctcttccgagcggtacaagcgatccacgagatattttgaggatatgtatgctacagacgctttgcgttcttcagacaagacgattgttctacctatgccggaagtggtaaaagctaaggtcaaatgtgatatcactaaggaagctcaacccgggaggggagcacaaagcaccttgagaaaggagattcttcagctcgagaagcacctcaaggatcaacaggctgtgcgtggtgcgctggaaaaggctttagggcctaacgctggccctgtcagcttgtcgccagagaatccaatgccacaggcagctaatgaattgatacgggagattgctacattggagctggaggtcaagaacatggagcagtatctcctgacgctgtaccggaaagcatttgagcagcagcaagcgcctgcgttttccccccctgaccgccgggaagcttcgaagccgtcagtgagctcgcgttctgggcagctccgggaaacgcccatggcaacgaagtcttcttgcaagagtagaggggacgcagcactgcggtccagttacccgccagcgcataagaaactgaacgatccattggcggattgctgcacatctgctcgatttgatagagtggttgattcagacgtcctccgctgccagtctgcgttgtcataccgtggagtttgttcgtccaggatattgccttcggaggacgatagtcttgcaagggctcttcgctcgtgccactcgcagcctttctcattcgtagaggaaggagacaccggtgcatcagggatgataagcttagcagagtatctaggaactaatgtagctgaccacatccctgaaactccaaacaacctgtcagaggagatggtgagatgcatggcggggatatactgcagactcgcagatcctcccttggttcaccacggctcgtcctcttcaccgtcgtcgtcgttctcctcgactagcgcaatctctccgcagtatgtgggggacatgtggagtcccaaatacaggagagaggcgactctggactcccgtctgataaacccgttccatgtcgatggtctgaaggagttcagtggaccttacaacacaatggttgaggttcctatgattagccgggacagtcggaggctgaaagaagccgaggacctgctccagacttacaagttgattttgtatcggttggaagccgttgatctgaggagaatgacagatgaagaaaagatcgcattctgggtcaacatacacaatgctttgctgatgcatgcttatctgaagaatggcgtcccacagaacaatctaaagaaaacatccctacttgttaaggctgcctgcaaaatagccggacgcaacatcaacgccgccgtcatccagagcattgttcttgggtgcaacacacactgccccggacagtggctacggacgctgctttaccccaggatcaaaagcaaggtgagcaaagcggggcatgagtggcgggcctttgccgttgcgcaaccggagcctcttttacgctttgcgctttgttccggcagccattctgatcccgcggtgagggtgtacactccgaagcggctgttccaccagctggagtcggccaaggaggagttcatccgggcgacggccggcgtgtggaaggagcagaagctgctgctccccaagctggtggaggcgtacgccaaggacgtgaagctctcgccgcagggcctcgtggacatggtccagcgctacctcccggagagcatgaggatggccgtgcagcggtgccagcacggcggcaggtcgtcgggcaaggtcgtggagtgggtgtcctacaacccggccttccgctacctgctcgccagggacctcgcgttccctcacctcagctgaccgttcgttaatctttagtagtatatgcgtgtgtgccatagggttagaagtagagaagggatcatgtgcagtttttgtgtggtggttgtcaatggcttttgtagatgatgaacaggaaacaggggaagaaatgagagaaagcacgtttgacaatggactctgtttgtgacatgtgtcgtcgccttccttctcttgctcatgtcatcgccatggtcacctccttgcgctacagaattagc

SEQ ID NO: 11271 - DNA, 3041 bp, Zea Mays
gtcagtttggtaacacaaggtttgtggctctattatcaggagctggaggcgttaaaggctttgcactgatatatgctcccataaccatactctcactccaacccacatgtctgtctgatgtctcatgtcgctgtatcagggtttggggggtagagaagcctgattagggcacaaattaccaggctggctgaaaaggtttcccctttccctaccctggtttctctggacgcaaaaaaaagaaagaaagaaaaacatagaaaacccggaggactagagcgaacgagggtttcagacctgacctggggcatgcggaaaaggcgtagtggttaacctattcattcatcatccgtcacagcaaggaacgaacggaaccccaggacaggggaaaagttgcgtgtggcgtttttcacaagatgtcacagtcaacggcctttttgcaggctcgccactagcgttggcgctcgcttgtgctgtatatatgcacatacacacgcagacgcagtgctcagtgggggtggatgcagagcagttggatcggggacacacacagagagagagagggctttgctttccgttttcctctccaaatggctcatttagctcttgaccggaagagtggagggtggtggtgcgggtagagatagagatagatggcactcgtcggtgtggacagtgctgggttccttggagcttagcgtgacttcatcagaagacgccgtttgcctgcctggctgcttggtcttgggtcgacgaccggagccccctccctcgtgctcgccttcttcctccctgtccctgtccctgctaccgagtttccgggcgctgaccactgggcaactacagctgatctctctctgccgcggcatggaggtggaggctctggagaagaaggggcacgcagcttttgccaaggcgatgaaatctttcggctcttccgagcggtacaagcgatccacgagtggcagatattttgaggatatgtatgctacagacgctttgcgttcttcagacaagacgattgttctacctatgccggaagtggtaaaagctaaggtcaaatgtgatatcactaaggaagctcaacccgggaggggagcacaaagcaccttgagaaaggagattcttcagctcgagaagcacctcaaggatcaacaggctgtgcgtggtgcgctggaaaaggctttagggcctaacgctggccctgtcagcttgtcgccagagaatccaatgccacaggcagctaatgaattgatacgggagattgctacattggagctggaggtcaagaacatggagcagtatctcctgacgctgtaccggaaagcatttgagcagcagcaagcgcctgcgttttccccccctgaccgccgggaagcttcgaagccgtcagtgagctcgcgttctgggcagctccgggaaacgcccatggcaacgaagtcttcttgcaagagtagaggggacgcagcactgcggtccagttacccgccagcgcataagaaactgaacgatccattggcggattgctgcacatctgctcgatttgatagagtggttgattcagacgtcctccgctgccagtctgcgttgtcataccgtggagtttgttcgtccaggatattgccttcggaggacgatagtcttgcaagggctcttcgctcgtgccactcgcagcctttctcattcgtagaggaaggagacaccggtgcatcagggatgataagcttagcagagtatctaggaactaatgtagctgaccacatccctgaaactccaaacaacctgtcagaggagatggtgagatgcatggcggggatatactgcagactcgcagatcctcccttggttcaccacggctcgtcctcttcaccgtcgtcgtcgttctcctcgactagcgcaatctctccgcagtatgtgggggacatgtggagtcccaaatacaggagagaggcgactctggactcccgtctgataaacccgttccatgtcgatggtctgaaggagttcagtggaccttacaacacaatggttgaggttcctatgattagccgggacagtcggaggctgaaagaagccgaggacctgctccagacttacaagttgattttgtatcggttggaagccgttgatctgaggagaatgacagatgaagaaaagatcgcattctgggtcaacatacacaatgctttgctgatgcatgcttatctgaagaatggcgtcccacagaacaatctaaagaaaacatccctacttgttaaggctgcctgcaaaatagccggacgcaacatcaacgccgccgtcatccagagcattgttcttgggtgcaacacacactgccccggacagtggctacggacgctgctttaccccaggatcaaaagcaaggtgagcaaagcggggcatgagtggcgggcctttgccgttgcgcaaccggagcctcttttacgctttgcgctttgttccggcagccattctgatcccgcggtgagggtgtacactccgaagcggctgttccaccagctggagtcggccaaggaggagttcatccgggcgacggccggcgtgtggaaggagcagaagctgctgctccccaagctggtggaggcgtacgccaaggacgtgaagctctcgccgcagggcctcgtggacatggtccagcgctacctcccggagagcatgaggatggccgtgcagcggtgccagcacggcggcaggtcgtcgggcaaggtcgtggagtgggtgtcctacaacccggccttccgctacctgctcgccagggacctcgcgttccctcacctcagctgaccgttcgttaatctttagtagtatatgcgtgtgtgccatagggttagaagtagagaagggatcatgtgcagtttttgtgtggtggttgtcaatggcttttgtagatgatgaacaggaaacaggggaagaaatgagagaaagcacgtttgacaatggactctgtttgtgacatgtgtcgtcgccttccttctcttgctcatgtcatcgccatggtcacctccttgcgctacagaattagc

SEQ ID NO: 11272 - DNA, 1928 bp, Zea Mays
ctttttgcaggctcgccactagcgttggcgctcgcttgtgctgtatatatgcacatacacacgcagacgcagtgctcagtgggggtggatgcagagcagttggatcggggacacacacagagagagagagggctttgctttccgttttcctctccaaatggctcatttagctcttgaccggaagagtggagggtggtggtgcgggtagagatagagatagatggcactcgtcggtgtggacagtgctgggttccttggagcttagcgtgacttcatcagaagacgccgtttgcctgcctggctgcttggtcttgggtcgacgaccggagccccctccctcgtgctcgccttcttcctccctgtccctgtccctgctaccgagtttccgggcgctgaccactgggcaactacagctgatctctctctgccgcggcatggaggtggaggctctggagaagaaggggcacgcagcttttgccaaggcgatgaaatctttcggctcttccgagcggtacaagcgatccacgagatattttgaggatatgtatgctacagacgctttgcgttcttcagacaagacgattgttctacctatgccggaagtggtaaaagctaaggtcaaatgtgatatcactaaggaagctcaacccgggaggggagcacaaagcaccttgagaaaggagattcttcagctcgagaagcacctcaaggatcaacaggctgtgcgtggtgcgctggaaaaggctttagggcctaacgctggccctgtcagcttgtcgccagagaatccaatgccacaggcagctaatgaattgatacgggagattgctacattggagctggaggtcaagaacatggagcagtatctcctgacgctgtaccggaaagcatttgagcagcagcaagcgcctgcgttttccccccctgaccgccgggaagcttcgaagccgtcagtgagctcgcgttctgggcagctccgggaaacgcccatggcaacgaagtcttcttgcaagagtagaggggacgcagcactgcggtccagttacccgccagcgcataagaaactgaacgatccattggcggattgctgcacatctgctcgatttgatagagtggttgattcagacgtcctccgctgccagtctgcgttgtcataccgtggagtttgttcgtccaggatattgccttcggaggacgatagtcttgcaagggctcttcgctcgtgccactcgcagcctttctcattcgtagaggaaggagacaccggtgcatcagggatgataagcttagcagagtatctaggaactaatgtagctgaccacatccctgaaactccaaacaacctgtcagaggagatggtgagatgcatggcggggatatactgcagactcgcagatcctcccttggttcaccacggctcgtcctcttcaccgtcgtcgtcgttctcctcgactagcgcaatctctccgcagtatgtgggggacatgtggagtcccaaatacaggagagaggcgactctggactcccgtctgataaacccgttccatgtcgatggtctgaaggagttcagtggaccttacaacacaatggttgaggttcctatgattagccgggacagtcggaggctgaaagaagccgaggacctgctccagacttacaagttgattttgtatcggttggaagccgttgatctgaggagaatgacagatgaagaaaagatcgcattctgggtcaacatacacaatgctttgctgatgcatgcttatctgaagaatggcgtcccacagaacaatctaaagaaaacatccctacttgttaaggctgcctgcaaaatagccggacgcaacatcaacgccgccgtcatccagagcattgttcttgggtgcaacacacactgccccggacaggcatgctaatttcagcttcgg

SEQ ID NO: 11273 - DNA, 943 bp, Zea Mays
ccgcgacgctccctatccatagcgcccgctcgcccatcagcccacgcggccacgccgaagtatggcgctctccgtctcctccctcgccgccgccctctcccacctctccctcccatcgacctccacccccaagcctcacccggccccgctcctgcgcctgcgctccacctaccgccgcgctgttagcctcgcgctccgcgcctccgcagccgaagccgccgaatcgttcgaggcggacctgcccgccgaggaggtgatggctgtcgaggaggaggcggaggaggatgcgctgtcgggaatcgcgctgcgaaagtatgtgaagcagcggctgccgggcgggttcgcggcgcagcggatcaccgccacgggccgtcgcaagacggccatcgcccgcgtcgtgctccaggagggcaccggcaaggagtatctgcagggaaatccaatgtggatggagtactgcaaggtacccttgatgactctagggtttgagaagaactatgacgtctttgtgaaagtacacgggggtggtctctcaggccaggcccaggcaatttgccttggtgttgcccgtgcgctggtgaaaatcagcaatgccaacagggttcctctgaagtcggaaggtttgctgacaagggacacccgtatcgttgaaaggaagaaggctggtctcaagaaggcacgcaagcggccccagttctcaaagcgttgaggacgttcacttgttgcattgccacttccagaggccctttttttttctgtcaactgctgtgcaaaatctgtaatggacacgatatatctgtagtgttattttcctgaagcaaatttcatgaggtggctatctgattctgctggtcaagtgtattctgcattggacgaacttatggccctatggccctgtttagcacaacttatttcacaactttttaaaagatttaaacggaag

SEQ ID NO: 11274 - DNA, 2273 bp, Zea Mays
cctctcttctctttttccacgggagggatgacgatgccgctcgcgcgcgacgccgcatcactccctcgccactcgcgcgcccgggctccttcccgccacgctcacgacgatgccgtccccgacgtcctatcttctcctgaatccctccaaaccctcctccttccgccgactctcggccccgcgcctgagccggttccatgtctcctgcgacgcgccacggggcggcgggaggcgcgaggtcatccccgccggtgccagcaaggccaagaaacagatcgtattcttcgacgccgccccgccggtgtcccaggagggtggaggcgccgtgaagaaggcggggagcgagaagcttacccaggtgggcagcggcaacgcagcgctggcgttgttgaggagggcaaccaagatgacactctcggtgctgtccaacctcccgctcgctatctccgagatgttcgccattgccgccctcatggctctaggaacggtgattgaccagggagaggcacccagctactacttcgagaagttccccgaggacaacccggtcttcggcttcatcacgtggaggtggatcctcacccccgggttcgaccacatgttctcctcgccagtcttcctcggcctccttgcgctcctcgcgacgtccctcatggcttgcacctacacgacccagctccccatggtcaaggtcgcaagaagatggtcgttcacacattccggagaaagaatacggaagcaggaatttgcggactcgcttccccaagcatccattcaggatttgggagtcatcttgatgggtgctggatatgaggtattcaccaagggtccatctttgtatgctttcaaagggctagctggtcggtatgcgcctatcggcgtgcacttggcgatgctcttcatcatggctggtgccacgctaagtgcgacaggaagctttaagggctccgtggatgtgcctcaagggctgaactttgttataggagatgtcatgaaacctagaggggtcctctctgttgcgccggatgttttcaatactgaagtccatgtcaaccggttctacatggagtactatgacagtggagaggtggtctccttgctcattattctcaaacctttttgtgcagttatatgcgctagacagattggaaactaagggggtgtttggtttctagggactaatttttagtccctacattttattccattttagttgcaaaattgctaaatatagaaactaaaactctattctagtttctaaatttgacaatttatagtctaaaatggaataaaataatgggactaaacattagtctctacaaaccaaacaccccctaatattgttggattgccaggtctcacaattctacagtgacctctccctattcaaccttgatggtaaagaagtgatgagaaagactatcaaagtgaacgatcccctgagatacggaggggtcaccatctatcagacagactggggattttcagcattgcaagtgaagaaaaatggtgaaggccctttcaatttggcgatggcccccttgaaactgaatggggataagaagctctttggaacattcttgccacttgaagattcagactcgtcgaatccaaatgtcaaaggaatatcaatgcttgctcgagatttgcagtctattgtgttgtatgatcaagatggtaagtttgtaggggtccgtcggccaagctcaaaactgcctattgagatcaatggcaatgaaatactcattgaagatgctattggtagtactggactggatcttaagactgatccaggagttcctattgtttatgctggttttggtgcgcttatgttaacgacctgcattagctatctttcacactctcagatatgggcattgcaagatggaagtacagtggtcgttggaggaaagacaaatcgagccaaacttgaattttctgaagagatgaaccggctacttgataaagtaccagagctgatcagcgccgatgagaatctattagataccaaatcgacagccacatgaaacatttttttgtgtgtttttgtttgggattgctgaagatgcagtagctctgttcaggttttgccattcagttagtttatcgcccaccaacgctcgacgaaaggagttttcgatggcgttgtagacataattttctcaattgtatcatgtggatggcgtccaacctggtaaaggttaggatgtaacttacttaaaggtcgttggtctactagatgtcttccaagaaactagtttgggatccgtcct

SEQ ID NO: 11275 - DNA, 2005 bp, Zea Mays
cctctcttctctttttccacgggagggatgacgatgccgctcgcgcgcgacgccgcatcactccctcgccactcgcgcgcccgggctccttcccgccacgctcacgacgatgccgtccccgacgtcctatcttctcctgaatccctccaaaccctcctccttccgccgactctcggccccgcgcctgagccggttccatgtctcctgcgacgcgccacggggcggcgggaggcgcgaggtcatccccgccggtgccagcaaggccaagaaacagatcgtattcttcgacgccgccccgccggtgtcccaggagggtggaggcgccgtgaagaaggcggggagcgagaagcttacccaggtgggcagcggcaacgcagcgctggcgttgttgaggagggcaaccaagatgacactctcggtgctgtccaacctcccgctcgctatctccgagatgttcgccattgccgccctcatggctctaggaacggtgattgaccagggagaggcacccagctactacttcgagaagttccccgaggacaacccggtcttcggcttcatcacgtggaggtggatcctcacccccgggttcgaccacatgttctcctcgccagtcttcctcggcctccttgcgctcctcgcgacgtccctcatggcttgcacctacacgacccagctccccatggtcaaggtcgcaagaagatggtcgttcacacattccggagaaagaatacggaagcaggaatttgcggactcgcttccccaagcatccattcaggatttgggagtcatcttgatgggtgctggatatgaggtattcaccaagggtccatctttgtatgctttcaaagggctagctggtcggtatgcgcctatcggcgtgcacttggcgatgctcttcatcatggctggtgccacgctaagtgcgacaggaagctttaagggctccgtggatgtgcctcaagggctgaactttgttataggagatgtcatgaaacctagaggggtcctctctgttgcgccggatgttttcaatactgaagtccatgtcaaccggttctacatggagtactatgacagtggagaggtctcacaattctacagtgacctctccctattcaaccttgatggtaaagaagtgatgagaaagactatcaaagtgaacgatcccctgagatacggaggggtcaccatctatcagacagactggggattttcagcattgcaagtgaagaaaaatggtgaaggccctttcaatttggcgatggcccccttgaaactgaatggggataagaagctctttggaacattcttgccacttgaagattcagactcgtcgaatccaaatgtcaaaggaatatcaatgcttgctcgagatttgcagtctattgtgttgtatgatcaagatggtaagtttgtaggggtccgtcggccaagctcaaaactgcctattgagatcaatggcaatgaaatactcattgaagatgctattggtagtactggactggatcttaagactgatccaggagttcctattgtttatgctggttttggtgcgcttatgttaacgacctgcattagctatctttcacactctcagatatgggcattgcaagatggaagtacagtggtcgttggaggaaagacaaatcgagccaaacttgaattttctgaagagatgaaccggctacttgataaagtaccagagctgatcagcgccgatgagaatctattagataccaaatcgacagccacatgaaacatttttttgtgtgtttttgtttgggattgctgaagatgcagtagctctgttcaggttttgccattcagttagtttatcgcccaccaacgctcgacgaaaggagttttcgatggcgttgtagacataattttctcaattgtatcatgtggatggcgtccaacctggtaaaggttaggatgtaacttacttaaaggtcgttggtctactagatgtcttccaagaaactagtttgggatccgtcct

SEQ ID NO: 11276 - DNA, 2106 bp, Zea Mays
cctctcttctctttttccacgggagggatgacgatgccgctcgcgcgcgacgccgcatcactccctcgccactcgcgcgcccgggctccttcccgccacgctcacgacgatgccgtccccgacgtcctatcttctcctgaatccctccaaaccctcctccttccgccgactctcggccccgcgcctgagccggttccatgtctcctgcgacgcgccacggggcggcgggaggcgcgaggtcatccccgccggtgccagcaaggccaagaaacagatcgtattcttcgacgccgccccgccggtgtcccaggagggtggaggcgccgtgaagaaggcggggagcgagaagcttacccaggtgggcagcggcaacgcagcgctggcgttgttgaggagggcaaccaagatgacactctcggtgctgtccaacctcccgctcgctatctccgagatgttcgccattgccgccctcatggctctaggaacggtgattgaccagggagaggcacccagctactacttcgagaagttccccgaggacaacccggtcttcggcttcatcacgtggaggtggatcctcacccccgggttcgaccacatgttctcctcgccagtcttcctcggcctccttgcgctcctcgcgacgtccctcatggcttgcacctacacgacccagctccccatggtcaaggtcgcaagaagatggtcgttcacacattccggagaaagaatacggaagcaggaatttgcggactcgcttccccaagcatccattcaggatttgggagtcatcttgatgggtgctggatatgaggtattcaccaagggtccatctttgtatgctttcaaagggctagctggtcggtatgcgcctatcggcgtgcacttggcgatgctcttcatcatggctggtgccacgctaagtgcgacaggaagctttaagggctccgtggatgtgcctcaagggctgaactttgttataggagatgtcatgaaacctagaggggtcctctctgttgcgccggatgttttcaatactgaagtccatgtcaaccggttctacatggagtactatgacagtggagagaagtgatgagaaagactatcaaagtgaacgatcccctgagatacggaggggtcaccatctatcagacagactggggattttcagcattgcaagtgaagaaaaatggtgaaggccctttcaatttggcgatggcccccttgaaactgaatggggataagaagctctttggaacattcttgccacttgaagattcagactcgtcgaatccaaatgtcaaaggaatatcaatgcttgctcgagatttgcagtctattgtgttgtatgatcaagatggtaagtttgtaggggtccgtcggccaagctcaaaactgcctattgagatcaatggcaatgaaatactcattgaagatgctattggtagtactggactggatcttaagactgatccaggagttcctattgtttatgctggttttggtgcgcttatgttaacgacctgcattagctatctttcacactctcagatatgggcattgcaagatggaagtacagtggtcgttggaggaaagacaaatcgagccaaacttgaattttctgaagagatgaaccggctacttgataaagtaccagagctgatcagcgccgatgagaatctattagataccaaatcgacagccacatgaaacatttttttgtgtgtttttgtttgggattgctgaagatgcagtagctctgttcaggtgaacacacgttcgaattcacaaaacatggccttcaagaatagaaaaactgttacaatctttcagtagaacttcttagatcacacttcaattgagctctttgtacatctttgaatgaggaaactaaactgatagcttgttatattaccaatttaccaattaccatactttagagcaaaataaatatgtaattttggttctgttactgatttttctagtgaccagcatgagttgcctcctactgatcattttttagacaatgggacaaggttcccgcctctgcgtttccgcacatagcgtccacatattccaaaatcgggttaccggcttgcttgaaag

SEQ ID NO: 11277 - DNA, 2118 bp, Zea Mays
cctctcttctctttttccacgggagggatgacgatgccgctcgcgcgcgacgccgcatcactccctcgccactcgcgcgcccgggctccttcccgccacgctcacgacgatgccgtccccgacgtcctatcttctcctgaatccctccaaaccctcctccttccgccgactctcggccccgcgcctgagccggttccatgtctcctgcgacgcgccacggggcggcgggaggcgcgaggtcatccccgccggtgccagcaaggccaagaaacagatcgtattcttcgacgccgccccgccggtgtcccaggagggtggaggcgccgtgaagaaggcggggagcgagaagcttacccaggtgggcagcggcaacgcagcgctggcgttgttgaggagggcaaccaagatgacactctcggtgctgtccaacctcccgctcgctatctccgagatgttcgccattgccgccctcatggctctaggaacggtgattgaccagggagaggcacccagctactacttcgagaagttccccgaggacaacccggtcttcggcttcatcacgtggaggtggatcctcacccccgggttcgaccacatgttctcctcgccagtcttcctcggcctccttgcgctcctcgcgacgtccctcatggcttgcacctacacgacccagctccccatggtcaaggtcgcaagaagatggtcgttcacacattccggagaaagaatacggaagcaggaatttgcggactcgcttccccaagcatccattcaggatttgggagtcatcttgatgggtgctggatatgagggctagctggtcggtatgcgcctatcggcgtgcacttggcgatgctcttcatcatggctggtgccacgctaagtgcgacaggaagctttaagggctccgtggatgtgcctcaagggctgaactttgttataggagatgtcatgaaacctagaggggtcctctctgttgcgccggatgttttcaatactgaagtccatgtcaaccggttctacatggagtactatgacagtggagaggtctcacaattctacagtgacctctccctattcaaccttgatggtaaagaagtgatgagaaagactatcaaagtgaacgatcccctgagatacggaggggtcaccatctatcagacagactggggattttcagcattgcaagtgaagaaaaatggtgaaggccctttcaatttggcgatggcccccttgaaactgaatggggataagaagctctttggaacattcttgccacttgaagattcagactcgtcgaatccaaatgtcaaaggaatatcaatgcttgctcgagatttgcagtctattgtgttgtatgatcaagatggtaagtttgtaggggtccgtcggccaagctcaaaactgcctattgagatcaatggcaatgaaatactcattgaagatgctattggtagtactggactggatcttaagactgatccaggagttcctattgtttatgctggttttggtgcgcttatgttaacgacctgcattagctatctttcacactctcagatatgggcattgcaagatggaagtacagtggtcgttggaggaaagacaaatcgagccaaacttgaattttctgaagagatgaaccggctacttgataaagtaccagagctgatcagcgccgatgagaatctattagataccaaatcgacagccacatgaaacatttttttgtgtgtttttgtttgggattgctgaagatgcagtagctctgttcaggtgaacacacgttcgaattcacaaaacatggccttcaagaatagaaaaactgttacaatctttcagtagaacttcttagatcacacttcaattgagctctttgtacatctttgaatgaggaaactaaactgatagcttgttatattaccaatttaccaattaccatactttagagcaaaataaatatgtaattttggttctgttactgatttttctagtgaccagcatgagttgcctcctactgatcattttttagacaatgggacaaggttcccgcctctgcgtttccgcacatagcgtccacatattccaaaatcgggttaccggcttgcttgaaag

SEQ ID NO: 11278 - DNA, 1652 bp, Zea Mays
gggggggggggggggggctggaaacctcaagtcggccatgagctgcagctatgtgaaggagtacgagtttgttgccatctttgacgcagacttccaacctcatcccgactttctgaagcgcactgtgccacatttcaaggacaatgatgagcttgggctagtgcaagcaagatggtcctttgtcaataaggatgagaacctgctgactcggttgcaatatattaacctttgcttccactttgaggtggaacagcaggtgaatggagtgttcttaaacttctttgggttcaatggcactgctggggtgtggaggatcaaggcattggaggactcaggtggatggttggaacggacaaccgtggaggatatggacattgctgttagggcacatctccatggctggaagtttatattcctgaatgacgttgaggtactagtctgatatctgatatgaaaaatcttctaattggtgtttgcttgtgtcagttgagctgattttgttgtattgtggacagtgccagtgcgaattgcccgagtcttatgaggcttacaggaagcagcagcatcggtggcattcgggtccaatgcagctattcaggctttgtttaccggacatcatcaaatgcaagattgcattttggaagaaggcgaacctgatattccttttcttcctgctccggaagctcatactgcctttctactccttcacgctgttctgcatcatcctcccgatgacgatgttcgtgccggaggccgagctccccgactgggtggtgtgctacgtcccggccctgatgtccctgctgaacatcctgccgtcccccaagtcgttccccttcatcatcccgtacctgctcttcgagaacaccatgtccgtgaccaagttcaacgcgatgatctccgggctgttccagctggggagcgcgtacgagtgggtggtgaccaagaagtcgggccgctcgtcggagggcgacctcatcgcgctggccccgcccaaggagcctgtgaagcacgcgacgaggacgggctccgcgccgaacctcgacgccgtcgccaaggaggagcaacagcagcagcagctggcggcgtcgaggaaggacgccgccgcgaagaagaaggagaagcacaaccggatatacaagaaggagctggcgctgtcgatgctgctcctgaccgcggccgcccggagcctgctgtcgaagcagggcatacacttctacttcctcctgttccagggcgtgtccttcttgctagtaggccttgacctcataggcgagcaggtcgagtgaaatgtgtaaaacaggaaattgataggtgtggggaaaaaaaaacggtgagtcaccatggatggaagtgctgggagaggagggggatgtgttatttctggctggctgccatggcacggcggcatggcatggcatggcagcagctcttgggcgcttcttggctgagattcggaacatgcgttgtgcggttgagccttcccggatctgtcctggctgcacggcatggtatcccacacgtgagagagcaacctcctccgcctgtacggaggtgtagatacagttttctcttgttttttcatgtgtgtgggcctgttcgcctgtacgaatggtgaaggtaaacagagagtcgccgctggattagggaga

SEQ ID NO: 11279 - DNA, 3187 bp, Zea Mays
gtccggtactccattagttataattttctatctgatcataccattaggttgcctagttttgaccctaacctatatataacatgtaggtccaactatgcatgcaatgcacatgcatgtatccttctagagttctagttattatatacaggaagtgcacatcctttggtagggtcattaggtgtgccatcgttgtaaaaaacagtccattgattccaggtgttttttttcctctcctcttattacgaatcattcactgtacaccaagcaatcatacaccagaaaacagtctcgcaaactattccgtttcatccatgcctccaaccactgcagcctgcaggttaatctaaccatcgtatacagtcagagactatacaatgctgcttcactgaaattctgtgtgtgtgtgtgtgtgtgggtggggggagagactagtgtacgccacatgcggataacaaattcagctgaaaggcaatgcaatgcaactaataatgttggatgtacgtatgttggggcatcatgccgtcatgcatgtgccattcagtttccacgcagcacgcaaaaagataatgtaggttttgttgaatattttgatctggagccggccaaccaagtaacggcaattgagattgtaatacattgtggagagcacgtgattgtatagtagcagatggaggaaggctgtacatcgtacaacatacaaccatacaggttattcagacgcttacttttttgccctatgtgtggatgaactgctaaattgtgcatgcgcgggagttttttttttcatacataatgctatataataataatagatctaatatcatcagactgaaacttgaatgatccagcagcaacatgatatatactacaaaaggtgcttcagaaaacatgcatgatatagtaacaaagccatctattttaattaagaaactatccattcgcaagcataatttagcagtgtccgcgagaaaccctctcctcttcctttggcggctacaggccaccccttttctctgcaccggagcattggctttcgcctccctcttccgcacgtctctacagcatccaggcggctactccaataattgacataaaatgatattttattgtgggtgtgtggtttaggggaacaattgtaggaggtagtgaaatagagggtgagagattgatgatgtggaagaaaaagtaggagtgcgggaaggtacaacttcgtcccgcattcacttttataagacataacatgacatggtcttctaattcactttgactattaattaaattatttatatctaaaaacttgtgataattaaatgataaatttaattgcaatctaacacaacaacatcaacaaatcttttattccaaagcaaactgggatttattgactaaaaacagaatggtggtgaggtagtacaatttacaaacaatatatttatcctccgaagtacacaggacacgtttagaagcaaaacaaaccgaacatgattcttttctaaccactacatgaaacaactcaactcgacgaagtttttgtcgagtgtgacactcgacaaataaggctcgatgaactgtatatcagtaaaggcttctttgccgagtactttttgtcgggcactcggcaaataaaagtcgtcgtcgtgacgctagctaggtgacgacgacggagactgtgccgagtgcccgagtgacacttggcaaaggctcactctttgccgagtgtctactgcactggcgctcggtaaagaagctccccgtggaccccttcgacagttcctttgccaagaggattaggcggcacgcgacaaagaagtcatttgacactcggatgctgacgacactttgccgagccgctattcgttgagtgtttgacactcgacacaaaggttgttgcctatgccgagtcttactatcggtaaacatgactgttgtcgagagtgttattttgccgagtaccacaatcagcaaagaattctttgtcaagtgtccgacaaaaagcactcggcaacgagccggatttatgtagtgaacgcataaccaccggtgtcttttcatgtaaacactatggtcacaaaaaaatgtcattttggatgagctttgcaactagatttatgtaccacgtatatataaatcatagctgtttctagaatactataaaattataatacgagataaatcaactcatcattatgcatgtctgggtgtagtaattaacatgtgggctccttcttctatagtattattatatgtatctctatactacatgaagcagatggttactgacacatcaagaaacagcggcgctataaatgaccatacgaaagacgcaagcaaccatgcacatatgacaagcactcaagtgtgtcatatagtttggatccttttaccctactgtaggagtagatcaagagacaaagcaaacagtgtagcaacagtacgtttatctacatctcgaactgtactgaagctgctagctagctatttatttggcgacccataatactcgcggagagattgcaccgctcatccaccgccacacacgtgcgccccaatttcttctaacgaccgctaaatgtacatgcatgatgcccactaataaacgagcttaggcacagtactttggttggttgcatatgtatatatctcccgcaaaaataacaagtaatatgtagccaagaagcaggccaatgttaaaaaatgaaactagcagctctgagtctgatctgatgtggttcttcatcagtaacagtgcatgtaactgatgaggatctccaatattgaaaattgtgcccaccaaaatatttaatttgcattattatacaaaatgctagccgaagccaataaacgaaaggaagatcgagctagcactagcactgccctccccatattgctcactactactgtactactgataagtgctctattatgcatcaatgatcaaacgagcggactaatgcacgcagacgaccttatcccctctccgcgaataaacaaagcaacataattaatcaacggctgtacggcgtggcacgaatccaaagcagagggggaaaaaagcaagctgggtctcagttgttccatcgcagaaactggccaacaacatttcccgatcgatcgatgtggtataagctacctgtctgaaacggagcatatagaaataaaattagttaccggagatcgtcgagccgag

SEQ ID NO: 11280 - DNA, 1187 bp, Zea Mays
cttaaaggccacataataattatgcactcaaagctgaagctacgtactaccgagcagctatatatacattttttttaggcaacaacatattgatcgcaaaagccataaaatacagatcaacaaaacagaaacatatggcgtctttttaggatcgtatttgatcttcatatctttcgtgttcctttttctccggcttatatgtgttaagtacgtgtcggtaaagtaagagattgattactcaacatgcacatataataggataatctattttttaatataatagatcattttatgggactggactataaatcacaatagtgtaagtagagattataatgataggcatgaaatagaaggtacatatttaggaatataactttttttttgtgcggagattctattgaggtccctttggcctcattgatggtcttccattgatcctagtggtgaaaaaaataaactattaatgataggattttttttatttatgtaatcacttattttattaaattatctgtgcaacgaaacatcttttctcaagtatattcccttaaaagaatatgactttctaagaaaataactatatgctgattaggatggcagtccttattaggggtaataaagttttagtttctgtatttagtaatttagtgactaaaatgaataaaattaagggactaattagtccttataaacccaacaacactcggaggaaatatgtgtttagtgaatcattgttcacataggaaagagaagaaacgtacatgtaattcatggcagacaaatatttggcagaagcaagtcgagtatcctgcctccaccgtgagtgatgttcgcaccagaaacactcaccgcatcatcatggctcatggtctggagtctggacgatctcacacagtcacaccattctccgagctcccctttaacagtcgttcgctagactttggctttttatggtgctgctcgcctgattgtacagctccattgaagctcccatcgctgccatcatctctcatgctcaatgcagcttcgttttcgaagccatgtgaaaaaggatcatcttgcacattggaaatcgtcttcgacatccgactcgctcatcgccaagcaatcgtaccaagcctcctcaatgctcctggacactgcagcatgagatacccccgaaatcacgtcaggtcacattggag

SEQ ID NO: 11281 - DNA, 2330 bp, Zea Mays
aagaagcttctccgttcgcacgcagacgcagcgactcgcaggcagatagatgcggccaggccaggcgcccggcacagctggagcgctttgctgcgcctgcacggctcggctcggctggccctggcctgcctctgctctgcctgcctggcacaccactgccgctcgcctgctccagcgcagcggcagggcacgtgcgcgcgccagccagcccggcgcgatccgtctaatcgccgcgattgggagggacctgctctggctgtggctggaatccgagccggtgggcgatggcgcacaacttgcactgcagtactagtacgagccacgtgggtcccgtcccgcccggccccattagctgtgcccagcctggacggagtacggacggacaccaggagtccaggacatggacactcgcactccgctccgtcctctctcgcgtaacagcgcacgcctctcatccttcgctgcctcgtgggggccacaggcgggtgctctggtctctgtgggcgacgccgagctggctgaccggaccggattagttaacggcagccggggaatggaattaacgcggcgtgtttttataattgaggtggcggataccatacgtgcaggcccgccgtggacggagctgcggctgctggacagcacagcgtcggcctttttctttttctctcggtactagtacaaagtacaaagataaaaatacatttgttttcgagatcagcgatgagtcatcgccatgcagtgcgcgctgttcactgcacgtccactccagcagtgggcagtggcccgctggtggcgttctcccgctgagtcagccgagtccgcgcccgtgcgtctctgtctcgtgacgaatccggccctctgtggctgtcacatgacggatccggccctcggacaccctggattagctccagtatttaaagaaaggttggtttagtggatgagggcaccagctgagctgccacgctatagcgcattggattcttcatgttacaaaatatcacgatcgcaagattacagaagaggaatctgaaactcgctagatggatcgcaggggccatgctctcacttctgacttgaggacagtaaccagtgcggttggccattgttgatgcgacacgaggtatatcagtcatccatcatcatgattaatgattaaggctagaaaaattgcctctgcatcatcacgtcgccgagaactgggaaagtccttgtgcgcgctacaggtcgacgtggccagtggggccggcaccgccaaggccgtcgcggctatgcccatgccgacggatgccggaggcagtcacgccgtgggaatccacaccgtgcgcgccacgaagggcctgcgcacccgtgtcacgccgccggaccgcggtttcgcgccatggccgtatctgcgcaagggtaccgcacccgcgtgccgggggctgtaaccgtacgcgcctgggaccgcgcgcccgtgccgccacacctggccgttacagcacaccagggctccgtcgtcgcgtgcggaggatgcggtcgtgcacgcagatcggggcctaggccggtgcccgcgcgcctgcgctgccagggggctgtgccccgtgcagccgagcccggaccgccgtcggggctgcctcaccgcgcccgccgccgaggctgggggccgcgtcgcctccggtgccgaggctgggtgccacgcacccgcctggctgcctgcaccgccggagccgccaggggcgagaccgtgaccgctcctggtcgggccgaccaccggcgagtcggggctagggcccgcgcgcgcctggccgaggccggggaaggaggccgcgcccgccgctcctggccgggccacccgctggcgagccggggctgggggctgcgccagccgcaatgagaccgcgccatggccgggtctggcccgtcgccggggccgaagcgctcggctgctcaggctcgagcaccgcgcgaggccgcgctgtggcctgcctgtgcgcccgcgtggcagcggcttgcgcacccgcgaggcggcggcggtggcggcgccctgctgctggtggaagagagagagggccgcgacaagacgagttaggaaaccctaactgcttgcccacctcctataggccgcaaatgggctggctgttttggcccatttcgacaaggattattttttttggctgaatatatttacaattattatcatcactgtatctatatttaaatatttagattattgatgatatatgtaattgtgcgtacttgtctggtttcataatgtatattgcagactcgttcatgaattatatttgtttttacatttataattcatatatacatatgtgcttttattt

SEQ ID NO: 11282 - DNA, 1129 bp, Zea Mays
acagaagaagccgaacgttttcggttccgctcagagtcataagccaggtcagactaggttagggtttacctgtgaggcctgctcccctgccgccgccgccatgggacactccaacgtgtggaactcgcaccccaagaactacggccctggatctagggtttggtaatcctctattcctctagttccttcgccccacttaatcgccgatatcattttatatacatgtcatctgtttaatccgtcatgttgtggcatgagcttgtagttaagattttagcgctttagcccaagtagatttgcttgcccttacgtttgttggtttttgtacttcgtactcgatgatggcgattgttgatggatgccatggtgtgtgattgcagccgtgtgtgcgctaacccccacggcttgatccgaaagtacgggctcatgtgctgcagacagtgcttccgcagcaacgccaaggacattggcttcatcaagtaccgctgaaacttggggagctccaaagcatggcaataatggaagcatggatggggacctaaaagatagcctgtactcttattcttatgataaaaccatgtaatgaattgtttggctttgtgtggacgaagttggtgtattctagatggtactcttgaatcttgatgcttccctgctatgctagctgagcatgtcgaaccgctatgaatcagacaatacagtatcaatgttaccactcagtcttgttatttgctgctgcgtatggggagtgatcgacagtctccgccgtgcattgattgtttgtttgtagaggttggagtggatttggataatcctaaatccaattggatctgcctgaccaccctatctgatggctgtgttagatggacataaaaaccttagccttgtgttaatactagggatagatcatagattggaccatactgattggatttgtgcttaaaaacaagctgggcattagtcattttgcattgaagtgggattggaatcggagttttatcacttggattggattgcaatgaatttgtctgcatggattttgaccctaatttatattttcatatgtatgttttaatttaatgaaatcaactagatgtggggcttgtgtcatatgaaaccgttttgtcgt

SEQ ID NO: 11283 - DNA, 3072 bp, Zea Mays
atgcttccgcgctgctgccgccgccgctcgggtgcctcctgcctcgccgtgctcctcctcctgctgctgcacgcgggcgcggcgtccgcgcagggcgcgcttgcgcggcaggacgtcgcggcgctccacggcctgcgcgcgtcgcttggcgtgcgcgccagcgactggcccgacagggccgacccctgcaccttctggtcgggcgtcgtctgccgcgccggccgcgtcgcggagctccgcctctccgggctccgccgcacccgcgcgggcgcccggagcgcggccttcgccgtcgaccaactcccgcggctcgcagcgctccaggcgttcaacgcctccgggttcccgctccccggccggatcccgtcctggttcggccgcggcctgccgccgtcgctcgccgtcgttgacctccgctccgcacgcgtcaatggcgagctcccggtcgatctcggcatgtccgggaacctcaccacccttgttctctccggtaacaacctgtccggccctatcccgctgtcgctcctctcaatcgctggtctccgcgttctcgacctctccgccaacaatctcaccggcccgctgccgaacgtgtcgttctctggcagtggtggagctggagtcttgttcaacgcctctggtaatgccttgtacggcgccgtcggcgatgccactggctccctcaggaagaggttctgggttgttgatgtctctgacaattacttcgatcaggtgcttggaactgggtttcagaatggaaccgatggtgtagtggatctcaggatgaactgtttgtctggtgcagcaagccagcgtacccgcggggattgtgaggctttctacacgaggaacggggtgaggcttgcgttggaccccaagccaccatcgccattgccagagccacagccaccacaggtgctgatgccgtcaacgaaaaagagagggggcaaatggaagtttgtattgaccggggtccttggtggtgctgcaattctggtaacacttggccttagcgttctggtattttgcttgttgagaagaaaaggaaggaaaccgagagggagaggagtggagcagactgaagagggcattcggtctgggcggagaagtagtagtgtgaatcccgtcacaatgtcacccatggcatcccccagagccagtggttcaccaaagggcgttcctattatcacagatgaattcacctatgagcagttgcaccatgctgcagggggctttggggatgataacctcgtcaagcatgggcactccggtgacatgtactatggtgtcctggagagtggctttcaagttgtcataaaaaagattgatctgaagaccaggaagaagtgccagggcgaattgagcttccttacaaagcatacccatgggaggatcgttccattgctgggccatttggctaaggatgaagaggaattgcttgtctataagtacatggcaaaaggtgacctcacaaccgcactgcacaagaagtcagtggaagttgaacaggggttgcgctcattggattggataacgaggctcaagattgcaataggtgtggctgaggccttgtgcttccttcatgacgaatgcaatcctccgttggtccacagccagcagtgtgcttcttgaggacaaatttgaagtgtgccttgggagtctgagtgaaatatgcactcaacaaagtgcaggaagccaaagtttcttctctcggattctaagatcatcgaagtcccttgacaagaacataccaggtccaccagctagctgctcatacgacatttactgtttcgggaaggttctactagagctaatcactggaaacttcggtgcgagtggctcaaccaacgcagattcagaagagtggttagcaagaacattagattacatcaacgcaaatgacaaggagggtgtctcaggtattgtggatcccacccttgttgtggatgatgaccatctagaggaagtgtgggcagtgtccatcgtcgcgaagacatgcctgaatccaaagccctctaggcgtccactcgctcgatacatcctgaaagcactggagaacccactaagggtggtgcgggagcaggaagagttccaatccagtccatctcacctcagaagtaccccatcccagggctcttggcgtttcgctttccatggaaacaagtaccacagctgggaggccatgccaacgtcggggcaagcacttgctcggaaaaatacagcgaagtctcaggggaccgaggggagtgacgaggacgaagagaactcgttctcgttcaagagggcttctcgggacgattttccggatcccatagagtttgaaggaggtgttgttgtgaaggagtacccgcagactagctagcgatacttgatgtgcatctctttgatgtctctaggtgaaaagctgtgtatacagaatagataaatttttcccctcttttctctttacttgtttatctcagtcgattgaaatggaataaatggcgcactgggtgtgccatccttgaaatgcaagccagtaaagttctcagatagagccatttgccattcaaaaactgttatgaaattttagtggttgatccaaagtgaattgtagtggagagcagtttaagccttacccgggaggtggttctggtcgttggattgaatgggatcatacttctgcagctgaaaacttttgagcatggccactggtgcgtactgagtgtgatagagcattcatctgcagctgcagtttcatccggtgagcttgaacaccgaagacgaaatggagggcacctccatggtctgttgtagcttctgttgagtttgaaaaaacggacaaaagaagcaatctgaacattatggagatcggtgataccagactagtgccatggacggatggcacgcagttatggagatcggcgacagcactgcccgccccctccgcgaggcagcaccagttacgggaggttgacttcaattatttctgacgtaaatccgcgcggaattggagttgggttttttctgacgtaaatccgcgcggaattggagttgggtttaacccgacgctggatcagctggtccaggaca

SEQ ID NO: 11284 - DNA, 3253 bp, Zea Mays
ccttcctccactcccactcgtctcgcagactcgcacccgcgttccccgtggtcaactcgctgcctccagcgacgaccgcgagggggggccgaaataggcaggcaggcagcggcaggccacccaaaaagcgaccaccctgcgcgcaccacctcggctgccattgccattggccattgccatagccatggccacgccatgacgccccgcccagctgcacgcgctcacacccccaccgctccactccgctccgcctaactctcaccctcacccgccaccgctcgcctccccatgcttccgcgctgctgccgccgccgctcgggtgcctcctgcctcgccgtgctcctcctcctgctgctgcacgcgggcgcggcgtccgcgcagggcgcgcttgcgcggcaggacgtcgcggcgctccacggcctgcgcgcgtcgcttggcgtgcgcgccagcgactggcccgacagggccgacccctgcaccttctggtcgggcgtcgtctgccgcgccggccgcgtcgcggagctccgcctctccgggctccgccgcacccgcgcgggcgcccggagcgcggccttcgccgtcgaccaactcccgcggctcgcagcgctccaggcgttcaacgcctccgggttcccgctccccggccggatcccgtcctggttcggccgcggcctgccgccgtcgctcgccgtcgttgacctccgctccgcacgcgtcaatggcgagctcccggtcgatctcggcatgtccgggaacctcaccacccttgttctctccgtggtggagctggagtcttgttcaacgcctctggtaatgccttgtacggcgccgtcggcgatgccactggctccctcaggaagaggttctgggttgttgatgtctctgacaattacttcgatcaggtgcttggaactgggtttcagaatggaaccgatggtgtagtggatctcaggatgaactgtttgtctggtgcagcaagccagcgtacccgcggggattgtgaggctttctacacgaggaacggggtgaggcttgcgttggaccccaagccaccatcgccattgccagagccacagccaccacaggtgctgatgccgtcaacgaaaaagagagggggcaaatggaagtttgtattgaccggggtccttggtggtgctgcaattctggtaacacttggccttagcgttctggtattttgcttgttgagaagaaaaggaaggaaaccgagagggagaggagtggagcagactgaagagggcattcggtctgggcggagaagtagtagtgtgaatcccgtcacaatgtcacccatggcatcccccagagccagtggttcaccaaagggcgttcctattatcacagatgaattcacctatgagcagttgcaccatgctgcagggggctttggggatgataacctcgtcaagcatgggcactccggtgacatgtactatggtgtcctggagagtggctttcaagttgtcataaaaaagattgatctgaagaccaggaagaagtgccagggcgaattgagcttccttacaaagcatacccatgggaggatcgttccattgctgggccatttggctaaggatgaagaggaattgcttgtctataagtacatggcaaaaggtgacctcacaaccgcactgcacaagaagtcagtggaagttgaacaggggttgcgctcattggattggataacgaggctcaagattgcaataggtgtggctgaggccttgtgcttccttcatgacgaatgcaatcctccgttggtccacagagatatccaagccagcagtgtgcttcttgaggacaaatttgaagtgtgccttgggagtctgagtgaaatatgcactcaacaaagtgcaggaagccaaagtttcttctctcggattctaagatcatcgaagtcccttgacaagaacataccaggtccaccagctagctgctcatacgacatttactgtttcgggaaggttctactagagctaatcactggaaacttcggtgcgagtggctcaaccaacgcagattcagaagagtggttagcaagaacattagattacatcaacgcaaatgacaaggagggtgtctcaggtattgtggatcccacccttgttgtggatgatgaccatctagaggaagtgtgggcagtgtccatcgtcgcgaagacatgcctgaatccaaagccctctaggcgtccactcgctcgatacatcctgaaagcactggagaacccactaagggtggtgcgggagcaggaagagttccaatccagtccatctcacctcagaagtaccccatcccagggctcttggcgtttcgctttccatggaaacaagtaccacagctgggaggccatgccaacgtcggggcaagcacttgctcggaaaaatacagcgaagtctcaggggaccgaggggagtgacgaggacgaagagaactcgttctcgttcaagagggcttctcgggacgattttccggatcccatagagtttgaaggaggtgttgttgtgaaggagtacccgcagactagctagcgatacttgatgtgcatctctttgatgtctctaggtgaaaagctgtgtatacagaatagataaatttttcccctcttttctctttacttgtttatctcagtcgattgaaatggaataaatggcgcactgggtgtgccatccttgaaatgcaagccagtaaagttctcagatagagccatttgccattcaaaaactgttatgaaattttagtggttgatccaaagtgaattgtagtggagagcagtttaagccttacccgggaggtggttctggtcgttggattgaatgggatcatacttctgcagctgaaaacttttgagcatggccactggtgcgtactgagtgtgatagagcattcatctgcagctgcagtttcatccggtgagcttgaacaccgaagacgaaatggagggcacctccatggtctgttgtagcttctgttgagtttgaaaaaacggacaaaagaagcaatctgaacattatggagatcggtgataccagactagtgccatggacggatggcacgcagttatggagatcggcgacagcactgcccgccccctccgcgaggcagcaccagttacgggaggttgacttcaattatttctgacgtaaatccgcgcggaattggagttgggttttttctgacgtaaatccgcgcggaattggagttgggtttaacccgacgctggatcagctggtccaggaca

SEQ ID NO: 11285 - DNA, 713 bp, Zea Mays
ctctttctcttcccggcacccgcctctttttcttcccggcacccgccaactcacgggcgccgaccgccgccgtgcacccaagaggcgcgttactcgggtcacgggagacagcggcggcggcgaaccggaacggcggcccggaggctgcggttaggcgtactaacgagcgctgagggcgaggggcgagcgcacacgcgacaggaggacagggacagcgcacgcggagcgggggccgggagcaagcacgcgacaggatcgtcccccgggcgagtaaacaaatggagcaacttgacctgccgagatcagcacggcagcagatgcggtgtgcctgaggcctgtgctgccaccgcccggcccccgatcgcgcgaggaaggatgaagatggactagaattttctaaaaataatgaagatgtagcaagtggctcctctccatgagcaatgtgtcttatgtttgttgagagatgtgagcaaatgagaattggttgtaatagtctatgcgtgctaagtgatcttgatgtgaacaagtgattatgaatatgtgttctaaactttatattgtgtcatgtgtgctagtagacttatatggcttcttatgttagccaagagcccaagacttatgtgctacattaatctatgtgtgctctggatttacatggcttttatctatgcttaattaagacttgtgtttgcaatttttatttgttgttaagt

SEQ ID NO: 11286 - DNA, 1162 bp, Zea Mays
catcgtcttattcaaaattgaataaaaagatgatttttgccactacaatcttcttcggttatgactcccaaaatagtcctagaagttagattcgattgcctcaagagtcaagaggatgcaacattagagactagtttggaagctaaaatatcggagagattaaagtggagaaaatcaccatcttattcaaaattaaataaaaaggagatttttgccactataatcttctccggttttgtgactcccaaactagtccttttctgcagtgtcgcaacgctaggcaaaggcgaaaggttgcatcggtgctcctgtatgcacaactttgaacatctgaatggaggccgcgccgaacgtccgtgcgcgcgtaccgcccaaactggtcccgccagcatcgtcgtaattggctcgataatgcgtggcggagccgccgcgacgacgtgcgcgcggcgcccatatatatcgtcgatggtcatctttaagatgacggattcgattaagatgagttcatctcgtcggcagcgtgtacatggccgctgaactttcctagtgacacctagcttgtcacaatctggaacgatcagtcatcatcgtctgtcgttctacaagaacgacaacacacagcggagacttggacccggcgaccggccatgcgcatggatcattcgccgacacggcgcatcaaaccatccacgcattcaactgtgccagctgatgggatatgcatagacgactagcaaaacacccaagaaattagcgagaaaaacctgacggcacttggagcactgcctgtcagcttcttcttgcactcttatcttatatattccttcccgtccacaagtatttgtcatctatatatccatgttttcttaccaacaaacagttttgactagtcctatttgagtacactttcctttgacgaatttacattattgtctagagacatgcatcttgcaagttccaatcttctcagtgttctcgttggccagggaaagctaaaggctgagccctaaagccaacatagtaggttgagtcacgactcattaccgtattttgctcttttcttaggactcgttcagttaggctaactccaacgcctcccctaatcactaccggaatcagctcctttcccgtgtgtcctaaacacacggcaaaggctatttta

SEQ ID NO: 11287 - DNA, 1331 bp, Zea Mays
ctcacgggcgccgaccgccgccgtgcacccaagaggcgcgttactcgggtcacgggagacagcggcggcggcgaaccggaacggcggcccggaggctgcggttaggcgtactaacgagcgctgagggcgaggggcgagcgcacacgcgacaggaggacagggacagcgcacgcggagcgggggccgggagcaagcacgcgacaggatcgtcccccgggcgagtaaacaaatggagcaacttgacctgccgagatcagcacggcagcagatgcggtgtgcctgaggcctgtgctgccaccgcccggcccccgatcgcgcgaggaaggtacgtccggttttcaactttggcgaaagaagaactggttttggttcgggcgaagccttacatccatagcattagctaattgaaagagggcagttcgtagtactagcctactagggctcgtaccgtcctacatatatacagagaaacgctggaatccacctcatgggcttgtatctggacgcaggccgcgccgaacgtccgtgcgcgcgtaccgcccaaactggtcccgccagcatcgtcgtaattggctcgataatgcgtggcggagccgccgcgacgacgtgcgcgcggcgcccatatatatcgtcgatggtcatctttaagatgacggattcgattaagatgagttcatctcgtcggcagcgtgtacatggccgctgaactttcctagtgacacctagcttgtcacaatctggaacgatcagtcatcatcgtctgtcgttctacaagaacgacaacacacagcggagacttggacccggcgaccggccatgcgcatggatcattcgccgacacggcgcatcaaaccatccacgcattcaactgtgccagctgatgggatatgcatagacgactagcaaaacacccaagaaattagcgagaaaaacctgacggcacttggagcactgcctgtcagcttcttcttgcactcttatcttatatattccttcccgtccacaagtatttgtcatctatatatccatgttttcttaccaacaaacagttttgactagtcctatttgagtacactttcctttgacgaatttacattattgtctagagacatgcatcttgcaagttccaatcttctcagtgttctcgttggccagggaaagctaaaggctgagccctaaagccaacatagtaggttgagtcacgactcattaccgtattttgctcttttcttaggactcgttcagttaggctaactccaacgcctcccctaatcactaccggaatcagctcctttcccgtgtgtcctaaacacacggcaaaggctatttta

SEQ ID NO: 11288 - DNA, 1449 bp, Zea Mays
ctcacgggcgccgaccgccgccgtgcacccaagaggcgcgttactcgggtcacgggagacagcggcggcggcgaaccggaacggcggcccggaggctgcggttaggcgtactaacgagcgctgagggcgaggggcgagcgcacacgcgacaggaggacagggacagcgcacgcggagcgggggccgggagcaagcacgcgacaggatcgtcccccgggcgagtaaacaaatggagcaacttgacctgccgagatcagcacggcagcagatgcggtgtgcctgaggcctgtgctgccaccgcccggcccccgatcgcgcgaggaagtgtcgcaacgctaggcaaaggcgaaaggttgcatcggtgctcctgtatgcacaactttgaacatctgaatggaggtaaacagttttttttttctttttgtggcaacaagctgaactcgccattgcaggttttcaactttggcgaaagaagaactggttttggttcgggcgaagccttacatccatagcattagctaattgaaagagggcagttcgtagtactagcctactagggctcgtaccgtcctacatatatacagagaaacgctggaatccacctcatgggcttgtatctggacgcaggccgcgccgaacgtccgtgcgcgcgtaccgcccaaactggtcccgccagcatcgtcgtaattggctcgataatgcgtggcggagccgccgcgacgacgtgcgcgcggcgcccatatatatcgtcgatggtcatctttaagatgacggattcgattaagatgagttcatctcgtcggcagcgtgtacatggccgctgaactttcctagtgacacctagcttgtcacaatctggaacgatcagtcatcatcgtctgtcgttctacaagaacgacaacacacagcggagacttggacccggcgaccggccatgcgcatggatcattcgccgacacggcgcatcaaaccatccacgcattcaactgtgccagctgatgggatatgcatagacgactagcaaaacacccaagaaattagcgagaaaaacctgacggcacttggagcactgcctgtcagcttcttcttgcactcttatcttatatattccttcccgtccacaagtatttgtcatctatatatccatgttttcttaccaacaaacagttttgactagtcctatttgagtacactttcctttgacgaatttacattattgtctagagacatgcatcttgcaagttccaatcttctcagtgttctcgttggccagggaaagctaaaggctgagccctaaagccaacatagtaggttgagtcacgactcattaccgtattttgctcttttcttaggactcgttcagttaggctaactccaacgcctcccctaatcactaccggaatcagctcctttcccgtgtgtcctaaacacacggcaaaggctatttta

SEQ ID NO: 11289 - DNA, 709 bp, Zea Mays
ggacactgcagggcctctttctcttcccggcacccgcctctttttcttcccggcacccgccaactcacgggcgccgaccgccgccgtgcacccaagaggcgcgttactcgggtcacgggagacagcggcggcggcgaaccggaacggcggcccggaggctgcggttaggcgtactaacgagcgctgagggcgaggggcgagcgcacacgcgacaggaggacagggacagcgcacgcggagcgggggccgggagcaagcacgcgacaggatcgtcccccgggcgagtaaacaaatggagcaacttgacctgccgagatcagcacggcagcagatgcggtgtgcctgaggcctgtgctgccaccgcccggcccccgatcgcgcgaggaaggtacgtccgaacttcgtggcgtgatttctcgttatagggtgcttttgcgcctcacttcagagcagcgctgcttcttcaaaaatttaggtggagttatggttttttataaacaccgacagtgacaggtaaatacaatccttttaaactctatattcaagttgtttttcaaagaatttagaacaacaaaagagatactccaatgactcgtacaacagctctcaaaactttcataaacctttggagttatgggttgaacttcatacagttctagagttagcgtgtttgctagctctgaccagctaccatgagagctaaattggg

SEQ ID NO: 11290 - DNA, 991 bp, Zea Mays
gtacgaatccctagccctttccgcccgtgcccggcacttccggggtgccagatcccctgcgcagctcgggccgacaacgtcggcgatgcaggggcacctccgtacctacatgaacgcggggattcccaagcggttcaaagaggaagaggagaaagaacagcttgcaaaagatatcgcaaaagattggaatgctgtgtttgaaaggagcatcaatacattgtttttgactgaaatggtccgtggcttgatgctaactctcaagtacttcttcgagagaaacgttacaattaactatccgtttgagaagggtcctctgagtccccgcttccgtggtgagcacgctctcagacgttacgaatctggggaagagcgttgcattgcttgtaaactatgcgaagctatatgcccagctcaggcaattacaattgaggctgaagaacgtgaagacggcagtcgccgaaccacaaggtatgatattgacatgaccaaatgcatttactgtgggttctgccaagaggcttgcccagtcgatgctattgttgaggggcctaactttgagtttgctactgagacacacgaggaactactgtacgacaaggagaaattgctcgagaatggtgaccgctgggaaactgagattgctgagaacttgagatctgagagcctttatcgctgaatctgtctttcattgtggttgatatactgtgttctcccattttccatattttgctcaactacctgatgaataagtataaacgatatatcataacttagataccaggtaccatgttattttacctcggcaccgtctgtctgttatgttcattaccttgctaaaagtggcaccgagttttctttaatgggaaagttccttctggactggagcactgagctgttttcagtcagacctttattttatatacaatgaaacaggacattgtgctcagggcttcactgatttcgtgaatgttcacattcttgtttctcactc

SEQ ID NO: 11291 - DNA, 1154 bp, Zea Mays
actcgcaaatcgcaacccacagcacgtctcctcctttgctcgtccaccctgccatctccgcaacccctacctacaggcagcagcccagcacgtccctttctacgcctccacctccctcgattcgttccgagcccatcgcctccgcctcttcgtcaccgtcgaggtcgcaccacatggcggcgctcctagcccggcaggcagcgcaggcgctccgcgcgagacagtcgctcgggccgacaacgtcggcgatgcaggggcacctccgtacctacatgaacgcggggattcccaagcggttcaaagaggaagaggagaaagaacagcttgcaaaagatatcgcaaaagattggaatgctgtgtttgaaaggagcatcaatacattgtttttgactgaaatggtccgtggcttgatgctaactctcaagtacttcttcgagagaaacgttacaattaactatccgtttgagaagggtcctctgagtccccgcttccgtggtgagcacgctctcagacgttacgaatctggggaagagcgttgcattgcttgtaaactatgcgaagctatatgcccagctcaggcaattacaattgaggctgaagaacgtgaagacggcagtcgccgaaccacaaggtatgatattgacatgaccaaatgcatttactgtgggttctgccaagaggcttgcccagtcgatgctattgttgaggggcctaactttgagtttgctactgagacacacgaggaactactgtacgacaaggagaaattgctcgagaatggtgaccgctgggaaactgagattgctgagaacttgagatctgagagcctttatcgctgaatctgtctttcattgtggttgatatactgtgttctcccattttccatattttgctcaactacctgatgaataagtataaacgatatatcataacttagataccaggtaccatgttattttacctcggcaccgtctgtctgttatgttcattaccttgctaaaagtggcaccgagttttctttaatgggaaagttccttctggactggagcactgagctgttttcagtcagacctttattttatatacaatgaaacaggacattgtgctcagggcttcactgatttcgtgaatgttcacattcttgtttctcactc

SEQ ID NO: 11292 - DNA, 1116 bp, Zea Mays
caggccactcgcaaatcgcaacccacagcacgtctcctcctttgctcgtccaccctgccatctccgcaacccctacctacaggcagcagcccagcacgtccctttctacgcctccacctccctcgattcgttccgagcccatcgcctccgcctcttcgtcaccgtcgaggtcgcaccacatggcggcgctcctagcccggcaggcagcgcaggcgctccgcgcgagacagtcggcgcagctcgggccgacaacgtcggcgatgcaggggcacctccgtacctacatgaacgcggggattcccaagcggttcaaagaggaagaggagaaagaacagcttgcaaaagatatcgcaaaagattggaatgctgtgtttgaaaggagcatcaatacattgtttttgactgaaatggattaactatccgtttgagaagggtcctctgagtccccgcttccgtggtgagcacgctctcagacgttacgaatctggggaagagcgttgcattgcttgtaaactatgcgaagctatatgcccagctcaggcaattacaattgaggctgaagaacgtgaagacggcagtcgccgaaccacaaggtatgatattgacatgaccaaatgcatttactgtgggttctgccaagaggcttgcccagtcgatgctattgttgaggggcctaactttgagtttgctactgagacacacgaggaactactgtacgacaaggagaaattgctcgagaatggtgaccgctgggaaactgagattgctgagaacttgagatctgagagcctttatcgctgaatctgtctttcattgtggttgatatactgtgttctcccattttccatattttgctcaactacctgatgaataagtataaacgatatatcataacttagataccaggtaccatgttattttacctcggcaccgtctgtctgttatgttcattaccttgctaaaagtggcaccgagttttctttaatgggaaagttccttctggactggagcactgagctgttttcagtcagacctttattttatatacaatgaaacaggacattgtgctcagggcttcactgatttcgtgaatgttcacattcttgtttctcactc

SEQ ID NO: 11293 - DNA, 588 bp, Zea Mays
gcaagtgcaagttacacacataaaaacagagagggcatgttcgtggtcttcatcaagaagctcagaggcaacatcatcagaagtttcataaggtgtggggacagctcatgaagactgggtaccaaaattccagatttgctcatcaggttgagagatttgcttgcttgtacagcagccaggttacaaacttcggtttgtattctcctgacaaatactatcgtccgagcgaagattacatgccccacgagtttgatgtgcttgggctgtaggagcagcccctactgctggtcggagttcctcgttgtaattgatccatagcctaggaggggacatcgtagttgccgtattatataacaggaagcttcacccattgtgaaggagagaaggtttataactatagtagctacatttctacttatcagtaagtttacctgtatataaatatgtacataactgatatatgatgcgtgttatttgtgagcacgcgataagtagtactgactaagtcctgctggtgtagtcattggtttttttatgatggattagcatgtaattattgtctattaaatgattctaatttttttaaaa

SEQ ID NO: 11294 - DNA, 868 bp, Zea Mays
cacaggactagtggaactggctgcaagacctgcacgattctctatgttggtgatcacatatacggagatattctgcggagcaagaaagttctaggctggcggactatgctggtgattccagaactagaacaagagctgaagcttctctcagaatcaaagtctactcgaaaggagcttagacatcttagaatggagcgtgattcgattgaagacaaaatccatcatcttgaatggtctcttaagcttgatgatatctcagaaaaccagaaggagaaattgttctctgaacatgacaatctgctgaaacagagagggcatgttcgtggtcttcatcaagaagctcagaggcaacatcatcagaagtttcataaggtgtggggacagctcatgaagactgggtaccaaaattccagatttgctcatcaggttgagagatttgcttgcttgtacagcagccaggttacaaacttcggtttgtattctcctgacaaatactatcgtccgagcgaagattacatgccccacgagtttgatgtgcttgggctgtaggagcagcccctactgctggtcggagttcctcgttgtaattgatccatagcctaggaggggacatcgtagttgccgtattatataacaggaagcttcacccattgtgaaggagagaaggtttataactatagtagctacatttctacttatcagtaagtttacctgtatataaatatgtacataactgatatatgatgcgtgttatttgtgagcacgcgataagtagtactgactaagtcctgctggtgtagtcattggtttttttatgatggattagcatgtaattattgtctattaaatgattctaatttttttaaaa

SEQ ID NO: 11295 - DNA, 1659 bp, Zea Mays
attttcttaacacatcaagataaaatatccagctgttgacttgggaatttgattggaaatatatggtcagaggactagttctcgataagaagagaggaaatatcttgaagatggatcgacacaagtatgtaaaagttgcataccatggttttaaggaactatcgaaagaagaaaaagttgctgcttatgggagtacattgataagagattcatttgatgaacctgattatgcccttatagatacacttttctcactgggtgaagcttatctatttgctcagcttgttgatttcatagacaagaatcctggaaaagtacctgcaggcacagactatccacttatgtacagagatgtgaggtctgcggttgacttgtgtcatcgtgatggaactctaaagcggatggttgcgaaggatcctgccaggtacatcaatgaggacttggcaattgtaccaatgcttgaaatgatcaggaaatctggacgctcaacattcttagtgacaaatagtttgtgggactacaccgatgttgtcatgaactacctttgtgggccatacacttcaggtgtaggctctggtctcaatcacaagtggcttcaatattttgatattgtaataacaggcagttcgaagccaagtttcttccatgatgataaccgtgcaggattgtttgaagttgagcctgattctggaaaacttctgaatgctgatattcagatcggaagcccaagatcaagtcatcaacactcaacaccagttcagaaagtttatcaggggggcaatgttggtcatctccacagattactttctgttgcttctagttcacagattctctatgttggtgatcacatatacggagatattctgcggagcaagaaagttctaggctggcggactatgctggtgattccagaactagaacaagagctgaagcttctctcagaatcaaagtctactcgaaaggagcttagacatcttagaatggagcgtgattcgattgaagacaaaatccatcatcttgaatggtctcttaagcttgatgatatctcagaaaaccagaaggagaaattgttctctgaacatgacaatctgctgaaacagagagggcatgttcgtggtcttcatcaagaagctcagaggcaacatcatcagaagtttcataaggtgtggggacagctcatgaagactgggtaccaaaattccagatttgctcatcaggttgagagatttgcttgcttgtacagcagccaggttacaaacttcggtttgtattctcctgacaaatactatcgtccgagcgaagattacatgccccacgagtttgatgtgcttgggctgtaggagcagcccctactgctggtcggagttcctcgttgtaattgatccatagcctaggaggggacatcgtagttgccgtattatataacaggaagcttcacccattgtgaaggagagaaggtttataactatagtagctacatttctacttatcagtaagtttacctgtatataaatatgtacataactgatatatgatgcgtgttatttgtgagcacgcgataagtagtactgactaagtcctgctggtgtagtcattggtttttttatgatggattagcatgtaattattgtctattaaatgattctaatttttttaaaa

SEQ ID NO: 11296 - DNA, 1693 bp, Zea Mays
attcgtgaggactttctctgtagggttgcactgctgcaaggatggacagcggtgcggtggagacagcgtccactggggcagtatggtcatcaccttcggcagaaccgagaagcatttctgtcgggaaggaggtattctgcaacaggtcactcaacatgaggaacatcacagcagtgggatttgatatggactacactctggcacagtacaagcctgaaaccttcgagtcccttgcttactatggtacaatagagaagcttgtgaaggatctccgctaccctgaagagctgttgacttgggaatttgattggaaatatatggtcagaggactagttctcgataagaagagaggaaatatcttgaagctatccacttatgtacagagatgtgaggtctgcggttgacttgtgtcatcgtgatggaactctaaagcggatggttgcgaaggatcctgccaggtacatcaatgaggacttggcaattgtaccaatgcttgaaatgatcaggaaatctggacgctcaacattcttagtgacaaatagtttgtgggactacaccgatgttgtcatgaactacctttgtgggccatacacttcaggtgtaggctctggtctcaatcacaagtggcttcaatattttgatattgtaataacaggcagttcgaagccaagtttcttccatgatgataaccgtgcaggattgtttgaagttgagcctgattctggaaaacttctgaatgctgatattcagatcggaagcccaagatcaagtcatcaacactcaacaccagttcagaaagtttatcaggggggcaatgttggtcatctccacagattactttctgttgcttctagttcacagattctctatgttggtgatcacatatacggagatattctgcggagcaagaaagttctaggctggcggactatgctggtgattccagaactagaacaagagctgaagcttctctcagaatcaaagtctactcgaaaggagcttagacatcttagaatggagcgtgattcgattgaagacaaaatccatcatcttgaatggtctcttaagcttgatgatatctcagaaaaccagaaggagaaattgttctctgaacatgacaatctgctgaaacagagagggcatgttcgtggtcttcatcaagaagctcagaggcaacatcatcagaagtttcataaggtgtggggacagctcatgaagactgggtaccaaaattccagatttgctcatcaggttgagagatttgcttgcttgtacagcagccaggttacaaacttcggtttgtattctcctgacaaatactatcgtccgagcgaagattacatgccccacgagtttgatgtgcttgggctgtaggagcagcccctactgctggtcggagttcctcgttgtaattgatccatagcctaggaggggacatcgtagttgccgtattatataacaggaagcttcacccattgtgaaggagagaaggtttataactatagtagctacatttctacttatcagtaagtttacctgtatataaatatgtacataactgatatatgatgcgtgttatttgtgagcacgcgataagtagtactgactaagtcctgctggtgtagtcattggtttttttatgatggattagcatgtaattattgtctattaaatgattctaatttttttaaaa

SEQ ID NO: 11297 - DNA, 1603 bp, Zea Mays
cattcgtgaggactttctctgtagggttgcactgctgcaaggatggacagcggtgcggtggagacagcgtccactggggcagtatggtcatcaccttcggcagaaccgagaagcatttctgtcgggaaggaggtattctgcaacaggtcactcaacatgaggaacatcacagcagtgggatttgatatggactacactctggcacagtacaagcctgaaaccttcgagtcccttgcttactatggtacaatagagaagcttgtgaaggatctccgctaccctgaagagctgttgacttgggaatttgattggaaatatatggtcagaggactagttctcgataagaagagaggaaatatcttgaagctatccacttatgtacagagatgtgaggtctgcggttgacttgtgtcatcgtgatggaactctaaagcggatggttgcgaaggatcctgccaggtacatcaatgaggacttggcaattgtaccaatgcttgaaatgatcaggaaatctggacgctcaacattcttagtgacaaatagtttgtgggactacaccgatgttgtcatgaactacctttgtgggccatacacttcaggtgtaggctctggtctcaatcacaagtggcttcaatattttgatattgtaataacaggcagatcggaagcccaagatcaagtcatcaacactcaacaccagttcagaaagtttatcaggggggcaatgttggtcatctccacagattactttctgttgcttctagttcacagattctctatgttggtgatcacatatacggagatattctgcggagcaagaaagttctaggctggcggactatgctggtgattccagaactagaacaagagctgaagcttctctcagaatcaaagtctactcgaaaggagcttagacatcttagaatggagcgtgattcgattgaagacaaaatccatcatcttgaatggtctcttaagcttgatgatatctcagaaaaccagaaggagaaattgttctctgaacatgacaatctgctgaaacagagagggcatgttcgtggtcttcatcaagaagctcagaggcaacatcatcagaagtttcataaggtgtggggacagctcatgaagactgggtaccaaaattccagatttgctcatcaggttgagagatttgcttgcttgtacagcagccaggttacaaacttcggtttgtattctcctgacaaatactatcgtccgagcgaagattacatgccccacgagtttgatgtgcttgggctgtaggagcagcccctactgctggtcggagttcctcgttgtaattgatccatagcctaggaggggacatcgtagttgccgtattatataacaggaagcttcacccattgtgaaggagagaaggtttataactatagtagctacatttctacttatcagtaagtttacctgtatataaatatgtacataactgatatatgatgcgtgttatttgtgagcacgcgataagtagtactgactaagtcctgctggtgtagtcattggtttttttatgatggattagcatgtaattattgtctattaaatgattctaatttttttaaaa

SEQ ID NO: 11298 - DNA, 1835 bp, Zea Mays
cttcttccgtgcattcgtgaggactttctctgtagggttgcactgctgcaaggatggacagcggtgcggtggagacagcgtccactggggcagtatggtcatcaccttcggcagaaccgagaagcatttctgtcgggaaggaggtattctgcaacaggtcactcaacatgaggaacatcacagcagtgggatttgatatggactacactctggcacagtacaagcctgaaaccttcgagtcccttgcttactatggtacaatagagaagcttgtgaaggatctccgctaccctgaagagctgttgacttgggaatttgattggaaatatatggtcagaggactagttctcgataagaagagaggaaatatcttgaagatggatcgacacaagtatgtaaaagttgcataccatggttttaaggaactatcgaaagaagaaaaagttgctgcttatgggagtacattgataagagattcatttgatgaacctgattatgcccttatagatacacttttctcactgggtgaagcttatctatttgctcagcttgttgatttcatagacaagaatcctggaaaagtacctgcaggcacagactatccacttatgtacagagatgtgaggtctgcggttgacttgtgtcatcgtgatggaactctaaagcggatggttgcgaaggatcctgccaggtacatcaatgaggacttggcaattgtaccaatgcttgaaatgatcaggaaatctggacgctcaacattcttagtgacaaatagtttgtgggactacaccgatgttgtcatgaactacctttgtgggccatacacttcaggtgtaggctctggtctcaatcacaagtggcttcaatattttgatattgtaataacaggcagatcggaagcccaagatcaagtcatcaacactcaacaccagttcagaaagtttatcaggggggcaatgttggtcatctccacagattactttctgttgcttctagttcacagattctctatgttggtgatcacatatacggagatattctgcggagcaagaaagttctaggctggcggactatgctggtgattccagaactagaacaagagctgaagcttctctcagaatcaaagtctactcgaaaggagcttagacatcttagaatggagcgtgattcgattgaagacaaaatccatcatcttgaatggtctcttaagcttgatgatatctcagaaaaccagaaggagaaattgttctctgaacatgacaatctgctgaaacagagagggcatgttcgtggtcttcatcaagaagctcagaggcaacatcatcagaagtttcataaggtgtggggacagctcatgaagactgggtaccaaaattccagatttgctcatcaggttgagagatttgcttgcttgtacagcagccaggttacaaacttcggtttgtattctcctgacaaatactatcgtccgagcgaagattacatgccccacgagtttgatgtgcttgggctgtaggagcagcccctactgctggtcggagttcctcgttgtaattgatccatagcctaggaggggacatcgtagttgccgtattatataacaggaagcttcacccattgtgaaggagagaaggtttataactatagtagctacatttctacttatcagtaagtttacctgtatataaatatgtacataactgatatatgatgcgtgttatttgtgagcacgcgataagtagtactgactaagtcctgctggtgtagtcattggtttttttatgatggattagcatgtaattattgtctattaaatgattctaatttttttaaaa

SEQ ID NO: 11299 - DNA, 2516 bp, Zea Mays
catccatcccatcccaagccagcaccagcagttcctccaccaccagcccagccctcgccccgtccgttcgtccgcccgcgcccgctgctgcttgcctgcttcccacgcacgcgagctctgttccgtgctgcagcaaccgcaaccgcatccgcatccgaatccgcacacgatccccgcgccacttgccccgtcaccccccacgcggcccgcgcctccgcccgctcgtcggccaatgcccggcgcaggccagctcggcgagatgagatgacgccgccgcgcggcggtgcccggcctcccgtcgctcacgcgcgccagcaccagcaccacccggccccatcgggattcttcatcccgtcctccacctagcgcggtagcgccgcatttattccctcccccgcacaacggtcacgtttccatcgcccccccgtcttctctccctcgtcgcatccggcactcctcctcgtctcctatttaaagcgcgccgggctgggagccagcgatcatgctattctctaggaggcctctcgccgccgctttccacctcgcgcccctttcgcctccgctgctcctcttcttcgcatccgcgtcctcgtcctgctcgcccgccgcctccgccgccgccgcgtcggtctccggctccaggggttgcactgctgcaaggatggacagcggtgcggtggagacagcgtccactggggcagtatggtcatcaccttcggcagaaccgagaagcatttctgtcgggaaggaggtattctgcaacaggtcactcaacatgaggaacatcacagcagtgggatttgatatggactacactctggcacagtacaagcctgaaaccttcgagtcccttgcttactatggtacaatagagaagcttgtgaaggatctccgctaccctgaagagctgttgacttgggaatttgattggaaatatatggtcagaggactagttctcgataagaagagaggaaatatcttgaagatggatcgacacaagtatgtaaaagttgcataccatggttttaaggaactatcgaaagaagaaaaagttgctgcttatgggagtacattgataagagattcatttgatgaacctgattatgcccttatagatacacttttctcactgggtgaagcttatctatttgctcagcttgttgatttcatagacaagaatcctggaaaagtacctgcaggcacagaagatgtgaggtctgcggttgacttgtgtcatcgtgatggaactctaaagcggatggttgcgaaggatcctgccaggtacatcaatgaggacttggcaattgtaccaatgcttgaaatgatcaggaaatctggacgctcaacattcttagtgacaaatagtttgtgggactacaccgatgttgtcatgaactacctttgtgggccatacacttcaggtgtaggctctggtctcaatcacaagtggcttcaatattttgatattgtaataacaggcagttcgaagccaagtttcttccatgatgataaccgtgcaggattgtttgaagttgagcctgattctggaaaacttctgaatgctgatattcagatcggaagcccaagatcaagtcatcaacactcaacaccagttcagaaagtttatcaggggggcaatgttggtcatctccacagattactttctgttgcttctagttcacagattctctatgttggtgatcacatatacggagatattctgcggagcaagaaagttctaggctggcggactatgctggtgattccagaactagaacaagagctgaagcttctctcagaatcaaagtctactcgaaaggagcttagacatcttagaatggagcgtgattcgattgaagacaaaatccatcatcttgaatggtctcttaagcttgatgatatctcagaaaaccagaaggagaaattgttctctgaacatgacaatctgctgaaacagagagggcatgttcgtggtcttcatcaagaagctcagaggcaacatcatcagaagtttcataaggtgtggggacagctcatgaagactgggtaccaaaattccagatttgctcatcaggttgagagatttgcttgcttgtacagcagccaggttacaaacttcggtttgtattctcctgacaaatactatcgtccgagcgaagattacatgccccacgagtttgatgtgcttgggctgtaggagcagcccctactgctggtcggagttcctcgttgtaattgatccatagcctaggaggggacatcgtagttgccgtattatataacaggaagcttcacccattgtgaaggagagaaggtttataactatagtagctacatttctacttatcagtaagtttacctgtatataaatatgtacataactgatatatgatgcgtgttatttgtgagcacgcgataagtagtactgactaagtcctgctggtgtagtcattggtttttttatgatggattagcatgtaattattgtctattaaatgattctaatttttttaaaa

SEQ ID NO: 11300 - DNA, 2443 bp, Zea Mays
catccatcccatcccaagccagcaccagcagttcctccaccaccagcccagccctcgccccgtccgttcgtccgcccgcgcccgctgctgcttgcctgcttcccacgcacgcgagctctgttccgtgctgcagcaaccgcaaccgcatccgcatccgaatccgcacacgatccccgcgccacttgccccgtcaccccccacgcggcccgcgcctccgcccgctcgtcggccaatgcccggcgcaggccagctcggcgagatgagatgacgccgccgcgcggcggtgcccggcctcccgtcgctcacgcgcgccagcaccagcaccacccggccccatcgggattcttcatcccgtcctccacctagcgcggtagcgccgcatttattccctcccccgcacaacggtcacgtttccatcgcccccccgtcttctctccctcgtcgcatccggcactcctcctcgtctcctatttaaagcgcgccgggctgggagccagcgatcatgctattctctaggaggcctctcgccgccgctttccacctcgcgcccctttcgcctccgctgctcctcttcttcgcatccgcgtcctcgtcctgctcgcccgccgcctccgccgccgccgcgtcggtctccggctccaggggttgcactgctgcaaggatggacagcggtgcggtggagacagcgtccactggggcagtatggtcatcaccttcggcagaaccgagaagcatttctgtcgggaaggaggtattctgcaacaggtcactcaacatgaggaacatcacagcagtgggatttgatatggactacactctggcacagtacaagcctgaaaccttcgagtcccttgcttactatggtacaatagagaagcttgtgaaggatctccgctaccctgaagagctgttgacttgggaatttgattggaaatatatggtcagaggactagttctcgataagaagagaggaaatatcttgaagatggatcgacacaagtatgtaaaagttgcataccatggttttaaggaactatcgaaagaagaaaaagttgctgcttatgggagtacattgataagagattcatttgatgaacctgattatgcccttatagatacacttttctcactgggtgaagcttatctatttgctcagcttgttgatttcatagacaagaatcctggaaaagtacctgcaggcacagactatccacttatgtacagagatgtgaggtctgcggttgacttgtgtcatcgtgatggaactctaaagcggatggttgcgaaggatcctgccaggtacatcaatgaggacttggcaattgtaccaatgcttgaaatgatcaggaaatctggacgctcaacattcttagtgacaaatagtttgtgggactacaccgatgttgtcatgaactacctttgtgggccatacacttcaggtgtaggctctggtctcaatcacaagtggcttcaatattttgatattgtaataacaggcagatcggaagcccaagatcaagtcatcaacactcaacaccagttcagaaagtttatcaggggggcaatgttggtcatctccacagattactttctgttgcttctagttcacagattctctatgttggtgatcacatatacggagatattctgcggagcaagaaagttctaggctggcggactatgctggtgattccagaactagaacaagagctgaagcttctctcagaatcaaagtctactcgaaaggagcttagacatcttagaatggagcgtgattcgattgaagacaaaatccatcatcttgaatggtctcttaagcttgatgatatctcagaaaaccagaaggagaaattgttctctgaacatgacaatctgctgaaacagagagggcatgttcgtggtcttcatcaagaagctcagaggcaacatcatcagaagtttcataaggtgtggggacagctcatgaagactgggtaccaaaattccagatttgctcatcaggttgagagatttgcttgcttgtacagcagccaggttacaaacttcggtttgtattctcctgacaaatactatcgtccgagcgaagattacatgccccacgagtttgatgtgcttgggctgtaggagcagcccctactgctggtcggagttcctcgttgtaattgatccatagcctaggaggggacatcgtagttgccgtattatataacaggaagcttcacccattgtgaaggagagaaggtttataactatagtagctacatttctacttatcagtaagtttacctgtatataaatatgtacataactgatatatgatgcgtgttatttgtgagcacgcgataagtagtactgactaagtcctgctggtgtagtcattggtttttttatgatggattagcatgtaattattgtctattaaatgattctaatttttttaaaa

SEQ ID NO: 11301 - DNA, 3098 bp, Zea Mays
gatgtcccgcaccgtatctgacgcaccgcaccacgaaagcccgcctatccatcagctaagcaaaagcggaagagaaggaaccgaacgagatggactcacgaggagaggactgaagtactctaccaaagacatcgagagggtcgagcacatcggcggcgtgggggtgcgaggcgcgctccggccgctcgtgcaccaccgggtttgcgttgatcatgcccacagtcatcttcctcctcctcctattggatccggcgccggcggtagtgaatggatttgggaggggcggagggcagagctaaggaatgtggggagaggaccgacgacgacgagtcgggtctcaatcattggtgcactttcccgagttgcggcgaccggcgaggacagttcaagtgggcttaaagtccatgttgcggcccatgaatcttttccaaatgagtcaacccgtctagagtttggaggtccatggactttaagctctaaactggtagcgttccacgggatcgacaaccacaaggggcaacgaagctcttccaggccatgcaaaatgccgccatggcccatggcagccgggaccgccgcggcgcggccggcaaccatggcaacaacggccgcggccgccacggccaccgaccactacgcgcggctcctgcagctctgccgtaccgcggtcaacccgtccgcagggcgggccatccacgcgcacgccgtcaaggcgggcctcctcgtcagcacctacctctgcaacaacctcctcgcctactacgccagcgtgggcgtgagtcgtggttgcttccgcgaggcgcggtgcctgttcgacgacataccgtacgcgcggcggaacgcgttcacgtggaactcgctgctgtcgttgtacgccaagtccggccgcctccctgacgcccacgtcgtgttcgccgaaatgcccgaccgggacgccgtgtcctggaccatcatgatcgtcgggctcaaccgctccggccgattctgggacgctgtgaagacattcctggacatggtcagtgaagggtttgcgccgtcgcagttcacactcacgaacgtgctttcatcgtgcgctgcgatggaggcctgcggggttgggagaaaggtccaccccttcgtggtcaagctggggctgagcagctgcgtgcccgtggccaactccgtgctctacatgtatggcaagtgtggggatgctgagacagcaagggctgtgtttgagaggatgcaggtgcggagtgtgtcaagctggaatgtcatggtatcgctgtacacccaccaggggaggatggagcttgctgtgtccatgttcgagaacatggtagaacgaagcattgtctcttggaacaccatcatagcagggtataaccagaatgggcttgatggcatggcattgaagttcttctcacgaatgctgagtgcttcttccatggagccagatgcattcacggtaaccagtgtcctatcagcttgcgctaaccttcgtatgctgaagatgggaaagcagatgcactcttacatcttgagaactggaatgccgtgcagcagtcagattatgaatgctctcatctcaacctatgcaaaatccggaagtgttgagactgcaaggaggatcatggaccaggcagtggtcgctgatttgaatgttatctccttcacggctctcctggaaggctatgtcaagcttggggacacaaagcaggcaagggaaatcttcgacattatgaacaatcgagatgtcattgcctggactgctatgattgttggctatcatcagaatggtcagaatgatgaagccatggagctcttcaggtcaatgatcttgattggcccagaaccaaacagtcatacgcttgctgctgttctcagtgcctgtgcaagcttggcatatcttgattacggaaaacagatccactgcaaggctatcagatccttgcaggagcaatctgtctctgtcagtaatgccattatcacagtgtatgcaaggtcaggcagtgtgccactggccagaagggtgtttgatcagatttgctggcgcaaggaaacgattacatggacatcaatgatcgtggctatggcacagcatggtttgggagaacaagccgttgtcctttttgaagaaatggttcgtgtcggcgtgaaaccagaccatataacatacgtcggcgtgctttcagcctgcgcgcatgctggttttgtagacaaagggaagaggtactacgagcagatgcagaatgagcatggcattgtgccacaaatgagccattacgcgtgcatggttgacctgcatgcccgtgccggcctgctcacagaagctcacgaattcatccaacggatgcctgttgcgccagatacagtagtctggggttcgctccttgcagcttgcagggtgcgtaagaatgcagatttagcagagctcgcagcagggaagttgctgtcaattgaccctcacaacagtggcgcctactccgccctcgccaacgtctactctgcctgtgggaggtggaacgacgcagcgaggatctggaagctgaggaaggacaaaggagtgaagaaggagaccggtttcagctggacccatgtacgaggcaaggttcacgtcttcggagcagacgacgtcctgcatccgcagagggattcgatctaccggaaggccgctgaaatgtgggaggagatcaagaaggcgggatttgtccccgacctgaactccgtcctgcacgacgttgatgacgagctgaaggaagagttgctgagccgccacagcgagaagcttgccatcgcgttcggcctcatcagcactccggaaaagacgaccctgcggatcatgaagaacctgcgggtgtgcaatgactgccacacggcgatcaagttcatctccaaattcgtggatagggagatcatagtgcgagatgcaacgaggtttcaccatttcagagatgggtactgctcgtgtaaagattattggtaggaaacctggtctgggatccttttattcttcttttgaaaagagatttattaactgaaggacgactgaagatcagcggcaataagtttcaccatttcagactcaaatggcgcgtgacagcattacaattagtggc

SEQ ID NO: 11302 - DNA, 546 bp, Zea Mays
atgccatcgtggccgtcgtggtgtccggagaactgcatcaccgagatgcagctcccgagcatcctgtcgctccacgtccacgacctgccgtcattcctcgccgtcacctccgaggacaacccatttgcgttcgtgctaccggagtttcacgagctcgtcgacgcgctcaaacgagatgatggctcctcaaagcccccgacatacgtcctcgccaacatctgtgatgccatggaggccaacgctctcgcgtcgctgaggccacacatggacatctttgtctttgggcacatgctgtcgttccagcatgaggcggatgatggcaggtgcgccccacctccttgcaatgtctttgaccacgacaagagcaggtactcctacctcagttggctggacaccaagccggccaagtcggtggtgtacatctccttcaggctcgtcggggctgctcctggcgcccaatggcaccatggacgttgtgatcgaaatgtacccaagacccgtggctgccactgccgcctaccatgttccaagtttttgctattttag

SEQ ID NO: 11303 - DNA, 803 bp, Zea Mays
aaaataaggagtgagatagaaaatgagatagggagtctattggagatagtttgactggtcagaccatgacccagggaccatgatccaaaaaagattatacatactttcaacaaatttgaaggtgcagcatcaacctcacaccacacaacaatagtcggtcacttaagttccttcaacacagttaattccagaccacatcgtccaatcttattttacccagactcatatttacaccgtaggggtcaaaaatgattggcatttgcaaacaagaaagcaccagatactcaagtgtgactgtataaagggaagaacaaaaaaaccactctcgtctgcgactatagcatggacaggaaaggtggacagttagaatcctacaagaccaaggtagacacacatctacattccatgggggccattgttgatcagggcagccgccgcctgaagttcctactggtgctttggtatgtacgaaccagcaggccgacgcctaatccgatacccacacacacgcccagaccgattccaactccaacacggacaccagcattaaaccatgaaagctcaccgtcctcgccttctagaaagtcctgccttgagtacaaactgttatagtcaacatcaacatccgtctcagatttggaatcctggaactctgataccttcaaagtgtcctcagctgactcttctttctgctgttcagttgtttcattctcagggatggaatcaagctttagtttcatttcagacttccttcgtgatataagctgaattgtctttgttaatatgataggtgtgccagagga

SEQ ID NO: 11304 - DNA, 2123 bp, Zea Mays
gtgaagtgtgaaaaatactattttgcaatgtagattgtactgtttgtaaagtgtggtttaaaataaggagtgagatagaaaatgagatagggagtctattggagatagtttgactggtcagaccatgacccagggaccatgatccaaaaaagattatacatactttcaacaaatttgaaggtgcagcatcaacctcacaccacacaacaatagtcggtcacttaagttccttcaacacagttaattccagaccacatcgtccaatcttattttacccagactcatatttacaccgtaggggtcaaaaatgattggcatttgcaaacaagaaagcaccagatactcaagtgtgactgtataaagggaagaacaaaaaaaccactctcgtctgcgactatagcatggacaggaaaggtggacagttagaatcctacaagaccaaggtagacacacatctacattccatgggggccattgttgatcagggcagccgccgcctgaagttcctactggtgctttggtatgtacgaaccagcaggccgacgcctaatccgatacccacacacacgcccagaccgattccaactccaacacggacaccagcattaaaccatgaaagctcaccgtcctcgccttctagaaagtcctgccttgagtacaaactgttatagtcaacatcaacatccgtctcagatttggaatcctggaactctgatacctgaaacaagtaacaggatatataggatcaagtggtttaaagaacacgtctcatgaattggcctccaactaagtgtaaactaatgcggtgaatcgcgtgtccatgaataaagtgaacctttttgcaatgtcatacaggagagccaataatcttcaatgggcattaataaccagagtaccattcaaattcactggagaatttccattgtgaggtcatcttcccatataaaattagctcgatacagtaaagtttttttttgggtccaactactataccagtaaagctggttgttctactaataacgagacaacttcttaagcagagcaaacaatctcccttcactccctatcaattgtcagacttcttagcactgggtgtgctcatagaagatagggcagtacatcctgtggtatcgtagaaattggctacctacacttccagtttcaatgacataacctataagcacatcagagacatgtgcacttttgaatattcaatccttctacagtccatttatcatatgggcatgtacaccacaaattcgccaaacaaatattgatcaaaggacctacttgtccatgtttgccgcatcaacaaaagtttttatttggagataggtactgagctgccgtaatgattgtgaggttcgttactatctcttagtaatcctaacaaataaccatgcatcaagtcagctacaacattcatattttcgttttttacctagttctagaagcaactgcgatttgtgatcgatcaaccttgataccaatatgaggtaaacttttcagattcgatagatgagaattgaaaacaagttcgaagtagttttcatatggaagctatgtataaagtgagaattaacaggagaaatggtatgaatattgtgataggtcactagcaagtagcaacacatatacacgtaggaaataaagctaagtgcatttgcagaaataatcctttttgtcacaagttggataagcatggccaaagtgactaaacccacaaggtattaatagcaaacaagttacatttcgttgttgtttcttgcagtgaatgatccatagttgtttcataagtcctaactgcatgtgggataaatctcttaaagccaaaatagcctagagctcccaagtgactaagtgagtgtcaagcataacataatacagagttattatgcttcaggcaaaaaaaggtccacaagtgagattgtagttggataaaatcatttgagaatactcactgtacagatggaaagtaccttcaaagtgtcctcagctgactcttctttctgctgttcagttgtttcattctcagggatggaatcaagctttagtttcatttcagacttccttcgtgatataagctgaattgtctttgttaatatgataggtgtgccagagga

SEQ ID NO: 11305 - DNA, 2728 bp, Zea Mays
aaggaggccgtggctagttgacggaaaaaaacaaaggtccgagaagattcttgaaacagttgtccagtcatccatccttcgtgtcagtcacctcacgcagcaccacaggtccacagctggtcagctgccatgcatcctgcagccagcctcacaaccgacgagctgcagatgaggcgaacgccaaccacccgccaagatcaacagcattgcacaacacaaggcaacagaaacagaacacacagagagacatgagagcaaagcaggggaatggaatggacaatggagatcctctccctccctgccttgctatttttcgccgctcgtgagatggcggcgggtgaaatgccctgaccagcgtgcgtgcacatgcccggggaacggacccgccggggctgaccgctgctagggcccggcgtcgtgtccggtagcggttggggcggaacggcgacgccgtcggagtcgcagtcgcggtcccggcttcctcctcatctccattgccttcggacgggccaaggcgccagtagcggaagcgtggacgtgagcgagcgcatccgcgcggccattgagagcttgtgcaagacttaaccgtttcgtggtgcgtcatgtcgtctaattcttcgaccggcccgcgcccacggccgtctccgtcgccgccgccgccaaaaagcagcccttctccttcgcactcaactgcgccgccgccgtcagcggactcgtcgtctccgggcccatcactgcccagcgactcctcgccgccaccggcggcgtccaggtcgcatggcgctcaggcctcctcaccagccaagccccactctccacgggagcaaccgtctagaggttccgcggacgacggtggcaggccgccaccggctcccgcgcaccgtggcgggcccaccatggtggaaatcgttttcgccgcggccggcgccgcggcgctcctcgtcatcctcatcgccgcctgcgtgtgctgctcgaggaagacggcgccgaggaggaggaagagacctcacaatcccatgcattactacgcggacttcccgtcgtcggcgtgcaaagccacaggtaatagcagcacgtactacccgaacgggccgcagccgcagtggcagaacgacaccgtcgcggcggcgacgcggagcaccttcggcccgccgggaggtggctggcatgcgccgccgcccgacatgacctccggcccgcacggcgcacggccgccgccgccgacgacaccgcacgaggcgctgctggggctcggcaagggcaccttcagctacgaggagctggcggcggccacaggcgacttctcggcggcgaacctgctggggcagggcgggttcgggtacgtgcacaagggggtgctccccggcggcatggtggtggccgtgaagcagctcaagtccgacagcgggcagggggagcgcgagttccaggccgaggtggacatcatcagccgcgtgcaccaccgccacctcgtgtccctcgttggccactgcatcgccggcgcgcgccgcgtgctcgtctaccagttcgtgcccaacaagaccctcgagttccacctccacgggcagccggtgatggagtggtcgacgaggctgcgcattgcgctcggatcagccaagggcctcgcctacctgcatgaagactgtgagccatccccggatcattcaccgcgacatcaagtcggccaacattcttctcgacaacaacttccaagccaaggtcgccgacttcgggctggccaagctgacgtcggacagcaacacgcacgtgtcgacccgtgtgatggggacgttcgggtacctggcgccggagtacgcgtcgagcgggaagctgacggacaagtcggacgtcttctcctacggcgtggtgctgctggagctcctgacggggcggcgccccatcgacgccggcgacgcgcgctcgttcctcgacgtcgacgacagcctcgtggactgggcgaggccggcgctgtcgcgcgcgctggccgacggcgactacgacggcgtcgcggacccgaggctgcggggcaactacgacaccatggagatggcgcgcatggccgccagcgccgcggcagccgtgcgccactcggccaagaagcgccccaagatgagtcagatcgtgagggcactcgagggggacatctcgctggaggacctcaacgacaacgagggggtgcgacctgggcagagcatggcgttaggcacggcggccgcggcctcgtacaaggccaaagctcccggaccgtacacgcacggcgtggaacggatcaggcaggcgcccacggtgtacagcggcgcggtgggccgtccctctacgatcggcaacgacggcgatgagtcccgtgaaccgcaccagtagcaggccggaagcagcagcagctgagttgctaccgtgtacgcatgtgatgctgcacctttgcaactcatgctcgccgcgccgttattgattgcgtgaacgtcctgctttggcgtctgtgagctgcttaatcccagctgttgcctgcaaagctgtaacggcagcctgcgagctgctgctgtacctgtacatatcgacaatcaaccacacggagaatgtgcagatgaacaaaaccctatacgtttgtgcattgcaaagcagatcagggcacgaaagaatacacggcgctaataggacgcaagggacagtggtacacgatcgatgcctcggtatagaagtttgaaccacaaacaaaaccacaattagggtg

SEQ ID NO: 11306 - DNA, 2760 bp, Zea Mays
aaggaggccgtggctagttgacggaaaaaaacaaaggtccgagaagattcttgaaacagttgtccagtcatccatccttcgtgtcagtcacctcacgcagcaccacaggtccacagctggtcagctgccatgcatcctgcagccagcctcacaaccgacgagctgcagatgaggcgaacgccaaccacccgccaagatcaacagcattgcacaacacaaggcaacagaaacagaacacacagagagacatgagagcaaagcaggggaatggaatggacaatggagatcctctccctccctgccttgctatttttcgccgctcgtgagatggcggcgggtgaaatgccctgaccagcgtgcgtgcacatgcccggggaacggacccgccggggctgaccgctgctagggcccggcgtcgtgtccggtagcggttggggcggaacggcgacgccgtcggagtcgcagtcgcggtcccggcttcctcctcatctccattgccttcggacgggccaaggcgccagtagcggaagcgtggacgtgagcgagcgcatccgcgcggccattgagagcttgtgcaagacttaaccgtttcgtggtgcgtcatgtcgtctaattcttcgaccggcccgcgcccacggccgtctccgtcgccgccgccgccaaaaagcagcccttctccttcgcactcaactgcgccgccgccgtcagcggactcgtcgtctccgggcccatcactgcccagcgactcctcgccgccaccggcggcgtccaggtcgcatggcgctcaggcctcctcaccagccaagccccactctccacgggagcaaccgtctagaggttccgcggacgacggtggcaggccgccaccggctcccgcgcaccgtggcgggcccaccatggtggaaatcgttttcgccgcggccggcgccgcggcgctcctcgtcatcctcatcgccgcctgcgtgtgctgctcgaggaagacggcgccgaggaggaggaagagacctcacaatcccatgcattactacgcggacttcccgtcgtcggcgtgcaaagccacaggtaatagcagcacgtactacccgaacgggccgcagccgcagtggcagaacgacaccgtcgcggcggcgacgcggagcaccttcggcccgccgggaggtggctggcatgcgccgccgcccgacatgacctccggcccgcacggcgcacggccgccgccgccgacgacaccgcacgaggcgctgctggggctcggcaagggcaccttcagctacgaggagctggcggcggccacaggcgacttctcggcggcgaacctgctggggcagggcgggttcgggtacgtgcacaagggggtgctccccggcggcatggtggtggccgtgaagcagctcaagtccgacagcgggcagggggagcgcgagttccaggccgaggtggacatcatcagccgcgtgcaccaccgccacctcgtgtccctcgttggccactgcatcgccggcgcgcgccgcgtgctcgtctaccagttcgtgcccaacaagaccctcgagttccacctccacggaaaagggcagccggtgatggagtggtcgacgaggctgcgcattgcgctcggatcagccaagggcctcgcctacctgcatgaagactgtgagtgagcatccgtaacagcttgaaattgccatccccggatcattcaccgcgacatcaagtcggccaacattcttctcgacaacaacttccaagccaaggtcgccgacttcgggctggccaagctgacgtcggacagcaacacgcacgtgtcgacccgtgtgatggggacgttcgggtacctggcgccggagtacgcgtcgagcgggaagctgacggacaagtcggacgtcttctcctacggcgtggtgctgctggagctcctgacggggcggcgccccatcgacgccggcgacgcgcgctcgttcctcgacgtcgacgacagcctcgtggactgggcgaggccggcgctgtcgcgcgcgctggccgacggcgactacgacggcgtcgcggacccgaggctgcggggcaactacgacaccatggagatggcgcgcatggccgccagcgccgcggcagccgtgcgccactcggccaagaagcgccccaagatgagtcagatcgtgagggcactcgagggggacatctcgctggaggacctcaacgacaacgagggggtgcgacctgggcagagcatggcgttaggcacggcggccgcggcctcgtacaaggccaaagctcccggaccgtacacgcacggcgtggaacggatcaggcaggcgcccacggtgtacagcggcgcggtgggccgtccctctacgatcggcaacgacggcgatgagtcccgtgaaccgcaccagtagcaggccggaagcagcagcagctgagttgctaccgtgtacgcatgtgatgctgcacctttgcaactcatgctcgccgcgccgttattgattgcgtgaacgtcctgctttggcgtctgtgagctgcttaatcccagctgttgcctgcaaagctgtaacggcagcctgcgagctgctgctgtacctgtacatatcgacaatcaaccacacggagaatgtgcagatgaacaaaaccctatacgtttgtgcattgcaaagcagatcagggcacgaaagaatacacggcgctaataggacgcaagggacagtggtacacgatcgatgcctcggtatagaagtttgaaccacaaacaaaaccacaattagggtg

SEQ ID NO: 11307 - DNA, 2728 bp, Zea Mays
aaggaggccgtggctagttgacggaaaaaaacaaaggtccgagaagattcttgaaacagttgtccagtcatccatccttcgtgtcagtcacctcacgcagcaccacaggtccacagctggtcagctgccatgcatcctgcagccagcctcacaaccgacgagctgcagatgaggcgaacgccaaccacccgccaagatcaacagcattgcacaacacaaggcaacagaaacagaacacacagagagacatgagagcaaagcaggggaatggaatggacaatggagatcctctccctccctgccttgctatttttcgccgctcgtgagatggcggcgggtgaaatgccctgaccagcgtgcgtgcacatgcccggggaacggacccgccggggctgaccgctgctagggcccggcgtcgtgtccggtagcggttggggcggaacggcgacgccgtcggagtcgcagtcgcggtcccggcttcctcctcatctccattgccttcggacgggccaaggcgccagtagcggaagcgtggacgtgagcgagcgcatccgcgcggccattgagagcttgtgcaagacttaaccgtttcgtggtgcgtcatgtcgtctaattcttcgaccggcccgcgcccacggccgtctccgtcgccgccgccgccaaaaagcagcccttctccttcgcactcaactgcgccgccgccgtcagcggactcgtcgtctccgggcccatcactgcccagcgactcctcgccgccaccggcggcgtccaggtcgcatggcgctcaggcctcctcaccagccaagccccactctccacgggagcaaccgtctagaggttccgcggacgacggtggcaggccgccaccggctcccgcgcaccgtggcgggcccaccatggtggaaatcgttttcgccgcggccggcgccgcggcgctcctcgtcatcctcatcgccgcctgcgtgtgctgctcgaggaagacggcgccgaggaggaggaagagacctcacaatcccatgcattactacgcggacttcccgtcgtcggcgtgcaaaggtaatagcagcacgtactacccgaacgggccgcagccgcagtggcagaacgacaccgtcgcggcggcgacgcggagcaccttcggcccgccgggaggtggctggcatgcgccgccgcccgacatgacctccggcccgcacggcgcacggccgccgccgccgacgacaccgcacgaggcgctgctggggctcggcaagggcaccttcagctacgaggagctggcggcggccacaggcgacttctcggcggcgaacctgctggggcagggcgggttcgggtacgtgcacaagggggtgctccccggcggcatggtggtggccgtgaagcagctcaagtccgacagcgggcagggggagcgcgagttccaggccgaggtggacatcatcagccgcgtgcaccaccgccacctcgtgtccctcgttggccactgcatcgccggcgcgcgccgcgtgctcgtctaccagttcgtgcccaacaagaccctcgagttccacctccacggaaaagggcagccggtgatggagtggtcgacgaggctgcgcattgcgctcggatcagccaagggcctcgcctacctgcatgaagactgtgagccatccccggatcattcaccgcgacatcaagtcggccaacattcttctcgacaacaacttccaagccaaggtcgccgacttcgggctggccaagctgacgtcggacagcaacacgcacgtgtcgacccgtgtgatggggacgttcgggtacctggcgccggagtacgcgtcgagcgggaagctgacggacaagtcggacgtcttctcctacggcgtggtgctgctggagctcctgacggggcggcgccccatcgacgccggcgacgcgcgctcgttcctcgacgtcgacgacagcctcgtggactgggcgaggccggcgctgtcgcgcgcgctggccgacggcgactacgacggcgtcgcggacccgaggctgcggggcaactacgacaccatggagatggcgcgcatggccgccagcgccgcggcagccgtgcgccactcggccaagaagcgccccaagatgagtcagatcgtgagggcactcgagggggacatctcgctggaggacctcaacgacaacgagggggtgcgacctgggcagagcatggcgttaggcacggcggccgcggcctcgtacaaggccaaagctcccggaccgtacacgcacggcgtggaacggatcaggcaggcgcccacggtgtacagcggcgcggtgggccgtccctctacgatcggcaacgacggcgatgagtcccgtgaaccgcaccagtagcaggccggaagcagcagcagctgagttgctaccgtgtacgcatgtgatgctgcacctttgcaactcatgctcgccgcgccgttattgattgcgtgaacgtcctgctttggcgtctgtgagctgcttaatcccagctgttgcctgcaaagctgtaacggcagcctgcgagctgctgctgtacctgtacatatcgacaatcaaccacacggagaatgtgcagatgaacaaaaccctatacgtttgtgcattgcaaagcagatcagggcacgaaagaatacacggcgctaataggacgcaagggacagtggtacacgatcgatgcctcggtatagaagtttgaaccacaaacaaaaccacaattagggtg

SEQ ID NO: 11308 - DNA, 2177 bp, Zea Mays
ggcccgatcgcggtactcgggtcgggccgtcctccgagagtcccagtctcccacggtcccacactcccacccccggagcgctccactgactccgccgtgcctttctcttctctccttccctcggcctccgcctccgcctccggccccgcctcgtctctcctcccccattttaaatttcaaacccctcccacctgcttcatcctcttcccctaaaacctcctcctcagtcctctctcctgctgccacgaggtacggcccagctcttcctcaaagcgggcgaaatccacgccgcgcggcggcggcggcagaggaggaggggggatgatggggtgcctcttcgcctgcttccgcgcgtccggcggcgatggcgaggtgaagggcaccggcggccagctcgcgcatccgtcccagccccccgcgacgacgacgacgaccagccaccaggtccagtggggtggaatgtgagccgcggttggttaacgctgccggattgtgtggctgttcgtcaggatggcgcgggcaggagggccaggccgccgtcgaggaacgcgctctccgccgtgttccagcgagaagatgagggatcaaggacggcgcaagtggcgagctcgtgggcggacgagagtggcgagaggaaggagatggatcaggagcttgtgcatcaggccattatccaaagaagctgtggtgcgttgctgcaaactacaaataacattcaaggagcgctcatcaaatatgctgattcagttcatcagaaggaaacacattcaggatgtcttcctgttgtgtctgatgatctacatttcatggaagcgccgaaggttgagaaatgtgaaactccttcaaggtctcatcagagtttcactgttccagatgcaacgagttcttcaaaaacaaacgatgagttgcagacttccgctacttcccttgcaaataatgtgaaagattcgatgaatgagaacaacatggaggcacttgtgcaggatgaagagcaacaccaagctctggatcttgaagaatgtggggtctcaaaagaagaatcctttcaccctgaaaaaacagaggaaccaaagtgcgcaaagaatcaccatgtggtctccatggaaatttcaatatctgatgaatgctcccttttccagagctctgagggttctgtaccatcttcttacaagataagagagagcatgaacacaacatctgtggagaagtccccgaaaactgaggcaactatccatgccaccagaaagaagttaccgaagagcgataattcagaactggagctcccaagcttagcccaatggttgaagcccccaaatcctaagaagacattcagagatgaggccatggcaggagacaggtctcattcgggtaagagttcagatgaggataggcctattattggaatggttgcagcacattggaaagataaggtgccactgccagcaaattttacctctaaattgcgggatggaaatggcattcccaattcaacaaataagtacaaagaagaccaaaaggtgagttggcatgcaacgccatttgaggagaggctcgagaaggctttatccgaagagaagttgctgtctgaaaggagctgttcgagtggaaagacgtctcagtttttaggagtggaaggcgaggagagtgacatggccgaatctaaccgtctgtacaccactgcttatgcatgccaattcagttctgctagccatgagccacagaagctttcagtataatggttctctggccatcaccttcctgattgatggcatttgcacagccctgtttcccctctgtccttttagtaggtagtatctggatgtgatgtttcagcttgtgcttaactcaatcagttaagatataatattactgctgccactagtccacagatattgttgttagcttctattgttctgttttgcttgcgctgctacctacctacctgactgataggcatgcttcattctgcaattctacttgtcctgcgcagcacattaatcccttaccctggtatctgttattttattggattcctgactgacaggcacgtttccagtttacctcgacaagtcgcaaacaaactaaaacaacctacgcctggcggaaaatactatgacttgggagtcgcccttgaaaataataccctttcgcccttgtcttgggatcgattcccgtag

SEQ ID NO: 11309 - DNA, 4298 bp, Zea Mays
cggatccccacggggcaagcccctctgccggccctcctccgcatcccactctcgccggccgccgcagccaaggcaagaggacgcctccccacacccgatctcccctcccacctccgatcgctacgaaaagcccacgcccgcctcgtccctccggccctcccctccgcacgcctcgcttgccgcgctatttcaaatcccgctcgaaccctagtaactacctaccccgcatggtcgatcgtgccgccgcgcgggcacaggcggtgagctccgacccgccgccgcctgcactgctggagcccgacccgcggctcagccagcccggggccgctgatgggcaagaggtcgcttcggcgggtgcgaccgcgggtccgccttccctgccccaggccagcgacgctgaggaagacgctcttgcctcgccagcggggcagccgggcgagcggtgcagagcgatgatggaggtggtggccaaagacggggcgtggaaggtgaccaagctggtggtggagcactgccacgagctgcaggtcgcccccggacatgtcgcggtgaccgtgccagcgttggggatggaattcgactccgtagacgacgccaaggggttctactatggctacggcgagcaggtgggcttcaaggcgcgcatgggctccaaccgccgctcagtgggcgacggcgagaagatcctgcagcggttcctctgctggaaaggcaattacgcgaataggagtagatgtaaggattcggatgcagggaaggaaaccgatgaggtgctggagggtttgtctgctgctgcggggaagaggaagagggaaccttataagacaaggagccgcaatcctggtaggagtacagaggtgattgaagtggagaaaggtgttgggttgggtggtgctgggaatgggctagagctggataatgggaggcgttccaggaggggtaggagtaaaaaggctgaggtagagcatggtgaggattctgttgttgggttcgaggcggaggaggtggctaaagctgtttctgatgctgacgaggaagaggatgaaggggacgaggatcaggaagcagcggaacaggaggtcgaggtggaagtgaaggaacagagagcgagagggaggccgaggaaggctgttatggaagacaatgcccttcaggcacgcgtcttgagggagcttggtgtgagggcattgcagtacaataacgaggagagaaagaagatactcaataagtaccgctctaaacggcagagcagatcagtgtcgagcaggcctaccaagatatcttcaagacaagctttggctgaaaggcgtaagcgtggcaatggaggtagatttctgtcaagtgaagaacagccgctgccttcagaaaggcgttccaaacgtcttaagaagcaaaatctcaaaatgcagaaggctgagagcaaagaagacgaaacaatggaagcagaaccagatccagaaattgatgtagtccctggacctgggggagaaccaaaggttgggatggtttttctgaatgaggataaggcatatgaattctatgccaactatgctgaaactgcagggttcagtgtccgaaaaggctggttggacaaaacagcaaagaatgttacaaaatctcgagcatatgtttgttccaaggagggatttcgtccaagaagtgcttctatcgaatcaaagaaaccaagcctagaagcaagaactggttgccaggcacacatgactattaagattacagcaagcacaaaatatgtagtgactgagtttgtggccgatcataatcatgatcttgaaactcccttggttgacattcagattttgaagtcagaaaagttattagcaaaggtacaacagcctcctgatccaccaaaagttgttctgataccaaatgagtataaaaattacacaaggacaaaacgtacaaaaaatatgcaattaggtgatacccaggccatctgtgaatatttgcaaaggatgaaaggcgagaatccttctttcttttatgccattcaagtagatgaagatgatatgtttacaaatgtgttttgggctgatgctaaatcaataatggattataactactttggtgatgtagtgtgtgttgacacaagatattgcacaagtgactatgggagacctctactattatttactggtgttaaccatcacaatcagctgataatatttggttcagcgttgatttatgatgactcagcacaatcctttagatggttgtttgagaccttcaaatctgctatgagtggaaaacaaccaaaaacagttttgactgaccagtctgctgcacttagcgatgcagtttcttcttggcctggaaccatccaccgcttctcactactgcatttgtatctgaatgctactaagataagcagggataccttacaaggcttggagacttttgcatcagattttagtaggtggctgtatgaatatgaggaggacaacttctattcaagctgggaaatcctttcagagaaatacaatataaaggataatgagtggttctgtaaattgtatgaggatagagaaagatgggctttgccttatgggcgtgacacattctgtgctgatattgcaaccacactaagaagggataacacaaatacaatcctcacagatctaattaaaccagaaatagatcttcagaacttcttcaacaattatgataagtttttggaggagaaacgcctagctgagcaacaagctgactaccttggggctcaaataacgcaaagggtagcaccactgcatctgctttggcaagctgccaatttatatactccaacactttttgagatgttcagaatggaatatgaacagatctcaaagtgtgtggtctatagttgtggtgagattggaccaatatctgagtaccaggtcactgtcaaagacaggcctcagggtcaatttgttagatttgattcaacagaatgtatggttgtttgtagttgtaagaagtttgaattcatgggtcttctttgttgccatgtattgaaaattcttgatctcagaaatattaaagaacttccacgacactatatcctgaaaagatggagaaaagacgctcagagtgaatctccagagaactatggttttgctgccatagatgaagatcctaagttttcattgtcaaaacggtacaacgcattataccggaatttgtataaaattgcagcaaaagcttcagaaagcgttgaagcttatgcattcctggagaaccaatatgaacagcttgttgaacaagtggaagtacttttgcaagcaaagttgcatgataaatcttccttaagtaccgtcctgaaaggcaatcagccaaatatgcttaatagtgaggtcaacagcagtgaacatcgcagagcaactggtaagaaaattaaaaatgtagaggtgcgccgtcagcaacaaagtcttgatccaaacaaaaagaagaagggtagacaagggttgaacctcccacggtatcaaatgatatccaaaatcatttaagaacaacaaatcagtttcttgcaccaagccatatgatgcaggcaccttatgttgcacagcagtttggtcttggttctttacaaggattcccaggcatgtcaccatttgggcagattcaagaaccaacacctcttcagcagccccatttacaaccaccatcgtttcatagtggtcctcaaattacacagcaatcctcagcttggccaccagaccacggatcaaggccagtacaccattccagtctgggatttcctgtgacatacagtatcctcctgtttggttgctagcagcttggtgcctgactcgcccagcatcagttgaaactaacgattcttacttcctcacgcatctccacgcatgcaagtcaacgagggtaaaaaagcctagcttgcacctgcgcgcacatgcgtccactatatttttacttccccaagcacgtgcctgggcgcggtcaacgcatgcacggggccaggcgcgggagcagagccaaccaatcatgcagtatgtgatgtatggcgaagtagcaatgtagttgtaaattatgtaatgacactgcccctccccgaagggttaatgtcaatgaaatcctttagcatggtgcattggattagattttggaactgaatgcaattctaatgcacacgttaaagccaaccgggaatggggactgtttgttccaggcaaggtggcatggttgggcacagttatcatacaatacaatatgggcctgtttgtttccttttattttgaggaattagaatcttactattggaatagactattttttagaatgtg

SEQ ID NO: 11310 - DNA, 4181 bp, Zea Mays
cggatccccacggggcaagcccctctgccggccctcctccgcatcccactctcgccggccgccgcagccaaggcaagaggacgcctccccacacccgatctcccctcccacctccgatcgctacgaaaagcccacgcccgcctcgtccctccggccctcccctccgcacgcctcgcttgccgcgctatttcaaatcccgctcgaaccctagtaactacctaccccgcatggtcgatcgtgccgccgcgcgggcacaggcggtgagctccgacccgccgccgcctgcactgctggagcccgacccgcggctcagccagcccggggccgctgatgggcaagaggtcgcttcggcgggtgcgaccgcgggtccgccttccctgccccaggccagcgacgctgaggaagacgctcttgcctcgccagcggggcagccgggcgagcggtgcagagcgatgatggaggtggtggccaaagacggggcgtggaaggtgaccaagctggtggtggagcactgccacgagctgcaggtcgcccccggacatgtcgcggtgaccgtgccagcgttggggatggaattcgactccgtagacgacgccaaggggttctactatggctacggcgagcaggtgggcttcaaggcgcgcatgggctccaaccgccgctcagtgggcgacggcgagaagatcctgcagcggttcctctgctggaaaggcaattacgcgaataggagtagatgtaaggattcggatgcagggaaggaaaccgatgaggtgctggagggtttgtctgctgctgcggggaagaggaagagggaaccttataagacaaggagccgcaatcctggtaggagtacagaggtgattgaagtggagaaaggtgttgggttgggtggtgctgggaatgggctagagctggataatgggaggcgttccaggaggggtaggagtaaaaaggctgaggtagagcatggtgaggattctgttgttgggttcgaggcggaggaggtggctaaagctgtttctgatgctgacgaggaagaggatgaaggggacgaggatcaggaagcagcggaacaggaggtcgaggtggaagtgaaggaacagagagcgagagggaggccgaggaaggctgttatggaagacaatgcccttcaggcacgcgtcttgagggagcttggtgtgagggcattgcagtacaataacgaggagagaaagaagatactcaataagtaccgctctaaacggcagagcagatcagtgtcgagcaggcctaccaagatatcttcaagacaagctttggctgaaaggcgtaagcgtggcaatggaggtagatttctgtcaagtgaagaacagccgctgccttcagaaaggcgttccaaacgtcttaagaagcaaaatctcaaaatgcagaagggttcagtgtccgaaaaggctggttggacaaaacagcaaagaatgttacaaaatctcgagcatatgtttgttccaaggagggatttcgtccaagaagtgcttctatcgaatcaaagaaaccaagcctagaagcaagaactggttgccaggcacacatgactattaagattacagcaagcacaaaatatgtagtgactgagtttgtggccgatcataatcatgatcttgaaactcccttggttgacattcagattttgaagtcagaaaagttattagcaaaggtacaacagcctcctgatccaccaaaagttgttctgataccaaatgagtataaaaattacacaaggacaaaacgtacaaaaaatatgcaattaggtgatacccaggccatctgtgaatatttgcaaaggatgaaaggcgagaatccttctttcttttatgccattcaagtagatgaagatgatatgtttacaaatgtgttttgggctgatgctaaatcaataatggattataactactttggtgatgtagtgtgtgttgacacaagatattgcacaagtgactatgggagacctctactattatttactggtgttaaccatcacaatcagctgataatatttggttcagcgttgatttatgatgactcagcacaatcctttagatggttgtttgagaccttcaaatctgctatgagtggaaaacaaccaaaaacagttttgactgaccagtctgctgcacttagcgatgcagtttcttcttggcctggaaccatccaccgcttctcactactgcatttgtatctgaatgctactaagataagcagggataccttacaaggcttggagacttttgcatcagattttagtaggtggctgtatgaatatgaggaggacaacttctattcaagctgggaaatcctttcagagaaatacaatataaaggataatgagtggttctgtaaattgtatgaggatagagaaagatgggctttgccttatgggcgtgacacattctgtgctgatattgcaaccacactaagaagggataacacaaatacaatcctcacagatctaattaaaccagaaatagatcttcagaacttcttcaacaattatgataagtttttggaggagaaacgcctagctgagcaacaagctgactaccttggggctcaaataacgcaaagggtagcaccactgcatctgctttggcaagctgccaatttatatactccaacactttttgagatgttcagaatggaatatgaacagatctcaaagtgtgtggtctatagttgtggtgagattggaccaatatctgagtaccaggtcactgtcaaagacaggcctcagggtcaatttgttagatttgattcaacagaatgtatggttgtttgtagttgtaagaagtttgaattcatgggtcttctttgttgccatgtattgaaaattcttgatctcagaaatattaaagaacttccacgacactatatcctgaaaagatggagaaaagacgctcagagtgaatctccagagaactatggttttgctgccatagatgaagatcctaagttttcattgtcaaaacggtacaacgcattataccggaatttgtataaaattgcagcaaaagcttcagaaagcgttgaagcttatgcattcctggagaaccaatatgaacagcttgttgaacaagtggaagtacttttgcaagcaaagttgcatgataaatcttccttaagtaccgtcctgaaaggcaatcagccaaatatgcttaatagtgaggtcaacagcagtgaacatcgcagagcaactggtaagaaaattaaaaatgtagaggtgcgccgtcagcaacaaagtcttgatccaaacaaaaagaagaagggtagacaagttctgctggaacctgagattgaaattccactcagggttgaacctcccacggtatcaaatgatatccaaaatcatttaagaacaacaaatcagtttcttgcaccaagccatatgatgcaggcaccttatgttgcacagcagtttggtcttggttctttacaaggattcccaggcatgtcaccatttgggcagattcaagaaccaacacctcttcagcagccccatttacaaccaccatcgtttcatagtggtcctcaaattacacagcaatcctcagcttggccaccagaccacggatcaaggccagtacaccattccagtctgggatttcctgtgacatacagtatcctcctgtttggttgctagcagcttggtgcctgactcgcccagcatcagttgaaactaacgattcttacttcctcacgcatctccacgcatgcaagtcaacgagggtaaaaaagcctagcttgcacctgcgcgcacatgcgtccactatatttttacttccccaagcacgtgcctgggcgcggtcaacgcatgcacggggccaggcgcgggagcagagccaaccaatcatgcagtatgtgatgtatggcgaagtagcaatgtagttgtaaattatgtaatgacactgcccctccccgaagggttaatgtcaatgaaatcctttagcatggtgcattggattagattttggaactgaatgcaattctaatgcacacgttaaagccaaccgggaatggggactgtttgttccaggcaaggtggcatggttgggcacagttatcatacaatacaatatgggcctgtttgtttccttttattttgaggaattagaatcttactattggaatagactattttttagaatgtg

SEQ ID NO: 11311 - DNA, 4383 bp, Zea Mays
gtcggatccccacggggcaagcccctctgccggccctcctccgcatcccactctcgccggccgccgcagccaaggcaagaggacgcctccccacacccgatctcccctcccacctccgatcgctacgaaaagcccacgcccgcctcgtccctccggccctcccctccgcacgcctcgcttgccgcgctatttcaaatcccgctcgaaccctagtaactacctaccccgcatggtcgatcgtgccgccgcgcgggcacaggcggtgagctccgacccgccgccgcctgcactgctggagcccgacccgcggctcagccagcccggggccgctgatgggcaagaggtcgcttcggcgggtgcgaccgcgggtccgccttccctgccccaggccagcgacgctgaggaagacgctcttgcctcgccagcggggcagccgggcgagcggtgcagagcgatgatggaggtggtggccaaagacggggcgtggaaggtgaccaagctggtggtggagcactgccacgagctgcaggtcgcccccggacatgtcgcggtgaccgtgccagcgttggggatggaattcgactccgtagacgacgccaaggggttctactatggctacggcgagcaggtgggcttcaaggcgcgcatgggctccaaccgccgctcagtgggcgacggcgagaagatcctgcagcggttcctctgctggaaaggcaattacgcgaataggagtagatgtaaggattcggatgcagggaaggaaaccgatgaggtgctggagggtttgtctgctgctgcggggaagaggaagagggaaccttataagacaaggagccgcaatcctggtaggagtacagaggtgattgaagtggagaaaggtgttgggttgggtggtgctgggaatgggctagagctggataatgggaggcgttccaggaggggtaggagtaaaaaggctgaggtagagcatggtgaggattctgttgttgggttcgaggcggaggaggtggctaaagctgtttctgatgctgacgaggaagaggatgaaggggacgaggatcaggaagcagcggaacaggaggtcgaggtggaagtgaaggaacagagagcgagagggaggccgaggaaggctgttatggaagacaatgcccttcaggcacgcgtcttgagggagcttggtgtgagggcattgcagtacaataacgaggagagaaagaagatactcaataagtaccgctctaaacggcagagcagatcagtgtcgagcaggcctaccaagatatcttcaagacaagctttggctgaaaggcgtaagcgtggcaatggaggtagatttctgtcaagtgaagaacagccggtctttgttattgtgttatttgatgaattggttgaaattctttcaatcgctgccttcagaaaggcgttccaaacgtcttaagaagcaaaatctcaaaatgcagaaggctgagagcaaagaagacgaaacaatggaagcagaaccagatccagaaattgatgtagtccctggacctgggggagaaccaaaggttgggatggtttttctgaatgaggataaggcatatgaattctatgccaactatgctgaaactgcagggttcagtgtccgaaaaggctggttggacaaaacagcaaagaatgttacaaaatctcgagcatatgtttgttccaaggagggatttcgtccaagaagtgcttctatcgaatcaaagaaaccaagcctagaagcaagaactggttgccaggcacacatgactattaagattacagcaagcacaaaatatgtagtgactgagtttgtggccgatcataatcatgatcttgaaactcccttggttgacattcagattttgaagtcagaaaagttattagcaaaggtacaacagcctcctgatccaccaaaagttgttctgataccaaatgagtataaaaattacacaaggacaaaacgtacaaaaaatatgcaattaggtgatacccaggccatctgtgaatatttgcaaaggatgaaaggcgagaatccttctttcttttatgccattcaagtagatgaagatgatatgtttacaaatgtgttttgggctgatgctaaatcaataatggattataactactttggtgatgtagtgtgtgttgacacaagatattgcacaagtgactatgggagacctctactattatttactggtgttaaccatcacaatcagctgataatatttggttcagcgttgatttatgatgactcagcacaatcctttagatggttgtttgagaccttcaaatctgctatgagtggaaaacaaccaaaaacagttttgactgaccagtctgctgcacttagcgatgcagtttcttcttggcctggaaccatccaccgcttctcactactgcatttgtatctgaatgctactaagataagcagggataccttacaaggcttggagacttttgcatcagattttagtaggtggctgtatgaatatgaggaggacaacttctattcaagctgggaaatcctttcagagaaatacaatataaaggataatgagtggttctgtaaattgtatgaggatagagaaagatgggctttgccttatgggcgtgacacattctgtgctgatattgcaaccacactaagaagggataacacaaatacaatcctcacagatctaattaaaccagaaatagatcttcagaacttcttcaacaattatgataagtttttggaggagaaacgcctagctgagcaacaagctgactaccttggggctcaaataacgcaaagggtagcaccactgcatctgctttggcaagctgccaatttatatactccaacactttttgagatgttcagaatggaatatgaacagatctcaaagtgtgtggtctatagttgtggtgagattggaccaatatctgagtaccaggtcactgtcaaagacaggcctcagggtcaatttgttagatttgattcaacagaatgtatggttgtttgtagttgtaagaagtttgaattcatgggtcttctttgttgccatgtattgaaaattcttgatctcagaaatattaaagaacttccacgacactatatcctgaaaagatggagaaaagacgctcagagtgaatctccagagaactatggttttgctgccatagatgaagatcctaagttttcattgtcaaaacggtacaacgcattataccggaatttgtataaaattgcagcaaaagcttcagaaagcgttgaagcttatgcattcctggagaaccaatatgaacagcttgttgaacaagtggaagtacttttgcaagcaaagttgcatgataaatcttccttaagtaccgtcctgaaaggcaatcagccaaatatgcttaatagtgaggtcaacagcagtgaacatcgcagagcaactggtaagaaaattaaaaatgtagaggtgcgccgtcagcaacaaagtcttgatccaaacaaaaagaagaagggtagacaagttctgctggaacctgagattgaaattccactcagggttgaacctcccacggtatcaaatgatatccaaaatcatttaagaacaacaaatcagtttcttgcaccaagccatatgatgcaggcaccttatgttgcacagcagtttggtcttggttctttacaaggattcccaggcatgtcaccatttgggcagattcaagaaccaacacctcttcagcagccccatttacaaccaccatcgtttcatagtggtcctcaaattacacagcaatcctcagcttggccaccagaccacggatcaaggccagtacaccattccagtctgggatttcctgtgacatacagtatcctcctgtttggttgctagcagcttggtgcctgactcgcccagcatcagttgaaactaacgattcttacttcctcacgcatctccacgcatgcaagtcaacgagggtaaaaaagcctagcttgcacctgcgcgcacatgcgtccactatatttttacttccccaagcacgtgcctgggcgcggtcaacgcatgcacggggccaggcgcgggagcagagccaaccaatcatgcagtatgtgatgtatggcgaagtagcaatgtagttgtaaattatgtaatgacactgcccctccccgaagggttaatgtcaatgaaatcctttagcatggtgcattggattagattttggaactgaatgcaattctaatgcacacgttaaagccaaccgggaatggggactgtttgttccaggcaaggtggcatggttgggcacagttatcatacaatacaatatgggcctgtttgtttccttttattttgaggaattagaatcttactattggaatagactattttttagaatgtg

SEQ ID NO: 11312 - DNA, 4281 bp, Zea Mays
ctcagtcggatccccacggggcaagcccctctgccggccctcctccgcatcccactctcgccggccgccgcagccaaggcaagaggacgcctccccacacccgatctcccctcccacctccgatcgctacgaaaagcccacgcccgcctcgtccctccggccctcccctccgcacgcctcgcttgccgcgctatttcaaatcccgctcgaaccctagtaactacctaccccgcatggtcgatcgtgccgccgcgcgggcacaggcggtgagctccgacccgccgccgcctgcactgctggagcccgacccgcggctcagccagcccggggccgctgatgggcaagaggtcgcttcggcgggtgcgaccgcgggtccgccttccctgccccaggccagcgacgctgaggaagacgctcttgcctcgccagcggggcagccgggcgagcggtgcagagcgatgatggaggtggtggccaaagacggggcgtggaaggtgaccaagctggtggtggagcactgccacgagctgcaggtcgcccccggacatgtcgcggtgaccgtgccagcgttggggatggaattcgactccgtagacgacgccaaggggttctactatggctacggcgagcaggtgggcttcaaggcgcgcatgggctccaaccgccgctcagtgggcgacggcgagaagatcctgcagcggttcctctgctggaaaggcaattacgcgaataggagtagatgtaaggattcggatgcagggaaggaaaccgatgaggtgctggagggtttgtctgctgctgcggggaagaggaagagggaaccttataagacaaggagccgcaatcctggtaggagtacagaggtgattgaagtggagaaaggtgttgggttgggtggtgctgggaatgggctagagctggataatgggaggcgttccaggaggggtaggagtaaaaaggctgaggtagagcatggtgaggattctgttgttgggttcgaggcggaggaggtggctaaagctgtttctgatgctgacgaggaagaggatgaaggggacgaggatcaggaagcagcggaacaggaggtcgaggtggaagtgaaggaacagagagcgagagggaggccgaggaaggctgttatggaagacaatgcccttcaggcacgcgtcttgagggagcttggtgtgagggcattgcagtacaataacgaggagagaaagaagatactcaataagtaccgctctaaacggcagagcagatcagtgtcgagcaggcctaccaagatatcttcaagacaagctttggctgaaaggcgtaagcgtggcaatggaggtagatttctgtcaagtgaagaacagccggctgagagcaaagaagacgaaacaatggaagcagaaccagatccagaaattgatgtagtccctggacctgggggagaaccaaaggttgggatggtttttctgaatgaggataaggcatatgaattctatgccaactatgctgaaactgcagggttcagtgtccgaaaaggctggttggacaaaacagcaaagaatgttacaaaatctcgagcatatgtttgttccaaggagggatttcgtccaagaagtgcttctatcgaatcaaagaaaccaagcctagaagcaagaactggttgccaggcacacatgactattaagattacagcaagcacaaaatatgtagtgactgagtttgtggccgatcataatcatgatcttgaaactcccttggttgacattcagattttgaagtcagaaaagttattagcaaaggtacaacagcctcctgatccaccaaaagttgttctgataccaaatgagtataaaaattacacaaggacaaaacgtacaaaaaatatgcaattaggtgatacccaggccatctgtgaatatttgcaaaggatgaaaggcgagaatccttctttcttttatgccattcaagtagatgaagatgatatgtttacaaatgtgttttgggctgatgctaaatcaataatggattataactactttggtgatgtagtgtgtgttgacacaagatattgcacaagtgactatgggagacctctactattatttactggtgttaaccatcacaatcagctgataatatttggttcagcgttgatttatgatgactcagcacaatcctttagatggttgtttgagaccttcaaatctgctatgagtggaaaacaaccaaaaacagttttgactgaccagtctgctgcacttagcgatgcagtttcttcttggcctggaaccatccaccgcttctcactactgcatttgtatctgaatgctactaagataagcagggataccttacaaggcttggagacttttgcatcagattttagtaggtggctgtatgaatatgaggaggacaacttctattcaagctgggaaatcctttcagagaaatacaatataaaggataatgagtggttctgtaaattgtatgaggatagagaaagatgggctttgccttatgggcgtgacacattctgtgctgatattgcaaccacactaagaagggataacacaaatacaatcctcacagatctaattaaaccagaaatagatcttcagaacttcttcaacaattatgataagtttttggaggagaaacgcctagctgagcaacaagctgactaccttggggctcaaataacgcaaagggtagcaccactgcatctgctttggcaagctgccaatttatatactccaacactttttgagatgttcagaatggaatatgaacagatctcaaagtgtgtggtctatagttgtggtgagattggaccaatatctgagtaccaggtcactgtcaaagacaggcctcagggtcaatttgttagatttgattcaacagaatgtatggttgtttgtagttgtaagaagtttgaattcatgggtcttctttgttgccatgtattgaaaattcttgatctcagaaatattaaagaacttccacgacactatatcctgaaaagatggagaaaagacgctcagagtgaatctccagagaactatggttttgctgccatagatgaagatcctaagttttcattgtcaaaacggtacaacgcattataccggaatttgtataaaattgcagcaaaagcttcagaaagcgttgaagcttatgcattcctggagaaccaatatgaacagcttgttgaacaagtggaagtacttttgcaagcaaagttgcatgataaatcttccttaagtaccgtcctgaaaggcaatcagccaaatatgcttaatagtgaggtcaacagcagtgaacatcgcagagcaactggtaagaaaattaaaaatgtagaggtgcgccgtcagcaacaaagtcttgatccaaacaaaaagaagaagggtagacaagttctgctggaacctgagattgaaattccactcagggttgaacctcccacggtatcaaatgatatccaaaatcatttaagaacaacaaatcagtttcttgcaccaagccatatgatgcaggcaccttatgttgcacagcagtttggtcttggttctttacaaggattcccaggcatgtcaccatttgggcagattcaagaaccaacacctcttcagcagccccatttacaaccaccatcgtttcatagtggtcctcaaattacacagcaatcctcagcttggccaccagaccacggatcaaggccagtacaccattccagtctgggatttcctgtgacatacagtatcctcctgtttggttgctagcagcttggtgcctgactcgcccagcatcagttgaaactaacgattcttacttcctcacgcatctccacgcatgcaagtcaacgagggtaaaaaagcctagcttgcacctgcgcgcacatgcgtccactatatttttacttccccaagcacgtgcctgggcgcggtcaacgcatgcacggggccaggcgcgggagcagagccaaccaatcatgcagtatgtgatgtatggcgaagtagcaatgtagttgtaaattatgtaatgacactgcccctccccgaagggttaatgtcaatgaaatcctttagcatggtgcattggattagattttggaactgaatgcaattctaatgcacacgttaaagccaaccgggaatggggactgtttgttccaggcaaggtggcatggttgggcacagttatcatacaatacaatatgggcctgtttgtttccttttattttgaggaattagaatcttactattggaatagactattttttagaatgtg

SEQ ID NO: 11313 - DNA, 1034 bp, Zea Mays
tgcccatataccatgtgtgacttttccaggcggtcactgtgtaactattggtcccttcatccccgtctttcgcccctccccccgtcacgaaccctagccccggcggcgacaacggccgatctggaggacgcgacagcccgaccccctgtccattcggcctctaggacgggcgaagcagtgaagaaacattgtcgtcgttaatcttcaccagtgtcaaggaaaggcggcaaaggttctgcaaagcgagggaaatccatagcaacaccgcagcgccagccaagcgacatcctgccacgcgttcgcgtgcaagctacaatatcgaacactccgtaagataccctcaaatggctatcaaggagatggaagacctcgctacgaccattcggcaactggtgccgaatcctactgacgaacgagttcagtgccaccatgtgccagagctccttgcttagatcctttacttggctgattggatccataaggtctctattcagtgcaccaccattcttgccaagtacaaccccaaccctccagacacaggcgtcacaatcgaagacgaatgagttgtcgctgatatggaactaacgccaacaccgtcacctaaatccgttgaagaactgtacgaagagcggagcatgaactacgacagcgatcaggctagaggcatcagctagctaggtttttagttaaatgtagtcggttcatggtagtattttgtcagtcatggatgtagtgaagtaccctttcgagttatttgtaggggatccatgcgaactatgtgtctgttcttggcttttggaataaaaattgtgcctctgtcgttgctatgtgctgaaccttcgcacttgtttcagaattgcaatggacaactttgactatggctatgactccatttttgacggtgtccactatacactccgccaataacttcgatgatgaccatgttgatatgacaacacccaaggattttagcctggtttggtttcattcctttggttcatatttgccacttcacatacactactcaccgacca

SEQ ID NO: 11314 - DNA, 417 bp, Zea Mays
atgcatcccggtgctccacccgccgctgaactggcttcagctggggaggccggaggggattacatctgcgacgtgggagacatttcggctggggatcgtgagcattctgaggcagcgcctgaagccgagcatggacaacctgcaatagatgatgatactagttattttcactactacccactggctacggtcttgggttgtactgcagagacacgatcaacagtctattgtgatggaagcttcacaacgtttggagcaggtggctacgaagttcttatctcaggcacatgggtggcgttctagtcgtaggattgacaaccattaagaatgtgcttaccatgttctttttcttttctctttttctttcttttctaggctgtgtgcatcttattgttgcagaggccgggagacgatttg

SEQ ID NO: 11315 - DNA, 2125 bp, Zea Mays
aggtgcaagtcccttgaataatgacattctgttggactgacaaagcgtcgatattagacgagacgattgagtatctgaagtccctccaaatgcaagttcagatcatgtggatgacttctgggatggcgccaatgatgtttcctggtgttcaccaattcattccacagatggctctaggaatgaatccaggttgcatccctgcagcacagggcctaagtcagatgccaagattaccatacatgaaccacaccctgccaaaccatatccatctgaactcgtctccagctatgaatctaatgaatccactgaacgccgcgaaccaggtgcaaatcggtcacctcagggatgcaagtagccacttgcttcacctagatggcgggcgagcagcagtggtacctcaggtaccaggaccaggaccccatgttcatggacatcaaatagcacaagccgaagaacacaataagatactggaagtggcagctagtactgttataccaacttctaaggcagggcaaccaccaactttacatagagtttagagtgaccaaaatcatgccttgagctgtatatctgtacagaagtgtcagaagcatattctttgacatgtaagcttagttctagagttattatcaggagtcttgtataggttacaagataacagcctgtctaccgccgtattctatctacggaagaactcagctgcatactgctgtgcagactgcagtacagcgttcaagagagaattgaatgggatcaagaaagggtctttctttttctgggaaccgctgaaaatactgacgtgatgaggagcggatggcatctctgtagctgcgctgcgctgcagtgtatctacatcaatatggcaatgcttgtctggacacgaatgctacatctacatgtaaatgcagagttgcaggtagatagcaacccctctcccctgagatgccaactccgactcctgtcctactgtatgtactgatctgtacagcaagcaatattcaatcagcagtcaattcctaggatgtcgtaaggtactgtggaaacatttttccttcgaatactgttatactaatgaaaaaagggagtgtcgaaatgtttgttgtcaactgacgaaaatccagccagcaggcccgtcctacctgcagacagaatggataacaagcttatgaatccgaagtgcatatttatatcgcatatcatatattaatcaatcctgtctttctgcctgctcctatttgtaggtcacgacaatgatcctatctaagtacataagtcgctaacaccatttcctgcttgtggaaaggtttggtcttgcaggagatgagctcgccagacagtccatcacactgccggcttgattgcatcttcacaggacgtggacttgtgggcacatgctccacgggcaacggttcggcatcctcctggcgttcttgtggctggcagcagccgcgagaatctgtgtggagccctgggctgggctcgttgcaagatatgccagcctctcatcttcagactggaggaggaggggggggttccctctccaggctttttccatgatgttacaggcttacagcattcagagtgcatgttacactcacggccctatcagcacatgctgtgggcagccggtgatgataggatcagatgctcatatctcctgcggttttctgtctaccgcatttggattggatttggaccccccctgtactgtacttcctccttgctcccctgctgcttggcgctttgtccatgtgcctggttggaattgctactatacatttttggagggtaattgtttcaccggaacatgtagcgtggacgtgtggtaataacaattgaattgatgcctttactgtctgagtaataacaaagggaagcgatgagcagcacatggtaagcttccggtgccggttggaggcttcgatgtcgatgtctgcattgagtttatttgatgctgtgtgttctatagctagactaggctagagtttggatagagttcatgggacaatgttgtctgcatcttcatctcccctttagtttaggacttatctgagaggtacggttctttgcatgacagaacaaaactagcagcagcaaaaaaaaaaaaaaaaggaaacaacgacaa

SEQ ID NO: 11316 - DNA, 1850 bp, Zea Mays
cttttcttgtcaggtgcaagtcccttgaataatgacattctgttggactgacaaagcgtcgatattagacgagacgattgagtatctgaagtccctccaaatgcaagttcagatcatgtggatgacttctgggatggcgccaatgatgtttcctggtgttcaccaattcattccacagatggctctaggaatgaatccaggttgcatccctgcagcacagggcctaagtcagatgccaagattaccatacatgaaccacaccctgccaaaccatatccatctgaactcgtctccagctatgaatctaatgaatccactgaacgccgcgaaccaggtgcaaatcggtcacctcagggatgcaagtagccacttgcttcacctagatggcgggcgagcagcagtggtacctcaggtaccaggaccaggaccccatgttcatggacatcaaatagcacaagccgaagaacacaataagatactggaagtggcagctagtactgttataccaacttctaaggcagggcaaccaccaactttacatagagtttagagtgaccaaaatcatgccttgagctgtatatctgtacagaagtgtcagaagcatattctttgacatgtaagcttagttctagagttattatcaggagtcttgtataggttacaagataacagcctgtctaccgccgtattctatctacggaagaactcagctgcatactgctgtgcagactgcagtacagcgttcaagagagaattgaatgggatcaagaaagggtctttctttttctgggaaccgctgaaaatactgacgtgatgaggagcggatggcatctctgtagctgcgctgcgctgcagtgtatctacatcaatatggcaatgcttgtctggacacgaatgctacatctacatgtaaatgcagagttgcaggtagatagcaacccctctcccctgagatgccaactccgactcctgtcctactgtatgtactgatctgtacagcaagcaatattcaatcagcagtcaattcctaggatgtcgtaaggagatgagctcgccagacagtccatcacactgccggcttgattgcatcttcacaggacgtggacttgtgggcacatgctccacgggcaacggttcggcatcctcctggcgttcttgtggctggcagcagccgcgagaatctgtgtggagccctgggctgggctcgttgcaagatatgccagcctctcatcttcagactggaggaggaggggggggttccctctccaggctttttccatgatgttacaggcttacagcattcagagtgcatgttacactcacggccctatcagcacatgctgtgggcagccggtgatgataggatcagatgctcatatctcctgcggttttctgtctaccgcatttggattggatttggaccccccctgtactgtacttcctccttgctcccctgctgcttggcgctttgtccatgtgcctggttggaattgctactatacatttttggagggtaattgtttcaccggaacatgtagcgtggacgtgtggtaataacaattgaattgatgcctttactgtctgagtaataacaaagggaagcgatgagcagcacatggtaagcttccggtgccggttggaggcttcgatgtcgatgtctgcattgagtttatttgatgctgtgtgttctatagctagactaggctagagtttggatagagttcatgggacaatgttgtctgcatcttcatctcccctttagtttaggacttatctgagaggtacggttctttgcatgacagaacaaaactagcagcagcaaaaaaaaaaaaaaaaggaaacaacgacaa

SEQ ID NO: 11317 - DNA, 2539 bp, Zea Mays
aaaagatttctctttctttctatccgatattccgatagaaggggagagaagacgttgttctccgggcactcgagtcgaagtcctgacgagatggacggcaatgcgaggtcggcggcaacgaatcagaagaagcccgtcgtcgcggacgacgacctcgtggagctgctgtggcacaacgggagcgtcgtcgcgcagccccaggcgcaccagaggccggcgcccacctacgaccccgaccgcccgggcaccagcggcctcaccggcgaagagaccgccgcgtggttcccggacaccctcgacgacgcgctggagaaggacctgtacacgcagctctggtacagcaccatcgccgacgccgccccgcagcacgagggcacgctcccgggccctacctcgcagccttcgccttcgccgcccgttgggagcagcggcgtcgagtcgagctgggctggcgacatctgctcgaccttctgcggaagcaaccaggtgctcaggacgccggcaaggatcagggggaaggacgcggcattgcagtcggagttgccgagcaataccggcgcgcacgacggcacatcgtcatccggcgggtctggaagcaactatgggggattcgggctgcccagtgacagcgtccatgtacagaagaggaaggggaggtgtagagacgactcagatagtccgagatgccgagtgtgaggaggcaagtgaggaaacgaaaccatcaaggcgatatgggacgaaacgccggactcgtgcagctgaagttcacaatctttcagagaggagaagaagggaccggatcaatgaaaagatgcgcgcattgcaagagctcatcccgcattgcaacaagactgacaaagcgtcgatattagacgagacgattgagtatctgaagtccctccaaatgcaagttcagatcatgtggatgacttctgggatggcgccaatgatgtttcctggtgttcaccaattcattccacagatggctctaggaatgaatccaggttgcatccctgcagcacagggcctaagtcagatgccaagattaccatacatgaaccacaccctgccaaaccatatccatctgaactcgtctccagctatgaatctaatgaatccactgaacgccgcgaaccaggtgcaaatcggtcacctcagggatgcaagtagccacttgcttcacctagatggcgggcgagcagcagtggtacctcaggtaccaggaccaggaccccatgttcatggacatcaaatagcacaagccgaagaacacaataagatactggaagtggcagctagtactgttataccaacttctaaggcagggcaaccaccaactttacatagagtttagagtgaccaaaatcatgccttgagctgtatatctgtacagaagtgtcagaagcatattctttgacatgtaagcttagttctagagttattatcaggagtcttgtataggttacaagataacagcctgtctaccgccgtattctatctacggaagaactcagctgcatactgctgtgcagactgcagtacagcgttcaagagagaattgaatgggatcaagaaagggtctttctttttctgggaaccgctgaaaatactgacgtgatgaggagcggatggcatctctgtagctgcgctgcgctgcagtgtatctacatcaatatggcaatgcttgtctggacacgaatgctacatctacatgtaaatgcagagttgcaggagatgagctcgccagacagtccatcacactgccggcttgattgcatcttcacaggacgtggacttgtgggcacatgctccacgggcaacggttcggcatcctcctggcgttcttgtggctggcagcagccgcgagaatctgtgtggagccctgggctgggctcgttgcaagatatgccagcctctcatcttcagactggaggaggaggggggggttccctctccaggctttttccatgatgttacaggcttacagcattcagagtgcatgttacactcacggccctatcagcacatgctgtgggcagccggtgatgataggatcagatgctcatatctcctgcggttttctgtctaccgcatttggattggatttggaccccccctgtactgtacttcctccttgctcccctgctgcttggcgctttgtccatgtgcctggttggaattgctactatacatttttggagggtaattgtttcaccggaacatgtagcgtggacgtgtggtaataacaattgaattgatgcctttactgtctgagtaataacaaagggaagcgatgagcagcacatggtaagcttccggtgccggttggaggcttcgatgtcgatgtctgcattgagtttatttgatgctgtgtgttctatagctagactaggctagagtttggatagagttcatgggacaatgttgtctgcatcttcatctcccctttagtttaggacttatctgagaggtacggttctttgcatgacagaacaaaactagcagcagcaaaaaaaaaaaaaaaaggaaacaacgacaa

SEQ ID NO: 11318 - DNA, 3130 bp, Zea Mays
agtaaacgggacagcggctgcagccacccagtcttgcaaggcgccaaggacggacggaggcgacgactcgcaaggtagctctgctcgggcgaggcagcagcagcacgcagcagtactccgttcagaatcaggagagaagacgttgttctccgggcactcgagtcgaagtcctgacgagatggacggcaatgcgaggtcggcggcaacgaatcagaagaagcccgtcgtcgcggacgacgacctcgtggagctgctgtggcacaacgggagcgtcgtcgcgcagccccaggcgcaccagaggccggcgcccacctacgaccccgaccgcccgggcaccagcggcctcaccggcgaagagaccgccgcgtggttcccggacaccctcgacgacgcgctggagaaggacctgtacacgcagctctggtacagcaccatcgccgacgccgccccgcagcacgagggcacgctcccgggccctacctcgcagccttcgccttcgccgcccgttgggagcagcggcgtcgagtcgagctgggctggcgacatctgctcgaccttctgcggaagcaaccaggtgctcaggacgccggcaaggatcagggggaaggacgcggcattgcagtcggagttgccgagcaataccggcgcgcacgacggcacatcgtcatccggcgggtctggaagcaactatgggggattcgggctgcccagtgacagcgtccatgtacagaagaggaaggggaggtgtagagacgactcagatagtccgagtgaggatgccgagtgtgaggaggcaagtgaggaaacgaaaccatcaaggcgatatgggacgaaacgccggactcgtgcagctgaagttcacaatctttcagagaggagaagaagggaccggatcaatgaaaagatgcgcgcattgcaagagctcatcccgcattgcaacaagactgacaaagcgtcgatattagacgagacgattgagtatctgaagtccctccaaatgcaagttcaggttagcagctactcctacctgaagtcctgaacttacatgatcccatacaagatcatttgctggtaccgaatgaaactaagtaatagatatgtttcagatcatgtggatgacttctgggatggcgccaatgatgtttcctggtgttcaccaattcattccacagatggctctaggaatgaatccaggttgcatccctgcagcacagggcctaagtcagatgccaagattaccatacatgaaccacaccctgccaaaccatatccatctgaactcgtctccagctatgaatctaatgaatccactgaacgccgcgaaccaggtgcaaatcggtcacctcagggatgcaagtagccacttgcttcacctagatggcgggcgagcagcagtggtacctcaggtaccaggaccaggaccccatgttcatggacatcaaatagcacaagccgaagaacacaataagatactggaagtggcagctagtactgttataccaacttctaaggcagggcaaccaccaactttacatagagtttagagtgaccaaaatcatgccttgagctgtatatctgtacagaagtgtcagaagcatattctttgacatgtaagcttagttctagagttattatcaggagtcttgtataggttacaagataacagcctgtctaccgccgtattctatctacggaagaactcagctgcatactgctgtgcagactgcagtacagcgttcaagagagaattgaatgggatcaagaaagggtctttctttttctgggaaccgctgaaaatactgacgtgatgaggagcggatggcatctctgtagctgcgctgcgctgcagtgtatctacatcaatatggcaatgcttgtctggacacgaatgctacatctacatgtaaatgcagagttgcaggtagatagcaacccctctcccctgagatgccaactccgactcctgtcctactgtatgtactgatctgtacagcaagcaatattcaatcagcagtcaattcctaggatgtcgtaaggtactgtggaaacatttttccttcgaatactgttatactaatgaaaaaagggagtgtcgaaatgtttgttgtcaactgacgaaaatccagccagcaggcccgtcctacctgcagacagaatggataacaagcttatgaatccgaagtgcatatttatatcgcatatcatatattaatcaatcctgtctttctgcctgctcctatttgtaggtcacgacaatgatcctatctaagtacataagtcgctaacaccatttcctgcttgtggaaaggtttggtcttgcaggagatgagctcgccagacagtccatcacactgccggcttgattgcatcttcacaggacgtggacttgtgggcacatgctccacgggcaacggttcggcatcctcctggcgttcttgtggctggcagcagccgcgagaatctgtgtggagccctgggctgggctcgttgcaagatatgccagcctctcatcttcagactggaggaggaggggggggttccctctccaggctttttccatgatgttacaggcttacagcattcagagtgcatgttacactcacggccctatcagcacatgctgtgggcagccggtgatgataggatcagatgctcatatctcctgcggttttctgtctaccgcatttggattggatttggaccccccctgtactgtacttcctccttgctcccctgctgcttggcgctttgtccatgtgcctggttggaattgctactatacatttttggagggtaattgtttcaccggaacatgtagcgtggacgtgtggtaataacaattgaattgatgcctttactgtctgagtaataacaaagggaagcgatgagcagcacatggtaagcttccggtgccggttggaggcttcgatgtcgatgtctgcattgagtttatttgatgctgtgtgttctatagctagactaggctagagtttggatagagttcatgggacaatgttgtctgcatcttcatctcccctttagtttaggacttatctgagaggtacggttctttgcatgacagaacaaaactagcagcagcaaaaaaaaaaaaaaaaggaaacaacgacaa

SEQ ID NO: 11319 - DNA, 2740 bp, Zea Mays
acggcctctctcctttctcgagagagcgaagtaaacgggacagcggctgcagccacccagtcttgcaaggcgccaaggacggacggaggcgacgactcgcaaggtagctctgctcgggcgaggcagcagcagcacgcagcagtactccgttcagaatcaggagagaagacgttgttctccgggcactcgagtcgaagtcctgacgagatggacggcaatgcgaggtcggcggcaacgaatcagaagaagcccgtcgtcgcggacgacgacctcgtggagctgctgtggcacaacgggagcgtcgtcgcgcagccccaggcgcaccagaggccggcgcccacctacgaccccgaccgcccgggcaccagcggcctcaccggcgaagagaccgccgcgtggttcccggacaccctcgacgacgcgctggagaaggacctgtacacgcagctctggtacagcaccatcgccgacgccgccccgcagcacgagggcacgctcccgggccctacctcgcagccttcgccttcgccgcccgttgggagcagcggcgtcgagtcgagctgggctggcgacatctgctcgaccttctgcggaagcaaccaggtgctcaggacgccggcaaggatcagggggaaggacgcggcattgcagtcggagttgccgagcaataccggcgcgcacgacggcacatcgtcatccggcgggtctggaagcaactatgggggattcgggctgcccagtgacagcgtccatgtacagaagaggaaggggaggtgtagagacgactcagatagtccgagtgaggtgtttcttggtctactctgttcatcatttttggaaatagggatgctagagtggaatataattgacgaggaaattgcaggatgccgagtgtgaggaggcaagtgaggaaacgaaaccatcaaggcgatatgggacgaaacgccggactcgtgcagctgaagttcacaatctttcagagaggagaagaagggaccggatcaatgaaaagatgcgcgcattgcaagagctcatcccgcattgcaacaagactgacaaagcgtcgatattagacgagacgattgagtatctgaagtccctccaaatgcaagttcagatcatgtggatgacttctgggatggcgccaatgatgtttcctggtgttcaccaattcattccacagatggctctaggaatgaatccaggttgcatccctgcagcacagggcctaagtcagatgccaagattaccatacatgaaccacaccctgccaaaccatatccatctgaactcgtctccagctatgaatctaatgaatccactgaacgccgcgaaccaggtgcaaatcggtcacctcagggatgcaagtagccacttgcttcacctagatggcgggcgagcagcagtggtacctcaggtaccaggaccaggaccccatgttcatggacatcaaatagcacaagccgaagaacacaataagatactggaagtggcagctagtactgttataccaacttctaaggcagggcaaccaccaactttacatagagtttagagtgaccaaaatcatgccttgagctgtatatctgtacagaagtgtcagaagcatattctttgacatgtaagcttagttctagagttattatcaggagtcttgtataggttacaagataacagcctgtctaccgccgtattctatctacggaagaactcagctgcatactgctgtgcagactgcagtacagcgttcaagagagaattgaatgggatcaagaaagggtctttctttttctgggaaccgctgaaaatactgacgtgatgaggagcggatggcatctctgtagctgcgctgcgctgcagtgtatctacatcaatatggcaatgcttgtctggacacgaatgctacatctacatgtaaatgcagagttgcaggagatgagctcgccagacagtccatcacactgccggcttgattgcatcttcacaggacgtggacttgtgggcacatgctccacgggcaacggttcggcatcctcctggcgttcttgtggctggcagcagccgcgagaatctgtgtggagccctgggctgggctcgttgcaagatatgccagcctctcatcttcagactggaggaggaggggggggttccctctccaggctttttccatgatgttacaggcttacagcattcagagtgcatgttacactcacggccctatcagcacatgctgtgggcagccggtgatgataggatcagatgctcatatctcctgcggttttctgtctaccgcatttggattggatttggaccccccctgtactgtacttcctccttgctcccctgctgcttggcgctttgtccatgtgcctggttggaattgctactatacatttttggagggtaattgtttcaccggaacatgtagcgtggacgtgtggtaataacaattgaattgatgcctttactgtctgagtaataacaaagggaagcgatgagcagcacatggtaagcttccggtgccggttggaggcttcgatgtcgatgtctgcattgagtttatttgatgctgtgtgttctatagctagactaggctagagtttggatagagttcatgggacaatgttgtctgcatcttcatctcccctttagtttaggacttatctgagaggtacggttctttgcatgacagaacaaaactagcagcagcaaaaaaaaaaaaaaaaggaaacaacgacaa

SEQ ID NO: 11320 - DNA, 3338 bp, Zea Mays
cgcagctgcaaaaatcgcgtccacctcccatcccatcgcactccccgttattatttcccgggaaaaaaatccacgcgaaaattccccacacccgccaccccgcgcacggcctctctcctttctcgagagagcgaagtaaacgggacagcggctgcagccacccagtcttgcaaggcgccaaggacggacggaggcgacgactcgcaaggtagctctgctcgggcgaggcagcagcagcacgcagcagtactccgttcagaatcaggagagaagacgttgttctccgggcactcgagtcgaagtcctgacgagatggacggcaatgcgaggtcggcggcaacgaatcagaagaagcccgtcgtcgcggacgacgacctcgtggagctgctgtggcacaacgggagcgtcgtcgcgcagccccaggcgcaccagaggccggcgcccacctacgaccccgaccgcccgggcaccagcggcctcaccggcgaagagaccgccgcgtggttcccggacaccctcgacgacgcgctggagaaggacctgtacacgcagctctggtacagcaccatcgccgacgccgccccgcagcacgagggcacgctcccgggccctacctcgcagccttcgccttcgccgcccgttgggagcagcggcgtcgagtcgagctgggctggcgacatctgctcgaccttctgcggaagcaaccaggtgctcaggacgccggcaaggatcagggggaaggacgcggcattgcagtcggagttgccgagcaataccggcgcgcacgacggcacatcgtcatccggcgggtctggaagcaactatgggggattcgggctgcccagtgacagcgtccatgtacagaagaggaaggggaggtgtagagacgactcagatagtccgagtgaggtgtttcttggtctactctgttcatcatttttggaaatagggatgctagagtggaatataattgacgaggaaattgcaggatgccgagtgtgaggaggcaagtgaggaaacgaaaccatcaaggcgatatgggacgaaacgccggactcgtgcagctgaagttcacaatctttcagagaggaagggaccggatcaatgaaaagatgcgcgcattgcaagagctcatcccgcattgcaacaagactgacaaagcgtcgatattagacgagacgattgagtatctgaagtccctccaaatgcaagttcaggttagcagctactcctacctgaagtcctgaacttacatgatcccatacaagatcatttgctggtaccgaatgaaactaagtaatagatatgtttcagatcatgtggatgacttctgggatggcgccaatgatgtttcctggtgttcaccaattcattccacagatggctctaggaatgaatccaggttgcatccctgcagcacagggcctaagtcagatgccaagattaccatacatgaaccacaccctgccaaaccatatccatctgaactcgtctccagctatgaatctaatgaatccactgaacgccgcgaaccaggtgcaaatcggtcacctcagggatgcaagtagccacttgcttcacctagatggcgggcgagcagcagtggtacctcaggtaccaggaccaggaccccatgttcatggacatcaaatagcacaagccgaagaacacaataagatactggaagtggcagctagtactgttataccaacttctaaggcagggcaaccaccaactttacatagagtttagagtgaccaaaatcatgccttgagctgtatatctgtacagaagtgtcagaagcatattctttgacatgtaagcttagttctagagttattatcaggagtcttgtataggttacaagataacagcctgtctaccgccgtattctatctacggaagaactcagctgcatactgctgtgcagactgcagtacagcgttcaagagagaattgaatgggatcaagaaagggtctttctttttctgggaaccgctgaaaatactgacgtgatgaggagcggatggcatctctgtagctgcgctgcgctgcagtgtatctacatcaatatggcaatgcttgtctggacacgaatgctacatctacatgtaaatgcagagttgcaggtagatagcaacccctctcccctgagatgccaactccgactcctgtcctactgtatgtactgatctgtacagcaagcaatattcaatcagcagtcaattcctaggatgtcgtaaggtactgtggaaacatttttccttcgaatactgttatactaatgaaaaaagggagtgtcgaaatgtttgttgtcaactgacgaaaatccagccagcaggcccgtcctacctgcagacagaatggataacaagcttatgaatccgaagtgcatatttatatcgcatatcatatattaatcaatcctgtctttctgcctgctcctatttgtaggtcacgacaatgatcctatctaagtacataagtcgctaacaccatttcctgcttgtggaaaggtttggtcttgcaggagatgagctcgccagacagtccatcacactgccggcttgattgcatcttcacaggacgtggacttgtgggcacatgctccacgggcaacggttcggcatcctcctggcgttcttgtggctggcagcagccgcgagaatctgtgtggagccctgggctgggctcgttgcaagatatgccagcctctcatcttcagactggaggaggaggggggggttccctctccaggctttttccatgatgttacaggcttacagcattcagagtgcatgttacactcacggccctatcagcacatgctgtgggcagccggtgatgataggatcagatgctcatatctcctgcggttttctgtctaccgcatttggattggatttggaccccccctgtactgtacttcctccttgctcccctgctgcttggcgctttgtccatgtgcctggttggaattgctactatacatttttggagggtaattgtttcaccggaacatgtagcgtggacgtgtggtaataacaattgaattgatgcctttactgtctgagtaataacaaagggaagcgatgagcagcacatggtaagcttccggtgccggttggaggcttcgatgtcgatgtctgcattgagtttatttgatgctgtgtgttctatagctagactaggctagagtttggatagagttcatgggacaatgttgtctgcatcttcatctcccctttagtttaggacttatctgagaggtacggttctttgcatgacagaacaaaactagcagcagcaaaaaaaaaaaaaaaaggaaacaacgacaa

SEQ ID NO: 11321 - DNA, 3158 bp, Zea Mays
atgtctcgtgtgaatggagtcactgacgccttgagcatcggtccctccgcagggtacattctattcttagtaattgtgcatattttactattttttactgcttatgatcgttcatatacactcttagccatccaaaaggttactcttttatgctccgcttgcaaggcgccaaggacggacggaggcgacgactcgcaaggtagctctgctcgggcgaggcagcagcagcacgcagcagtactccgttcagaatcaggagagaagacgttgttctccgggcactcgagtcgaagtcctgacgagatggacggcaatgcgaggtcggcggcaacgaatcagaagaagcccgtcgtcgcggacgacgacctcgtggagctgctgtggcacaacgggagcgtcgtcgcgcagccccaggcgcaccagaggccggcgcccacctacgaccccgaccgcccgggcaccagcggcctcaccggcgaagagaccgccgcgtggttcccggacaccctcgacgacgcgctggagaaggacctgtacacgcagctctggtacagcaccatcgccgacgccgccccgcagcacgagggcacgctcccgggccctacctcgcagccttcgccttcgccgcccgttgggagcagcggcgtcgagtcgagctgggctggcgacatctgctcgaccttctgcggaagcaaccaggtgctcaggacgccggcaaggatcagggggaaggacgcggcattgcagtcggagttgccgagcaataccggcgcgcacgacggcacatcgtcatccggcgggtctggaagcaactatgggggattcgggctgcccagtgacagcgtccatgtacagaagaggaaggggaggtgtagagacgactcagatagtccgagtgaggatgccgagtgtgaggaggcaagtgaggaaacgaaaccatcaaggcgatatgggacgaaacgccggactcgtgcagctgaagttcacaatctttcagagaggagaagaagggaccggatcaatgaaaagatgcgcgcattgcaagagctcatcccgcattgcaacaagactgacaaagcgtcgatattagacgagacgattgagtatctgaagtccctccaaatgcaagttcagatcatgtggatgacttctgggatggcgccaatgatgtttcctggtgttcaccaattcattccacagatggctctaggaatgaatccaggttgcatccctgcagcacagggcctaagtcagatgccaagattaccatacatgaaccacaccctgccaaaccatatccatctgaactcgtctccagctatgaatctaatgaatccactgaacgccgcgaaccaggtgcaaatcggtcacctcagggatgcaagtagccacttgcttcacctagatggcgggcgagcagcagtggtacctcaggtaccaggaccaggaccccatgttcatggacatcaaatagcacaagccgaagaacacaataagatactggaagtggcagctagtactgttataccaacttctaaggcagggcaaccaccaactttacatagagtttagagtgaccaaaatcatgccttgagctgtatatctgtacagaagtgtcagaagcatattctttgacatgtaagcttagttctagagttattatcaggagtcttgtataggttacaagataacagcctgtctaccgccgtattctatctacggaagaactcagctgcatactgctgtgcagactgcagtacagcgttcaagagagaattgaatgggatcaagaaagggtctttctttttctgggaaccgctgaaaatactgacgtgatgaggagcggatggcatctctgtagctgcgctgcgctgcagtgtatctacatcaatatggcaatgcttgtctggacacgaatgctacatctacatgtaaatgcagagttgcaggtagatagcaacccctctcccctgagatgccaactccgactcctgtcctactgtatgtactgatctgtacagcaagcaatattcaatcagcagtcaattcctaggatgtcgtaaggtactgtggaaacatttttccttcgaatactgttatactaatgaaaaaagggagtgtcgaaatgtttgttgtcaactgacgaaaatccagccagcaggcccgtcctacctgcagacagaatggataacaagcttatgaatccgaagtgcatatttatatcgcatatcatatattaatcaatcctgtctttctgcctgctcctatttgtaggtcacgacaatgatcctatctaagtacataagtcgctaacaccatttcctgcttgtggaaaggtttggtcttgcaggagatgagctcgccagacagtccatcacactgccggcttgattgcatcttcacaggacgtggacttgtgggcacatgctccacgggcaacggttcggcatcctcctggcgttcttgtggctggcagcagccgcgagaatctgtgtggagccctgggctgggctcgttgcaagatatgccagcctctcatcttcagactggaggaggaggggggggttccctctccaggctttttccatgatgttacaggcttacagcattcagagtgcatgttacactcacggccctatcagcacatgctgtgggcagccggtgatgataggatcagatgctcatatctcctgcggttttctgtctaccgcatttggattggatttggaccccccctgtactgtacttcctccttgctcccctgctgcttggcgctttgtccatgtgcctggttggaattgctactatacatttttggagggtaattgtttcaccggaacatgtagcgtggacgtgtggtaataacaattgaattgatgcctttactgtctgagtaataacaaagggaagcgatgagcagcacatggtaagcttccggtgccggttggaggcttcgatgtcgatgtctgcattgagtttatttgatgctgtgtgttctatagctagactaggctagagtttggatagagttcatgggacaatgttgtctgcatcttcatctcccctttagtttaggacttatctgagaggtacggttctttgcatgacagaacaaaactagcagcagcaaaaaaaaaaaaaaaaggaaacaacgacaa

SEQ ID NO: 11322 - DNA, 2760 bp, Zea Mays
atgtctcgtgtgaatggagtcactgacgccttgagcatcggtccctccgcagggtacattctattcttagtaattgtgcatattttactattttttactgcttatgatcgttcatatacactcttagccatccaaaaggttactcttttatgctccgcttgcaaggcgccaaggacggacggaggcgacgactcgcaaggtagctctgctcgggcgaggcagcagcagcacgcagcagtactccgttcagaatcaggagagaagacgttgttctccgggcactcgagtcgaagtcctgacgagatggacggcaatgcgaggtcggcggcaacgaatcagaagaagcccgtcgtcgcggacgacgacctcgtggagctgctgtggcacaacgggagcgtcgtcgcgcagccccaggcgcaccagaggccggcgcccacctacgaccccgaccgcccgggcaccagcggcctcaccggcgaagagaccgccgcgtggttcccggacaccctcgacgacgcgctggagaaggacctgtacacgcagctctggtacagcaccatcgccgacgccgccccgcagcacgagggcacgctcccgggccctacctcgcagccttcgccttcgccgcccgttgggagcagcggcgtcgagtcgagctgggctggcgacatctgctcgaccttctgcggaagcaaccaggtgctcaggacgccggcaaggatcagggggaaggacgcggcattgcagtcggagttgccgagcaataccggcgcgcacgacggcacatcgtcatccggcgggtctggaagcaactatgggggattcgggctgcccagtgacagcgtccatgtacagaagaggaaggggaggtgtagagacgactcagatagatgccgagtgtgaggaggcaagtgaggaaacgaaaccatcaaggcgatatgggacgaaacgccggactcgtgcagctgaagttcacaatctttcagagaggagaagaagggaccggatcaatgaaaagatgcgcgcattgcaagagctcatcccgcattgcaacaagactgacaaagcgtcgatattagacgagacgattgagtatctgaagtccctccaaatgcaagttcagatcatgtggatgacttctgggatggcgccaatgatgtttcctggtgttcaccaattcattccacagatggctctaggaatgaatccaggttgcatccctgcagcacagggcctaagtcagatgccaagattaccatacatgaaccacaccctgccaaaccatatccatctgaactcgtctccagctatgaatctaatgaatccactgaacgccgcgaaccaggtgcaaatcggtcacctcagggatgcaagtagccacttgcttcacctagatggcgggcgagcagcagtggtacctcaggtaccaggaccaggaccccatgttcatggacatcaaatagcacaagccgaagaacacaataagatactggaagtggcagctagtactgttataccaacttctaaggcagggcaaccaccaactttacatagagtttagagtgaccaaaatcatgccttgagctgtatatctgtacagaagtgtcagaagcatattctttgacatgtaagcttagttctagagttattatcaggagtcttgtataggttacaagataacagcctgtctaccgccgtattctatctacggaagaactcagctgcatactgctgtgcagactgcagtacagcgttcaagagagaattgaatgggatcaagaaagggtctttctttttctgggaaccgctgaaaatactgacgtgatgaggagcggatggcatctctgtagctgcgctgcgctgcagtgtatctacatcaatatggcaatgcttgtctggacacgaatgctacatctacatgtaaatgcagagttgcaggtttggtcttgcaggagatgagctcgccagacagtccatcacactgccggcttgattgcatcttcacaggacgtggacttgtgggcacatgctccacgggcaacggttcggcatcctcctggcgttcttgtggctggcagcagccgcgagaatctgtgtggagccctgggctgggctcgttgcaagatatgccagcctctcatcttcagactggaggaggaggggggggttccctctccaggctttttccatgatgttacaggcttacagcattcagagtgcatgttacactcacggccctatcagcacatgctgtgggcagccggtgatgataggatcagatgctcatatctcctgcggttttctgtctaccgcatttggattggatttggaccccccctgtactgtacttcctccttgctcccctgctgcttggcgctttgtccatgtgcctggttggaattgctactatacatttttggagggtaattgtttcaccggaacatgtagcgtggacgtgtggtaataacaattgaattgatgcctttactgtctgagtaataacaaagggaagcgatgagcagcacatggtaagcttccggtgccggttggaggcttcgatgtcgatgtctgcattgagtttatttgatgctgtgtgttctatagctagactaggctagagtttggatagagttcatgggacaatgttgtctgcatcttcatctcccctttagtttaggacttatctgagaggtacggttctttgcatgacagaacaaaactagcagcagcaaaaaaaaaaaaaaaaggaaacaacgacaa

SEQ ID NO: 11323 - DNA, 2766 bp, Zea Mays
atgtctcgtgtgaatggagtcactgacgccttgagcatcggtccctccgcagggtacattctattcttagtaattgtgcatattttactattttttactgcttatgatcgttcatatacactcttagccatccaaaaggttactcttttatgctccgcttgcaaggcgccaaggacggacggaggcgacgactcgcaaggtagctctgctcgggcgaggcagcagcagcacgcagcagtactccgttcagaatcaggagagaagacgttgttctccgggcactcgagtcgaagtcctgacgagatggacggcaatgcgaggtcggcggcaacgaatcagaagaagcccgtcgtcgcggacgacgacctcgtggagctgctgtggcacaacgggagcgtcgtcgcgcagccccaggcgcaccagaggccggcgcccacctacgaccccgaccgcccgggcaccagcggcctcaccggcgaagagaccgccgcgtggttcccggacaccctcgacgacgcgctggagaaggacctgtacacgcagctctggtacagcaccatcgccgacgccgccccgcagcacgagggcacgctcccgggccctacctcgcagccttcgccttcgccgcccgttgggagcagcggcgtcgagtcgagctgggctggcgacatctgctcgaccttctgcggaagcaaccaggtgctcaggacgccggcaaggatcagggggaaggacgcggcattgcagtcggagttgccgagcaataccggcgcgcacgacggcacatcgtcatccggcgggtctggaagcaactatgggggattcgggctgcccagtgacagcgtccatgtacagaagaggaaggggaggtgtagagacgactcagatagtccgagatgccgagtgtgaggaggcaagtgaggaaacgaaaccatcaaggcgatatgggacgaaacgccggactcgtgcagctgaagttcacaatctttcagagaggagaagaagggaccggatcaatgaaaagatgcgcgcattgcaagagctcatcccgcattgcaacaagactgacaaagcgtcgatattagacgagacgattgagtatctgaagtccctccaaatgcaagttcagatcatgtggatgacttctgggatggcgccaatgatgtttcctggtgttcaccaattcattccacagatggctctaggaatgaatccaggttgcatccctgcagcacagggcctaagtcagatgccaagattaccatacatgaaccacaccctgccaaaccatatccatctgaactcgtctccagctatgaatctaatgaatccactgaacgccgcgaaccaggtgcaaatcggtcacctcagggatgcaagtagccacttgcttcacctagatggcgggcgagcagcagtggtacctcaggtaccaggaccaggaccccatgttcatggacatcaaatagcacaagccgaagaacacaataagatactggaagtggcagctagtactgttataccaacttctaaggcagggcaaccaccaactttacatagagtttagagtgaccaaaatcatgccttgagctgtatatctgtacagaagtgtcagaagcatattctttgacatgtaagcttagttctagagttattatcaggagtcttgtataggttacaagataacagcctgtctaccgccgtattctatctacggaagaactcagctgcatactgctgtgcagactgcagtacagcgttcaagagagaattgaatgggatcaagaaagggtctttctttttctgggaaccgctgaaaatactgacgtgatgaggagcggatggcatctctgtagctgcgctgcgctgcagtgtatctacatcaatatggcaatgcttgtctggacacgaatgctacatctacatgtaaatgcagagttgcaggtttggtcttgcaggagatgagctcgccagacagtccatcacactgccggcttgattgcatcttcacaggacgtggacttgtgggcacatgctccacgggcaacggttcggcatcctcctggcgttcttgtggctggcagcagccgcgagaatctgtgtggagccctgggctgggctcgttgcaagatatgccagcctctcatcttcagactggaggaggaggggggggttccctctccaggctttttccatgatgttacaggcttacagcattcagagtgcatgttacactcacggccctatcagcacatgctgtgggcagccggtgatgataggatcagatgctcatatctcctgcggttttctgtctaccgcatttggattggatttggaccccccctgtactgtacttcctccttgctcccctgctgcttggcgctttgtccatgtgcctggttggaattgctactatacatttttggagggtaattgtttcaccggaacatgtagcgtggacgtgtggtaataacaattgaattgatgcctttactgtctgagtaataacaaagggaagcgatgagcagcacatggtaagcttccggtgccggttggaggcttcgatgtcgatgtctgcattgagtttatttgatgctgtgtgttctatagctagactaggctagagtttggatagagttcatgggacaatgttgtctgcatcttcatctcccctttagtttaggacttatctgagaggtacggttctttgcatgacagaacaaaactagcagcagcaaaaaaaaaaaaaaaaggaaacaacgacaa

SEQ ID NO: 11324 - DNA, 2872 bp, Zea Mays
atgtctcgtgtgaatggagtcactgacgccttgagcatcggtccctccgcagggtacattctattcttagtaattgtgcatattttactattttttactgcttatgatcgttcatatacactcttagccatccaaaaggttactcttttatgctccgcttgcaaggcgccaaggacggacggaggcgacgactcgcaaggtagctctgctcgggcgaggcagcagcagcacgcagcagtactccgttcagaatcaggagagaagacgttgttctccgggcactcgagtcgaagtcctgacgagatggacggcaatgcgaggtcggcggcaacgaatcagaagaagcccgtcgtcgcggacgacgacctcgtggagctgctgtggcacaacgggagcgtcgtcgcgcagccccaggcgcaccagaggccggcgcccacctacgaccccgaccgcccgggcaccagcggcctcaccggcgaagagaccgccgcgtggttcccggacaccctcgacgacgcgctggagaaggacctgtacacgcagctctggtacagcaccatcgccgacgccgccccgcagcacgagggcacgctcccgggccctacctcgcagccttcgccttcgccgcccgttgggagcagcggcgtcgagtcgagctgggctggcgacatctgctcgaccttctgcggaagcaaccaggtgctcaggacgccggcaaggatcagggggaaggacgcggcattgcagtcggagttgccgagcaataccggcgcgcacgacggcacatcgtcatccggcgggtctggaagcaactatgggggattcgggctgcccagtgacagcgtccatgtacagaagaggaaggggaggtgtagagacgactcagatagtccgagtgaggatgccgagtgtgaggaggcaagtgaggaaacgaaaccatcaaggcgatatgggacgaaacgccggactcgtgcagctgaagttcacaatctttcagagaggagaagaagggaccggatcaatgaaaagatgcgcgcattgcaagagctcatcccgcattgcaacaagactgacaaagcgtcgatattagacgagacgattgagtatctgaagtccctccaaatgcaagttcagatcatgtggatgacttctgggatggcgccaatgatgtttcctggtgttcaccaattcattccacagatggctctaggaatgaatccaggttgcatccctgcagcacagggcctaagtcagatgccaagattaccatacatgaaccacaccctgccaaaccatatccatctgaactcgtctccagctatgaatctaatgaatccactgaacgccgcgaaccaggtgcaaatcggtcacctcagggatgcaagtagccacttgcttcacctagatggcgggcgagcagcagtggtacctcaggtaccaggaccaggaccccatgttcatggacatcaaatagcacaagccgaagaacacaataagatactggaagtggcagctagtactgttataccaacttctaaggcagggcaaccaccaactttacatagagtttagagtgaccaaaatcatgccttgagctgtatatctgtacagaagtgtcagaagcatattctttgacatgtaagcttagttctagagttattatcaggagtcttgtataggttacaagataacagcctgtctaccgccgtattctatctacggaagaactcagctgcatactgctgtgcagactgcagtacagcgttcaagagagaattgaatgggatcaagaaagggtctttctttttctgggaaccgctgaaaatactgacgtgatgaggagcggatggcatctctgtagctgcgctgcgctgcagtgtatctacatcaatatggcaatgcttgtctggacacgaatgctacatctacatgtaaatgcagagttgcaggtagatagcaacccctctcccctgagatgccaactccgactcctgtcctactgtatgtactgatctgtacagcaagcaatattcaatcagcagtcaattcctaggatgtcgtaaggagatgagctcgccagacagtccatcacactgccggcttgattgcatcttcacaggacgtggacttgtgggcacatgctccacgggcaacggttcggcatcctcctggcgttcttgtggctggcagcagccgcgagaatctgtgtggagccctgggctgggctcgttgcaagatatgccagcctctcatcttcagactggaggaggaggggggggttccctctccaggctttttccatgatgttacaggcttacagcattcagagtgcatgttacactcacggccctatcagcacatgctgtgggcagccggtgatgataggatcagatgctcatatctcctgcggttttctgtctaccgcatttggattggatttggaccccccctgtactgtacttcctccttgctcccctgctgcttggcgctttgtccatgtgcctggttggaattgctactatacatttttggagggtaattgtttcaccggaacatgtagcgtggacgtgtggtaataacaattgaattgatgcctttactgtctgagtaataacaaagggaagcgatgagcagcacatggtaagcttccggtgccggttggaggcttcgatgtcgatgtctgcattgagtttatttgatgctgtgtgttctatagctagactaggctagagtttggatagagttcatgggacaatgttgtctgcatcttcatctcccctttagtttaggacttatctgagaggtacggttctttgcatgacagaacaaaactagcagcagcaaaaaaaaaaaaaaaaggaaacaacgacaa

SEQ ID NO: 11325 - DNA, 2877 bp, Zea Mays
atgtctcgtgtgaatggagtcactgacgccttgagcatcggtccctccgcagggtacattctattcttagtaattgtgcatattttactattttttactgcttatgatcgttcatatacactcttagccatccaaaaggttactcttttatgctccgcttgcaaggcgccaaggacggacggaggcgacgactcgcaaggtagctctgctcgggcgaggcagcagcagcacgcagcagtactccgttcagaatcaggagagaagacgttgttctccgggcactcgagtcgaagtcctgacgagatggacggcaatgcgaggtcggcggcaacgaatcagaagaagcccgtcgtcgcggacgacgacctcgtggagctgctgtggcacaacgggagcgtcgtcgcgcagccccaggcgcaccagaggccggcgcccacctacgaccccgaccgcccgggcaccagcggcctcaccggcgaagagaccgccgcgtggttcccggacaccctcgacgacgcgctggagaaggacctgtacacgcagctctggtacagcaccatcgccgacgccgccccgcagcacgagggcacgctcccgggccctacctcgcagccttcgccttcgccgcccgttgggagcagcggcgtcgagtcgagctgggctggcgacatctgctcgaccttctgcggaagcaaccaggtgctcaggacgccggcaaggatcagggggaaggacgcggcattgcagtcggagttgccgagcaataccggcgcgcacgacggcacatcgtcatccggcgggtctggaagcaactatgggggattcgggctgcccagtgacagcgtccatgtacagaagaggaaggggaggtgtagagacgactcagatagtccgagtgaggatgccgagtgtgaggaggcaagtgaggaaacgaaaccatcaaggcgatatgggacgaaacgccggactcgtgcagctgaagttcacaatctttcagagagggtgagatcagaatcagattgtgctagcaaccaaagcctgttttcaggaaggcagctcgttggtaaattgttcttacagcaatattgactggtgactgctgctgatgtagagaagaagggaccggatcaatgaaaagatgcgcgcattgcaagagctcatcccgcattgcaacaagactgacaaagcgtcgatattagacgagacgattgagtatctgaagtccctccaaatgcaagttcagatatgtttcagatcatgtggatgacttctgggatggcgccaatgatgtttcctggtgttcaccaattcattccacagatggctctaggaatgaatccaggttgcatccctgcagcacagggcctaagtcagatgccaagattaccatacatgaaccacaccctgccaaaccatatccatctgaactcgtctccagctatgaatctaatgaatccactgaacgccgcgaaccaggtgcaaatcggtcacctcagggatgcaagtagccacttgcttcacctagatggcgggcgagcagcagtggtacctcaggtaccaggaccaggaccccatgttcatggacatcaaatagcacaagccgaagaacacaataagatactggaagtggcagctagtactgttataccaacttctaaggcagggcaaccaccaactttacatagagtttagagtgaccaaaatcatgccttgagctgtatatctgtacagaagtgtcagaagcatattctttgacatgtaagcttagttctagagttattatcaggagtcttgtataggttacaagataacagcctgtctaccgccgtattctatctacggaagaactcagctgcatactgctgtgcagactgcagtacagcgttcaagagagaattgaatgggatcaagaaagggtctttctttttctgggaaccgctgaaaatactgacgtgatgaggagcggatggcatctctgtagctgcgctgcgctgcagtgtatctacatcaatatggcaatgcttgtctggacacgaatgctacatctacatgtaaatgcagagttgcaggagatgagctcgccagacagtccatcacactgccggcttgattgcatcttcacaggacgtggacttgtgggcacatgctccacgggcaacggttcggcatcctcctggcgttcttgtggctggcagcagccgcgagaatctgtgtggagccctgggctgggctcgttgcaagatatgccagcctctcatcttcagactggaggaggaggggggggttccctctccaggctttttccatgatgttacaggcttacagcattcagagtgcatgttacactcacggccctatcagcacatgctgtgggcagccggtgatgataggatcagatgctcatatctcctgcggttttctgtctaccgcatttggattggatttggaccccccctgtactgtacttcctccttgctcccctgctgcttggcgctttgtccatgtgcctggttggaattgctactatacatttttggagggtaattgtttcaccggaacatgtagcgtggacgtgtggtaataacaattgaattgatgcctttactgtctgagtaataacaaagggaagcgatgagcagcacatggtaagcttccggtgccggttggaggcttcgatgtcgatgtctgcattgagtttatttgatgctgtgtgttctatagctagactaggctagagtttggatagagttcatgggacaatgttgtctgcatcttcatctcccctttagtttaggacttatctgagaggtacggttctttgcatgacagaacaaaactagcagcagcaaaaaaaaaaaaaaaaggaaacaacgacaa

SEQ ID NO: 11326 - DNA, 2965 bp, Zea Mays
atgtctcgtgtgaatggagtcactgacgccttgagcatcggtccctccgcagggtacattctattcttagtaattgtgcatattttactattttttactgcttatgatcgttcatatacactcttagccatccaaaaggttactcttttatgctccgcttgcaaggcgccaaggacggacggaggcgacgactcgcaaggtagctctgctcgggcgaggcagcagcagcacgcagcagtactccgttcagaatcaggagagaagacgttgttctccgggcactcgagtcgaagtcctgacgagatggacggcaatgcgaggtcggcggcaacgaatcagaagaagcccgtcgtcgcggacgacgacctcgtggagctgctgtggcacaacgggagcgtcgtcgcgcagccccaggcgcaccagaggccggcgcccacctacgaccccgaccgcccgggcaccagcggcctcaccggcgaagagaccgccgcgtggttcccggacaccctcgacgacgcgctggagaaggacctgtacacgcagctctggtacagcaccatcgccgacgccgccccgcagcacgagggcacgctcccgggccctacctcgcagccttcgccttcgccgcccgttgggagcagcggcgtcgagtcgagctgggctggcgacatctgctcgaccttctgcggaagcaaccaggtgctcaggacgccggcaaggatcagggggaaggacgcggcattgcagtcggagttgccgagcaataccggcgcgcacgacggcacatcgtcatccggcgggtctggaagcaactatgggggattcgggctgcccagtgacagcgtccatgtacagaagaggaaggggaggtgtagagacgactcagatagtccgagtgaggtgtttcttggtctactctgttcatcatttttggaaatagggatgctagagtggaatataattgacgaggaaattgcaggatgccgagtgtgaggaggcaagtgaggaaacgaaaccatcaaggcgatatgggacgaaacgccggactcgtgcagctgaagttcacaatctttcagagaggagaagaagggaccggatcaatgaaaagatgcgcgcattgcaagagctcatcccgcattgcaacaagactgacaaagcgtcgatattagacgagacgattgagtatctgaagtccctccaaatgcaagttcagatcatgtggatgacttctgggatggcgccaatgatgtttcctggtgttcaccaattcattccacagatggctctaggaatgaatccaggttgcatccctgcagcacagggcctaagtcagatgccaagattaccatacatgaaccacaccctgccaaaccatatccatctgaactcgtctccagctatgaatctaatgaatccactgaacgccgcgaaccaggtgcaaatcggtcacctcagggatgcaagtagccacttgcttcacctagatggcgggcgagcagcagtggtacctcaggtaccaggaccaggaccccatgttcatggacatcaaatagcacaagccgaagaacacaataagatactggaagtggcagctagtactgttataccaacttctaaggcagggcaaccaccaactttacatagagtttagagtgaccaaaatcatgccttgagctgtatatctgtacagaagtgtcagaagcatattctttgacatgtaagcttagttctagagttattatcaggagtcttgtataggttacaagataacagcctgtctaccgccgtattctatctacggaagaactcagctgcatactgctgtgcagactgcagtacagcgttcaagagagaattgaatgggatcaagaaagggtctttctttttctgggaaccgctgaaaatactgacgtgatgaggagcggatggcatctctgtagctgcgctgcgctgcagtgtatctacatcaatatggcaatgcttgtctggacacgaatgctacatctacatgtaaatgcagagttgcaggtagatagcaacccctctcccctgagatgccaactccgactcctgtcctactgtatgtactgatctgtacagcaagcaatattcaatcagcagtcaattcctaggatgtcgtaaggtttggtcttgcaggagatgagctcgccagacagtccatcacactgccggcttgattgcatcttcacaggacgtggacttgtgggcacatgctccacgggcaacggttcggcatcctcctggcgttcttgtggctggcagcagccgcgagaatctgtgtggagccctgggctgggctcgttgcaagatatgccagcctctcatcttcagactggaggaggaggggggggttccctctccaggctttttccatgatgttacaggcttacagcattcagagtgcatgttacactcacggccctatcagcacatgctgtgggcagccggtgatgataggatcagatgctcatatctcctgcggttttctgtctaccgcatttggattggatttggaccccccctgtactgtacttcctccttgctcccctgctgcttggcgctttgtccatgtgcctggttggaattgctactatacatttttggagggtaattgtttcaccggaacatgtagcgtggacgtgtggtaataacaattgaattgatgcctttactgtctgagtaataacaaagggaagcgatgagcagcacatggtaagcttccggtgccggttggaggcttcgatgtcgatgtctgcattgagtttatttgatgctgtgtgttctatagctagactaggctagagtttggatagagttcatgggacaatgttgtctgcatcttcatctcccctttagtttaggacttatctgagaggtacggttctttgcatgacagaacaaaactagcagcagcaaaaaaaaaaaaaaaaggaaacaacgacaa

SEQ ID NO: 11327 - DNA, 1807 bp, Zea Mays
atgtctcgtgtgaatggagtcactgacgccttgagcatcggtccctccgcagggtacattctattcttagtaattgtgcatattttactattttttactgcttatgatcgttcatatacactcttagccatccaaaaggttactcttttatgctccgcttgcaaggcgccaaggacggacggaggcgacgactcgcaaggtagctctgctcgggcgaggcagcagcagcacgcagcagtactccgttcagaatcaggagagaagacgttgttctccgggcactcgagtcgaagtcctgacgagatggacggcaatgcgaggtcggcggcaacgaatcagaagaagcccgtcgtcgcggacgacgacctcgtggagctgctgtggcacaacgggagcgtcgtcgcgcagccccaggcgcaccagaggccggcgcccacctacgaccccgaccgcccgggcaccagcggcctcaccggcgaagagaccgccgcgtggttcccggacaccctcgacgacgcgctggagaaggacctgtacacgcagctctggtacagcaccatcgccgacgccgccccgcagcacgagggcacgctcccgggccctacctcgcagccttcgccttcgccgcccgttgggagcagcggcgtcgagtcgagctgggctggcgacatctgctcgaccttctgcggaagcaaccaggtgctcaggacgccggcaaggatcagggggaaggacgcggcattgcagtcggagttgccgagcaataccggcgcgcacgacggcacatcgtcatccggcgggtctggaagcaactatgggggattcgggctgcccagtgacagcgtccatgtacagaagaggaaggggaggtgtagagacgactcagatagtccgagtgaggatgccgagtgtgaggaggcaagtgaggaaacgaaaccatcaaggcgatatgggacgaaacgccggactcgtgcagctgaagttcacaatctttcagagaggagaagaagggaccggatcaatgaaaagatgcgcgcattgcaagagctcatcccgcattgcaacaagactgacaaagcgtcgatattagacgagacgattgagtatctgaagtccctccaaatgcaagttcagatcatgtggatgacttctgggatggcgccaatgatgtttcctggtgttcaccaattcattccacagatggctctaggaatgaatccaggttgcatccctgcagcacagggcctaagtcagatgccaagattaccatacatgaaccacaccctgccaaaccatatccatctgaactcgtctccagctatgaatctaatgaatccactgaacgccgcgaaccaggtgcaaatcggtcacctcagggatgcaagtagccacttgcttcacctagatggcgggcgagcagcagtggtacctcaggtaccaggaccaggaccccatgttcatggacatcaaatagcacaagccgaagaacacaataagatactggaagtggcagctagtactgttataccaacttctaaggcagggcaaccaccaactttacatagagtttagagtgaccaaaatcatgccttgagctgtatatctgtacagaagtgtcagaagcatattctttgacatgtaagcttagttctagagttattatcaggagtcttgtataggttacaagataacagcctgtctaccgccgtattctatctacggaagaactcagctgcatactgctgtgcagactgcagtacagcgttcaagagagaattgaatgggaaaggagtagataatgccaagg

SEQ ID NO: 11328 - DNA, 866 bp, Zea Mays
atggtgggcacggcgaacgcaaacctgcaagagcgcgccgcgagcgtctacgccgacggaggcggtgccgcaaacggcatgggcacgttgacggtggggaccgacggcatcggcggcaaggccaccttagggacgacggatggaacgacagcgggcatcggtggcagggtcagcttgggcagcacggacgggatggcgggcattggcggcagcggcacagccaccttgggagccgctggcatgggcggcagcgtcatctgcggcacggtgaccgcgggcacggccggcatgggtggcagcgccacctgtggcactgccacccatgccggccgtgcccgcggtcaccgtgccccagatgacgctgccgcccatgccagcggctcccaaggtgtccgtgccgttgccgccaatgcccgccgtcccgtccgtgctgcccaagctgaccctgccaccgatgcccgttgtcgttccatctgtcgtccccaaggtggtcttgccgccgatgccgtcagtccctaccgtgcccatgccgttcgcggcaccgactccatcggcgtagacgcgcgtgctcctgcaggtttgcgttcgccgtagccaccatgcacaggtggtgcggtgaccagtgtacgcgagtgatgtcattgtttgtgagtactctctgtacgtgcgtcgcatgctttcttttttttcgtaacgttgtacgtatgtatatcctttgtatttctaccacattcatttgctgtatatgtctggtcaacactcttcttccttttttgttcttctattcaaatctgaactttagcttccaccgtatatctgtatatctggcaactcgatgtcattgttgatccataactcacccttat

SEQ ID NO: 11329 - DNA, 913 bp, Zea Mays
agaaattgggaattcccctttgagggactagggatttaaatattccattctcgtcctcgcggggagaaagtttctacattcccatccccgcgagtgctcacaagagagatttcagtccctgtcggagaaattttttcctcgcgtgaaatctgccctcctgctgctcgtcggcctcctcgccatcgccatgctctgcgccagcccgggtcacgcgctgcgccaactgaacgacgccaacggcggtggcctcgagttctccttgggctccaaggcggccgcggcgggggccaagaccgagccgctggacccgtccctgagcgacgactacgagaacgataccagccacgtggagttcgagccagagctcggccgcgcgacggccgtccccgccgcgaccaccgtcaccgtcactgccgccgcggggccgaccacggagcctttgacgtcccggaacgccgccgccgccgccggcagccacagcatgaggtggtggctgccgccgtcgaccttgccgtcgttcccgctgttcccgacccccggcgccggcggcatgcccgccatcccggggctcccgctgcccggcatgccgttccaccccatcggcggctggggcgcgcccgcgcctcccgccccgtcgcagccggcgccttctgccgcagaggccgccgcgagcacgaacgccaacgaccccaacactcgcggagggggcgtcaactgaccaaaccttgctctgcttgcgtatgctgcgacggctaccgttcattttttcagttttttttctctatttttattactactgctactcgtatcgcctcaaatgctgggtctagagcgtgattgatacatgtggttgtattggaaactcataatccaagagtcaagagatgcgcacaaaactttttcgtctgatata

SEQ ID NO: 11330 - DNA, 1367 bp, Zea Mays
gcatttaggtggttttggactttggtcatggtgcgatgaatgaggttttatgaagcaaatagatggagagctcaccgaggagttctgggcctgattctcccctggctggacaaatatattatcttgtttggtctgtttggcgacgaaccgccaaatcgtgagcttaaaatatacacaggatgtcggaacgttctgagagtgcaactgaaaagattatgagcagcatcatggataccattgctgacaaccttcctaagcagaagtctgggaaatttgatccaggttcagtctctgacaaagtgaagaacaagctgtttggtcgtcagaagaccttgcatggagttctgggtggtggaaaacctgctgatgtgctgttatggaggaacaaaaaaatatcatcgagtgttctggctcttgcaacagctatttgggttttctttgagtggctcgactaccactttctgacaattgtttcatttgcccttgttcttggaatggttgtccagtttgtttggtccaacttctcaaacatgctaagcagcggatcccgttctcaggtgccccgagttgaattgcctgatgagttatttgtgaacattgccgttgcaatcggtgcccaagtaaacaagttcctgtgcttccttcaggatgtttcttgtgaaagaaacttgaagcattttgtagtggcgatcgcaggactgtgggctgctgcggtgattggaagttggtgcaatttcctgactgtcatatatgtcgggtttgtttgtgttcacacgcttccggtgctctatgagaagtacgaagaccaagtggacgatttcctctacagccttcttggtctgctgcgagatcaatatcagaagctcgaccacggcgtcttgagcaagattcccaaggggaacatgaaggctaagaagaacgagtagtttagcagatggtttctcgtgaatgagatcaatatcgttttgacttgtgtcgattattaatttattacctaaggcgtgtgtgccattctgaacctggctgctagttcatcgcccaccggggttttaaactactaagctgcaatgcacaagtaatgaagtgtgctagttcattgcccacaggtgtactagttcttcgactcatttaaatttctgatccgatcagttgcgggatattgatagactgcgtgcccataattcatgtctgaaaactggaagttgctgagataaagtttacagtttaggctcaatctgcaaggataagttctggcaaatgtgtatgactattatattccttgttccgcaattccattagcttgataaagtttacagtttttttcttcattaagttaaaaccttattcatgtcaccttcaagaactac

SEQ ID NO: 11331 - DNA, 1408 bp, Zea Mays
gtgccatttcatctatccatcccgcagctcttgtctctggcaaccgtacgcccaaccgtgttcccgcgccgcccacgaactactctccggcgctgcccatgacgacggtgtcgcgcgcgctcggctccgcgttcgcgggcttcacgcgggcgcccgcggtggcgcagaccgcgacgaccctgccctccccgtacggctcgtcggctctgcaccagcactggcgctggagccgggcctgccgcacccggcggttctcgtccggccgcgcggcacggattagcatgagcctccgcgccggtatcgtcgggcttcctaacgtcggcaagtcaaccctcttcaacgccattttctgctgctgtgcaagttgccctctggacttgcttgagtaaaatgcttcgaatggagaaatgttgaaaacgggaaggcacaagctgcaaactttcccttttgcaccatcagcccaaacgttggtgtggtggctatccctgatcctcgtttgcaggtgctctcaaaattaagcaagtcccagcagacggtcccaacatccattgagcttgtggacattgctggtctagtcaaaggagcaagcaaaggagagggactaggaaatcaattcctttcaaacattcgtgaagtggattccatacttcaggttgtgcgatgctttgaggatgacgatatagttcatgtcaatggcaaggtcgatcccagatcagacattgatgtcattaacctagagctgatattttcagaccttgaacagatagagaagaggctagataagcttaacaagagtaaaacgaaagatacccaagtaaaagtgaaggaacaagcagagaaatcaggattggaaaaaattcagcaggcacttatggaaggaaagcctgcaagatcggtcgatttagctgagcatgagaaagaagctataaaacacctttatctgctaactatgaaacctgtcatttatgttgctaatgtgacagaatctgatcttgctgaacctgatagcaattctcatgtcaaagaggtggctaaagcagcatcagacttgcagtctggtatggttacaatatcagctcaggttgaagctgaactcgccgagctacctctagaagagagagtagaatatttaaaatctcttggtgttgctgaaagtggactaggaaatttggtaaaagcaacatataatctattggggttaagaacttatttcacaaccggagacaaggaaacaaaagcttggactattctttcaggcatgactgcgccacaagcagctggagttattcatagtgacttccagaaaggattcatcagagctgaaactgtatcctatgatgattttgttgcagctggttctcttggagtagcaagggagaaagggctgtggtttttataatggatcaag

SEQ ID NO: 11332 - DNA, 1779 bp, Zea Mays
gtgccatttcatctatccatcccgcagctcttgtctctggcaaccgtacgcccaaccgtgttcccgcgccgcccacgaactactctccggcgctgcccatgacgacggtgtcgcgcgcgctcggctccgcgttcgcgggcttcacgcgggcgcccgcggtggcgcagaccgcgacgaccctgccctccccgtacggctcgtcggctctgcaccagcactggcgctggagccgggcctgccgcacccggcggttctcgtccggccgcgcggcacggattagcatgagcctccgcgccggtatcgtcgggcttcctaacgtcggcaagtcaaccctcttcaacgccattttctgctgctgtgcaagttgccctctggacttgcttgagtaaaatgcttcgaatggagaaatgttgaaaacgggaaggcacaagctgcaaactttcccttttgcaccatcagcccaaacgttggtgtggtggctatccctgatcctcgtttgcaggtgctctcaaaattaagcaagtcccagcagacggtcccaacatccattgagcttgtggacattgctggtctagtcaaaggagcaagcaaaggagagggactaggaaatcaattcctttcaaacattcgtgaagtggattccatacttcaggttgtgcgatgctttgaggatgacgatatagttcatgtcaatggcaaggtcgatcccagatcagacattgatgtcattaacctagagctgatattttcagaccttgaacagatagagaagaggctagataagcttaacaagagtaaaacgaaagatacccaagtaaaagtgaaggaacaagcagagaaatcaggattggaaaaaattcagcaggcacttatggaaggaaagcctgcaagatcggtcgatttagctgagcatgagaaagaagctataaaacacctttatctgctaactatgaaacctgtcatttatgttgctaatgtgacagaatctgatcttgctgaacctgatagcaattctcatgtcaaagaggtggctaaagcagcatcagacttgcagtctggtatggttacaatatcagctcaggttgaagctgaactcgccgagctacctctagaagagagagtagaatatttaaaatctcttggtgttgctgaaagtggactaggaaatttggtaaaagcaacatataatctattggggttaagaacttatttcacaaccggagacaaggaaacaaaagcttggactattctttcaggcatgactgcgccacaagcagctggagttattcatagtgacttccagaaaggattcatcagagctgaaactctggttctcttggagtagcaagggagaaagggctgctgaggttggaagggaaggattatgttgtgcaggaaggagatgtcatgcttttcagattcaacgtgtgacagcaatagtagcaaaaggcttcaaaaacaccggaatttgtactaggcagaatatagtttgcccatattgtgagattttttttttgccacttgaccaccgattattgatctaccacgctggtagggcagctttcttagatcaagcctaatactggacagctatcattgttagcttcacctaaaaagtagtaccccgcactagggaataatttctcggacgaatttcaaaaaaaaaaaaaaactcgctctcggtactggcccggattcaaatttcggaggatttcatttgaaaacttaaaaatgtgaaaaatatataaaaataaaaactatgataaaaaactagacgct

SEQ ID NO: 11333 - DNA, 1713 bp, Zea Mays
gtgccatttcatctatccatcccgcagctcttgtctctggcaaccgtacgcccaaccgtgttcccgcgccgcccacgaactactctccggcgctgcccatgacgacggtgtcgcgcgcgctcggctccgcgttcgcgggcttcacgcgggcgcccgcggtggcgcagaccgcgacgaccctgccctccccgtacggctcgtcggctctgcaccagcactggcgctggagccgggcctgccgcacccggcggttctcgtccggccgcgcggcacggattagcatgagcctccgcgccggtatcgtcgggcttcctaacgtcggcaagtcaaccctcttcaacgccattgttgaaaacgggaaggcacaagctgcaaactttcccttttgcaccatcagcccaaacgttggtgtggtggctatccctgatcctcgtttgcaggtgctctcaaaattaagcaagtcccagcagacggtcccaacatccattgagcttgtggacattgctggtctagtcaaaggagcaagcaaaggagagggactaggaaatcaattcctttcaaacattcgtgaagtggattccatacttcaggttgtgcgatgctttgaggatgacgatatagttcatgtcaatggcaaggtcgatcccagatcagacattgatgtcattaacctagagctgatattttcagaccttgaacagagaagaggctagataagcttaacaagagtaaaacgaaagatacccaagtaaaagtgaaggaacaagcagagaaatcaggattggaaaaaattcagcaggcacttatggaaggaaagcctgcaagatcggtcgatttagctgagcatgagaaagaagctataaaacacctttatctgctaactatgaaacctgtcatttatgttgctaatgtgacagaatctgatcttgctgaacctgatagcaattctcatgtcaaagaggtggctaaagcagcatcagacttgcagtctggtatggttacaatatcagctcaggttgaagctgaactcgccgagctacctctagaagagagagtagaatatttaaaatctcttggtgttgctgaaagtggactaggaaatttggtaaaagcaacatataatctattggggttaagaacttatttcacaaccggagacaaggaaacaaaagcttggactattctttcaggcatgactgcgccacaagcagctggagttattcatagtgacttccagaaaggattcatcagagctgaaactctggttctcttggagtagcaagggagaaagggctgctgaggttggaagggaaggattatgttgtgcaggaaggagatgtcatgcttttcagattcaacgtgtgacagcaatagtagcaaaaggcttcaaaaacaccggaatttgtactaggcagaatatagtttgcccatattgtgagattttttttttgccacttgaccaccgattattgatctaccacgctggtagggcagctttcttagatcaagcctaatactggacagctatcattgttagcttcacctaaaaagtagtaccccgcactagggaataatttctcggacgaatttcaaaaaaaaaaaaaaactcgctctcggtactggcccggattcaaatttcggaggatttcatttgaaaacttaaaaatgtgaaaaatatataaaaataaaaactatgataaaaaactagacgct

SEQ ID NO: 11334 - DNA, 1980 bp, Zea Mays
gatttctcctttgctcttctttggcagtcttcaaattctgtttgtttagtttatatatggtcttgcgattcaatgatttccgtcggttttcatccctacctaattggcacccctacttgcacgtgcgttctgcgcgggtcacgtgccatttcatctatccatcccgcagctcttgtctctggcaaccgtacgcccaaccgtgttcccgcgccgcccacgaactactctccggcgctgcccatgacgacggtgtcgcgcgcgctcggctccgcgttcgcgggcttcacgcgggcgcccgcggtggcgcagaccgcgacgaccctgccctccccgtacggctcgtcggctctgcaccagcactggcgctggagccgggcctgccgcacccggcggttctcgtccggccgcgcggcacggattagcatgagcctccgcgccggtatcgtcgggcttcctaacgtcggcaagtcaaccctcttcaacgccattgttgaaaacgggaaggcacaagctgcaaactttcccttttgcaccatcagcccaaacgttggtgtggtggctatccctgatcctcgtttgcaggtgctctcaaaattaagcaagtcccagcagacggtcccaacatccattgagcttgtggacattgctggtctagtcaaaggagcaagcaaaggagaggtaccagttttgccattgtcttcaattaacctgcaggatacctccaactccgctgagcaaatgtgagatggttccagattagtttatacataatggtattatggttggcaattgaaaacagggactaggaaatcaattcctttcaaacattcgtgaagtggattccatacttcaggttgtgcgatgctttgaggatgacgatatagttcatgtcaatggcaaggtcgatcccagatcagacattgatgtcattaacctagagctgatattttcagaccttgaacagatagagaagaggctagataagcttaacaagagtaaaacgaaagatacccaagtaaaagtgaaggaacaagcagagaaatcaggattggaaaaaattcagcaggcacttatggaaggaaagcctgcaagatcggtcgatttagctgagcatgagaaagaagctataaaacacctttatctgctaactatgaaacctgtcatttatgttgctaatgtgacagaatctgatcttgctgaacctgatagcaattctcatgtcaaagaggtggctaaagcagcatcagacttgcagtctggtatggttacaatatcagctcaggttgaagctgaactcgccgagctacctctagaagagagagtagaatatttaaaatctcttggtgttgctgaaagtggactaggaaatttggtaaaagcaacatataatctattggggttaagaacttatttcacaaccggagacaaggaaacaaaagcttggactattctttcaggcatgactgcgccacaagcagctggagttattcatagtgacttccagaaaggattcatcagagctgaaactctggttctcttggagtagcaagggagaaagggctgctgaggttggaagggaaggattatgttgtgcaggaaggagatgtcatgcttttcagattcaacgtgtgacagcaatagtagcaaaaggcttcaaaaacaccggaatttgtactaggcagaatatagtttgcccatattgtgagattttttttttgccacttgaccaccgattattgatctaccacgctggtagggcagctttcttagatcaagcctaatactggacagctatcattgttagcttcacctaaaaagtagtaccccgcactagggaataatttctcggacgaatttcaaaaaaaaaaaaaaactcgctctcggtactggcccggattcaaatttcggaggatttcatttgaaaacttaaaaatgtgaaaaatatataaaaataaaaactatgataaaaaactagacgct

SEQ ID NO: 11335 - DNA, 1848 bp, Zea Mays
gtggcttcaactttctggttcttcaaggatttctcctttgctcttctttggcagtcttcaaattctgtttgtttagtttatatatggtcttgcgattcaatgatttccgtcggttttcatccctacctaattggcacccctacttgcacgtgcgttctgcgcgggtcacgtgccatttcatctatccatcccgcagctcttgtctctggcaaccgtacgcccaaccgtgttcccgcgccgcccacgaactactctccggcgctgcccatgacgacggtgtcgcgcgcgctcggctccgcgttcgcgggcttcacgcgggcgcccgcggtggcgcagaccgcgacgaccctgccctccccgtacggctcgtcggctctgcaccagcactggcgctggagccgggcctgccgcacccggcggttctcgtccggccgcgcggcacggattagcatgagcctccgcgccggtatcgtcgggcttcctaacgtcggcaagtcaaccctcttcaacgccattgttgaaaacgggaaggcacaagctgcaaactttcccttttgcaccatcagcccaaacgttggtgtggtggctatccctgatcctcgtttgcaggtgctctcaaaattaagcaagtcccagcagacggtcccaacatccattgagcttgtggacattgctggtctagtcaaaggagcaagcaaaggagagggactaggaaatcaattcctttcaaacattcgtgaagtggattccatacttcaggttgtgcgatgctttgaggatgacgatatagttcatgtcaatggcaaggtcgatcccagatcagacattgatgtcattaacctagagctgatattttcagaccttgaacaggaacaagcagagaaatcaggattggaaaaaattcagcaggcacttatggaaggaaagcctgcaagatcggtcgatttagctgagcatgagaaagaagctataaaacacctttatctgctaactatgaaacctgtcatttatgttgctaatgtgacagaatctgatcttgctgaacctgatagcaattctcatgtcaaagaggtggctaaagcagcatcagacttgcagtctggtatggttacaatatcagctcaggttgaagctgaactcgccgagctacctctagaagagagagtagaatatttaaaatctcttggtgttgctgaaagtggactaggaaatttggtaaaagcaacatataatctattggggttaagaacttatttcacaaccggagacaaggaaacaaaagcttggactattctttcaggcatgactgcgccacaagcagctggagttattcatagtgacttccagaaaggattcatcagagctgaaactgtatcctatgatgattttgttgcagctggttctcttggagtagcaagggagaaagggctgctgaggttggaagggaaggattatgttgtgcaggaaggagatgtcatgcttttcagattcaacgtgtgacagcaatagtagcaaaaggcttcaaaaacaccggaatttgtactaggcagaatatagtttgcccatattgtgagattttttttttgccacttgaccaccgattattgatctaccacgctggtagggcagctttcttagatcaagcctaatactggacagctatcattgttagcttcacctaaaaagtagtaccccgcactagggaataatttctcggacgaatttcaaaaaaaaaaaaaaactcgctctcggtactggcccggattcaaatttcggaggatttcatttgaaaacttaaaaatgtgaaaaatatataaaaataaaaactatgataaaaaactagacgct

SEQ ID NO: 11336 - DNA, 1382 bp, Zea Mays
ctcatcgccacctacgagtttctccctgcgcctttggagactcgctgactggggaagatggttgtccaggagttcacagttgatctcaacaagccccttgttttccaggtatgcctcgctcttagttgctcctttgcgatggttgctgtgaatcttagcctttttgaagtagcttatgggattctctctcgcactttacaagttattatgtacttttgagcttgtttaatgcagctttgggtcttttcgcaaccaggccttagtgttagactgtgctttctcctcagcaataattgtggcagattctatcatgaaagcggaatctcatgtagtagttgtaaacttccgagtttctgagtcgatgtccagctgcttcacgtggttcgcattcacataaccatcttctggttgtttcttgattttgtggatgcaggttggccatcttgaggaacggtaccaggaatgggttcaccaaccgatcgtcagcaaggagggtccacgctttttcggaaatgatgtcctggagttcttgactcgcacgaagtggtgggctgtgccaactatatggctgcctgttgtctgctgcctgctcgtgaaatctattctgatgggtcataccgttcaggacgtagctatgatggctctatttgggatatttatttggacgctgatcgaatacactttgcaccgcttcctgttccacattgagaccaagacctactggtggaacaccgcgcattaccttcttcacgggtgccaccataagcaccccatggactcactcaggcttgtgtttcctcctactgcaacagcaattttgtgtttcccgttctggaacctggtcgcgttcttcgcaactccctctaccacacccgcactgttcggaggcggtctgttgggatatgtgatgtatgattgcactcactactacctgcaccatgggcaaccatccaaagacccagcaaaacatctcaagaggtatcacctcaaccatcacttcagaatccaggacaagggcttcggcatcacctcatcgctttgggacgctgtctttgggacattgcctccatccatgacgtctgggaagaagaactgacgcacgtaactcaattcttggcatgagagattctaggggacctgtaatatatattcaagctagggataatcctggatctgtcttcgtgcgatgggttgacatgttcattcagttctcaaagttcttgtagtgtactgattgtctgttgatctattctgaatgtgatgatagtacttcgctgcctcagccttctgtgcattgccagctgtaccgaaaacggcatgttttacttaactcttttcgtctagttcttaaaatcagagcatcagactcttgcaaatgcaag

SEQ ID NO: 11337 - DNA, 1634 bp, Zea Mays
cttctctcgatcacgccgtgcttccccgccgggccgcattggacaatatcgctcgctcgcccggtctagtttcgtagatgtacgacgccggagatattttttttcccgcggcgcttgggtggcggcggacctgtggtttcagggtcccaatgccttggatctagaccgagactgctcttgtcgcatccggtgccatggtgttgtgcgaagtctgttcagattcgtgcgaacattttcactgcaaaacattatgactcaacaaaaaaaaaagaggcgcgtagacactagaggcacagtcttgtgagttgcgacgcacagtcaagtatcggttgccaaatccgtgcgaacaacggctgtgggcgagtaagcaaggagatgaagattgcctgtcgtgtggtggagccacagccacatgccgatgactgcctaatcagggagaagccgtcgtgggcaagcggggaaaggcgataatcatggtaccctcactggtggtgcgtgtctgctgtctaggcctgaagctggctagttcggcgcggctctccccagtccccaccactgtcattgtcagttggttctgctcatcgccacctacgagtttctccctgcgcctttggagactcgctgactggggaagatggttgtccaggagttcacagttgatctcaacaagccccttgttttccaggttggccatcttgaggaacggtaccaggaatgggttcaccaaccgatcgtcagcaaggagggtccacgctttttcggaaatgatgtcctggagttcttgactcgcacgaagtggtgggctgtgccaactatatggctgcctgttgtctgctgcctgctcgtgaaatctattctgatgggtcataccgttcaggacgtagctatgatggctctatttgggatatttatttggacgctgatcgaatacactttgcaccgcttcctgttccacattgagaccaagacctactggtggaacaccgcgcattaccttcttcacgggtgccaccataagcaccccatggactcactcaggcttgtgtttcctcctactgcaacagcaattttgtgtttcccgttctggaacctggtcgcgttcttcgcaactccctctaccacacccgcactgttcggaggcggtctgttgggatatgtgatgtatgattgcactcactactacctgcaccatgggcaaccatccaaagacccagcaaaacatctcaagaggtatcacctcaaccatcacttcagaatccaggacaagggcttcggcatcacctcatcgctttgggacgctgtctttgggacattgcctccatccatgacgtctgggaagaagaactgacgcacgtaactcaattcttggcatgagagattctaggggacctgtaatatatattcaagctagggataatcctggatctgtcttcgtgcgatgggttgacatgttcattcagttctcaaagttcttgtagtgtactgattgtctgttgatctattctgaatgtgatgatagtacttcgctgcctcagccttctgtgcattgccagctgtaccgaaaacggcatgttttacttaactcttttcgtctagttcttaaaatcagagcatcagactcttgcaaatgcaag

SEQ ID NO: 11338 - DNA, 1167 bp, Zea Mays
cgctaattcttccaaacgcacgcacacaggcgtgcggggatctgtctggcggcagactggaggcatctttttttggcagaatacccccctgcctcttattcggcccccgctcgcccctgcagtgccatccgctgctcttctccgttcgaccgcccgcccgcccgcccgcccctcctctctctctgtctcgccgcccggggagaaggagggctccgccgctcccggggaagagcgcgccattgccgccgccgcgctgactggggaagatggttgtccaggagttcacagttgatctcaacaagccccttgttttccaggttggccatcttgaggaacggtaccaggaatgggttcaccaaccgatcgtcagcaaggagggtccacgctttttcggaaatgatgtcctggaggacgtagctatgatggctctatttgggatatttatttggacgctgatcgaatacactttgcaccgcttcctgttccacattgagaccaagacctactggtggaacaccgcgcattaccttcttcacgggtgccaccataagcaccccatggactcactcaggcttgtgtttcctcctactgcaacagcaattttgtgtttcccgttctggaacctggtcgcgttcttcgcaactccctctaccacacccgcactgttcggaggcggtctgttgggatatgtgatgtatgattgcactcactactacctgcaccatgggcaaccatccaaagacccagcaaaacatctcaagaggtatcacctcaaccatcacttcagaatccaggacaagggcttcggcatcacctcatcgctttgggacgctgtctttgggacattgcctccatccatgacgtctgggaagaagaactgacgcacgtaactcaattcttggcatgagagattctaggggacctgtaatatatattcaagctagggataatcctggatctgtcttcgtgcgatgggttgacatgttcattcagttctcaaagttcttgtagtgtactgattgtctgttgatctattctgaatgtgatgatagtacttcgctgcctcagccttctgtgcattgccagctgtaccgaaaacggcatgttttacttaactcttttcgtctagttcttaaaatcagagcatcagactcttgcaaatgcaag

SEQ ID NO: 11339 - DNA, 1345 bp, Zea Mays
ctcagatccggagttaatcactttgattcgtcgtgttgcggcccagatcttctgttcctcaggcgatgtcaaacaattcaagtggtcagcaatttccccccacccctgatatggcctaggggcttcgtgcaccagcaacctatggattgcaccatgatgggcaacctaaattttcctaatgcagctcaaggtccaacaataatgtgggctcccattcagacaggaaatacaagttccaaattaaccatgcttccagcctcacaatctgctatgtattggaaccattacatgaactttgtcaggaatccttttgcagattcctttctaggttcaaatcctagtacaccattgcagggttcgaatacggtaccttcaatacctgtgaagttggagtctgatgctgaacatagtgttcaggacataaatagtcctgtaaagaatccagcacctgttaacaaaccaaagaaaaccaaagaacaaaactttactgctcctgaagaccttatactttgcaccacatggttgcaaattagcagtgatcctattgtccacactggacaaaggaaggagggactttgggcacaaatagaaaaaaggtacaacgaacaaagggccaagttccactgtagactaaaccgagcacttagcagtagatgggacaagattcgagcagatgtgaacttccaaggcggctacattgtttgcacacgaagagaacaaaccattccattttatgcattgctggcatcaactgaagggggaacccaattgggagagcatctgtcaaggaaatgtatttcgaggaatacatggaaaatcaattggatcttctggaaacaccctcttggtcgtgattctagtaaaactgagagaaagaaagctgtgtcatcatcgtcgacggaatacttaagccgtctgcaagatttaactgaaaaacaacttcagcgctgcatagaaaagggtgagaagaaagaaaagtgcactgaacaagacagggaactagagaaaaagaggttggaattggaagcgaagttaagcattcgtgaaagggaattgaaacttgaagaactccaatcggccaaacaacaattgcagatgttgcagtctactagtgaagacgaagtggatcctgaagtttggattatgatgaaggagcacaaaaaacgcttgcagcagttcatttttagttttcagtaaaagtactgttgtgtcacatgccgtactagtggtgccgaaacctgtttcagaattctgttctaagttcattgtgttatttattttctcaaacattataaagttgttgtaaccataagtcttgcatgacatgttggttctatttaatgtt

SEQ ID NO: 11340 - DNA, 1414 bp, Zea Mays
atccgttcttttccactccgacccacgccgacatcctcagatccggagttaatcactttgattcgtcgtgttgcggcccagatcttctgttcctcagaatggacccaacaaacaatgccaaaaattctcaggcgatgtcaaacaattcaagtggtcagcaatttccccccacccctgatatggcctaggggcttcgtgcaccagcaacctatggattgcaccatgatgggcaacctaaattttcctaatgcagctcaaggtccaacaataatgtgggctcccattcagacaggaaatacaagttccaaattaaccatgcttccagcctcacaatctgctatgtattggaaccattacatgaactttgtcaggaatccttttgcagattcctttctaggttcaaatcctagtacaccattgcagggttcgaatacggtaccttcaatacctgtgaagttggagtctgatgctgaacatagtgttcaggacataaatagtcctgtaaagaatccagcacctgttaacaaaccaaagaaaaccaaagaacaaaactttactgctcctgaagaccttatactttgcaccacatggttgcaaattagcagtgatcctattgtccacactggacaaaggaaggagggactttgggcacaaatagaaaaaaggtacaacgaacaaagggccaagttccactgtagactaaaccgagcacttagcagtagatgggacaagattcgagcagatgtgaacttccaaggcggctacattgtttgcacacgaagagaacaaaccattccattttatgcattgctggcatcaactgaagggggaacccaattgggagagcatctgtcaaggaaatgtatttcgaggaatacatggaaaatcaattggatcttctggaaacaccctcttggtcgtgattctagtaaaactgagagaaagaaagctgtgtcatcatcgtcgacggaatacttaagccgtctgcaagatttaactgaaaaacaacttcagcgctgcatagaaaagggtgagaagaaagaaaagtgcactgaacaagacagggaactagagaaaaagaggttggaattggaagcgaagttaagcattcgtgaaagggaattgaaacttgaagaactccaatcggccaaacaacaattgcagatgttgcagtctactagtgaagacgaagtggatcctgaagtttggattatgatgaaggagcacaaaaaacgcttgcagcagttcatttttagttttcagtaaaagtactgttgtgtcacatgccgtactagtggtgccgaaacctgtttcagaattctgttctaagttcattgtgttatttattttctcaaacattataaagttgttgtaaccataagtcttgcatgacatgttggttctatttaatgtt

SEQ ID NO: 11341 - DNA, 980 bp, Zea Mays
ggtcatagatttgtctagacctggcaacagcagtatataaggtttcatcttatgccaaggatcacaatgtaccggttattgctgatggtggaatttcaaactctgggcatattgtgaaagctctgtcgctgggggcatccactgttatgatgggcagctttttagctggtagtcatgaagctcctggtacttatgagtataaggacggccgccgagtcaaaaaatacagaggcatgggctctcttgaagccatgacaaaagggagtgatgcaaggtaccttggtgatacactcaagctcaaagtcgcgcagggcgttgttggagcagtagctgacaaaggttctgtactgaggtttattccttacacaatgcaagcagttaagcaaggattacaagatcttggtgcagattctctccagtcagctcatgatcttttgcggtcagagacactcagattagaggtgagaaccggtgctgcccaggctgaaggaggtatccatggactggtttcatacgagaagaaggcattctaggtccataactaaacaaagaagtattggaacgatagtggttagctgcatgatatggaagggggcgatgctcatttatcctacctggcaaaagctcagcagcttgtcagcaaagcttgtcgagttgggcagcaagtgtaccatctgcttggcgtcatataataataaacctctggcatcggaactgttgtataagctcacagcttgtcatctaaacatttttcccaattttgttaaaagagtaaaacatcaatggttgattgatctactttgccgcgccatgttttaacctaccacaatgccgtaccttgtattattatgtgttcgaagaatggttgatgatagtggtttgtctctaaagttgtcatcctggctagtgtgctgacccgaatgtggtttagatttgaattgctttagacccgacaaaattttagcaggctttcactatga

SEQ ID NO: 11342 - DNA, 850 bp, Zea Mays
cctaggctcgctgatcccgagaaatgaggaggggaaaagaagggggaatcccgcgtgcgactccgacaacaagagggcgaaaagggcgcctcgagaagtcgaagagaagggtgacccagttgcgctgcacgacgttttctctcgagagatggaattgggaaacttgggcaaggaggagtcgagaactgttgacgccgactggatcaaggattcagcggcaaaagtcaactcgcctatgggggagtagacaagaaaaggcgatcgacttggtgtcctcgcgtggggatgatggcgacgtgatcagaatcattcaactaagaatagtaatgcatctgatggcggatggtgtagtagtgctgattgtactcatcggcgagaagaagcaaatgagcgacgccaatcatctgcatataataatgataaataataaaaggggagaatccagttacaaggtaccgatggatccggcacagcgagaaactgtagattccagcttctcagttggacacagtcgctgccttcattgctcgatatggtcacgaggaacccacgtgctcgacgctggagaaggtgacgagagggccggacacgcgggccggccgtgactgcgcacagaacaacactaggcgactactacttccacgcaatagagatcgacggaaacggatggcagaaaacaaaccgagagtcgtccatgtccgccacccaggcatgagggtgaggcatccacgcctgccacggccacgggacggtgggtcgacgtccgccagcgcatcggcgttggcgtgcaagcgattaagcggcatatgccacggccacgaccggattggtccactggagtcgacggcgc

SEQ ID NO: 11343 - DNA, 585 bp, Zea Mays
ctatccccacgtcactcctcattcttatctgttgacgcatccttctcaatcctgtcggtcttctcctgtacggctctgctgcctgagatattttccatcacgcatacatgcgctagcctctggccatggcgttcaagttctgctcggctcctccggccaggctgccgcgctcacctccgtgagatattccagcgccgcccgtgcttggagaagaagatcctgccgcccgaccgcttttcctcagatgtttgtcgccggtcgccgccatccctgttctttttatatgcgcggcctgcggaccacaaggcccaacaagaggaggtgcacaggccttgagtgggtgaattagacctatgactatgtatcgtggctccactatatatgggttgttcgtagacagggagagggtgtttttttggctgtaagaactcaggcggcggcggcgatccgaggtgatcgtcttccgaatcggaccgtactttccacaccaccataatcaagcgtgtgctccgtcttaatcctatgtgagtgttgttgtgttgtttggatgctaacactggcgatggcaccggcagcggcctctgg

SEQ ID NO: 11344 - DNA, 1111 bp, Zea Mays
aaatattgtgaccgatattgttttgatccaaccatttattgtcccttttaaactctaatcttaaaatccttgtttatctatacacttttgttaaaggaaatgtgaaattccttttctcatttatcccaccgccctctagtttcctatccccacgtcactcctcattcttatctgttgacgcatccttctcaatcctgtcggtcttctcctgtacggctctgctgcctgagatattttccatcacgcatacatgcgctagcctctggccatggcgttcaagttctgctcggctcctccggccaggctgccgcgctcacctccgtgagatattccagcgccgcccgtgcttggagaagaagatcctgccgcccgaccgcttttcctcagatgtttgtcgccggtcgccgccatccctgttctttttatatgcgcggcagcagcacccagggagccggactccaccgttttcttctccagccgcgcatctctgctctactcccacaagctcgtcctccgctcggcctcacccacccgctcctccatctccgccccttgctggctgtgaacgacgctggtattcaggatggcatgggtaaagctactcaagggggcgcgggagaatcaccagcaggaggcgagggcgacgctgttccagcagctcaggcgcggcctgcggaccacaaggcccaacaagaggaggtgcacaggccttgagtgggtgaattagacctatgactatgtatcgtggctccactatatatgggttgttcgtagacagggagagggtgtttttttggctgtaagaactcaggcgcggcctgcggaccacaaggcccaacaagaggaggtgcacaggccttgagtgggtgaattagacctatgactatgtatcgtggctccactatatatgggttgttcgtagacagggagagggtgtttttttggctgtaagaactcaggcggcggcggcgatccgaggtgatcgtcttccgaatcggaccgtactttccacaccaccataatcaagcgtgtgctccgtcttaatcctatgtgagtgttgttgtgttgtttggatgctaacactggcgatggcaccggcagcggcctctgg

SEQ ID NO: 11345 - DNA, 2571 bp, Zea Mays
gccttttgttttgtttcctatttcctttccttctcgtgtagcttttcggccggcgaccgcgacctgaccgtccgccactgcgcacctgccggcgtctgggcgacgccccgccgccagcctgccaccaccacgacgcctgcaccggaatccgacactgtctcaaccactccgtcgtgcctatccgaagctcaacggcggagcccggtgggatagggcggaggcgctgaggcctgagggggagactggacctgggctgcacgaggtaggctgtgcggtggcggaaggaatcaccgatgagcgatgcgcaggcgacaggggatggtccgcgctgcgttggctgcggcgggcgcgtgaagacgctcttcgtgcagtactccccgggcaacatccgcttgatgaaatgcgataagtgcaaggctgttgctgatccctacatcgagtgcgagttcatgatcatcttgattgatctcgtcctgcacaagacaagggcgtaccgccatgttctgtttaataagctgagcatgggatcatccgttgacaaggtatgaaatatgaatctatgctttctaggccgactctggttgctgtatcacattcctggaaacatcaaattggtgcttggctcatactgcaaacatcgagtaccacctttcttttggctggtctcatagtagtaatgctctaaatctctaatcatttatgcatttcactttgacttgccttacctaatcagtatgaaacaattgttactggagatgcccacttgtcgagtagttaatgtatggatgaagctaaatatggctttgtcatcgttatccatgctaaattgcctggacccaggtgtgctctcctttctgcattaaagcaaagcatttacttcttcggtatcttttctgtttcaattttatctcgtggagtaacacaagcaatcaggaaggtatggatggcattcaattttactcaataattcccatgcttctgcttgaaaaactggaacttttctttctgccttttgctaacgatagcattcctgtttcaccgaaccttcggccttttgtgatttttcgacccttcacaacagcatacaagaaccaatttgacaacaacatacaagaaccaatttggcacaaaaaagttttctatccgtataggttctaaatgaacagtttggcaatcttgttgcaatctgatctcatattgtagtgatttcataccttccctcaagaacatatttggtgggtatgtcttcatgaccatatataatttgattccttttctaaaatgtctgttgtgttctggtttgcagggaatactttaccggtctactttgatacacattgctcttgacacatgtatccttagaattcataatttttttctttgatttggtttactataaactgtctgcccaacttaagcagtccatgactatgtaatgtaagtcagaatatctttttcgaaaggaaacagagctggtggggcttcttccaggagcattttctcaacagtttccaattgcactgaggttgttggcgatgcattattgggaaacatcgtatttatattcatgttactcctgggagtgcgattttttctcaaattatctttcgatattataagtcaggtatagggatattctgttcgctgtcatcatttcaagctacttcaagttgtttcttttcacaatgatggtttgggagtttccgtcatctgttatattcattgttgagatgtttgttctctcatcaaacgttgtagccctgagagtttccaagagcccactgtttcgcggtctgcttactagcgcacgcagcaaaatacttgacccagcgatggatccttggaacgccatgagagcctgaactcgtacagatcaatcatcctggtgcttccagcgacgtctataggtatactgtggcctgatgatgagctctggtttctatcgagttctttgactgtgttgccttgtctcctccaccccctctccctgtgactgtgagtactatcttcaatgtacttgcggcgaagacggatatggcatctttactcataggcagtagctgttgagtgttgtgtggttggtacttggtcccttgacccaaccaccggcctactactacgtagcatctgcggcgtctcctgttcacgaaagaatgcagcaaaggaaagacctactaggctattaccatcgtgttcttctttggcggttctgtcaacattacctgtgaactctcgtttcctggctgcagctgcagatgtgctccagtggagcctaccgctacgcgctaccactttgtgttggacacttgaactgcaatgcacatgcacagtcacgggcacagatagtctcatctcatactagtcagatccagcctctccgaatctggccagcagagggaacagcacgccgtgcacgcacgcaccgcatgagggcagcgttttcagtctagtgatcacgatcttgtgctgtgttgtgcttgtgtgtaccgcgcgaccattttgctcggaagcagcttgtagcctgacgctcggtttatacgtgagctcaagtgcaccaattgaggattggag

SEQ ID NO: 11346 - DNA, 2191 bp, Zea Mays
gccttttgttttgtttcctatttcctttccttctcgtgtagcttttcggccggcgaccgcgacctgaccgtccgccactgcgcacctgccggcgtctgggcgacgccccgccgccagcctgccaccaccacgacgcctgcaccggaatccgacactgtctcaaccactccgtcgtgcctatccgaagctcaacggcggagcccggtgggatagggcggaggcgctgaggcctgagggggagactggacctgggctgcacgaggtaggctgtgcggtggcggaaggaatcaccgatgagcgatgcgcaggcgacaggggatggtccgcgctgcgttggctgcggcgggcgcgtgaagacgctcttcgtgcagtactccccgggcaacatccgcttgatgaaatgcgataagtgcaaggctgttgctgatccctacatcgagtgcgagttcatgatcatcttgattgatctcgtcctgcacaagacaagggcgtaccgccatgttctgtttaataagctgagcatgggatcatccgttgacaaggtatgaaatatgaatctatgctttctaggccgactctggttgctgtatcacattcctggaaacatcaaattggtgcttggctcatactgcaaacatcgagtaccacctttcttttggctggtctcatagtagtaatgctctaaatctctaatcatttatgcatttcactttgacttgccttacctaatcagtatgaaacaattgttactggagatgcccacttgtcgagtagttaatgtatggatgaagctaaatatggctttgtcatcgttatccatgctaaattgcctggacccaggtgtgctctcctttctgcattaaagcaaagcatttacttcttcggtatcttttctgtttcaattttatctcgtggagtaacacaagcaatcaggaaggtatggatggcattcaattttactcaataattcccatgcttctgcttgaaaaactggaacttttctttctgccttttgctaacgatagcattcctgtttcaccgaaccttcggccttttgtgatttttcgacccttcacaacagcatacaagaaccaatttgacaacaacatacaagaaccaatttggcacaaaaaagttttctatccgtataggttctaaatgaacagtttggcaatcttgttgcaatctgatctcatattgtagtgatttcataccttccctcaagaacatatttggtgggtatgtcttcatgaccatatataatttgattccttttctaaaatgtctgttgtgttctggtttgcagggaatactttaccggtctactttgatacacattgctcttgacacattcagaatatctttttcgaaaggaaacagagctggtggggcttcttccaggagcattttctcaacagtttccaattgcactgaggttgttggcgatgcattattgggaaacatcgtatttatattcatgttactcctgggagtgcgattttttctcaaattatctttcgatattataagggatattctgttcgctgtcatcatttcaagctacttcaagttgtttcttttcacaatgatggtttgggagtttccgtcatctgttatattcattgttgagatgtttgttctctcatcaaacgttgtagccctgagagttgtctcgcagtttccaagagcccactgtttcgcggtctgcttactagcgcacgcagcaaaatacttgacccagcgatggatccttggaacgccatgagagcctgaactcgtacagatcaatcatcctggtgcttccagcgacgtctataggtatactgtggcctgatgatgagctctggtttctatcgagttctttgactgtgttgccttgtctcctccaccccctctccctgtgactgtgagtactatcttcaatgtacttgcggcgaagacggatatggcatctttactcataggcagtagctgttgagtgttgtgtggttggtacttggtcccttgacccaaccaccggcctactactacgtagcatctgcggcgtctcctgttcacgaaagaatgcagcaaaggaaagacctactaggctattaccatcgtgttcttctttggcggttctgtcaacattacctgtgaactctcgtttcctggctgcagctgcagatgtgctccagtggagcctaccgct

SEQ ID NO: 11347 - DNA, 2276 bp, Zea Mays
gccttttgttttgtttcctatttcctttccttctcgtgtagcttttcggccggcgaccgcgacctgaccgtccgccactgcgcacctgccggcgtctgggcgacgccccgccgccagcctgccaccaccacgacgcctgcaccggaatccgacactgtctcaaccactccgtcgtgcctatccgaagctcaacggcggagcccggtgggatagggcggaggcgctgaggcctgagggggagactggacctgggctgcacgaggtaggctgtgcggtggcggaaggaatcaccgatgagcgatgcgcaggcgacaggggatggtccgcgctgcgttggctgcggcgggcgcgtgaagacgctcttcgtgcagtactccccgggcaacatccgcttgatgaaatgcgataagtgcaaggctgttgctgatccctacatcgagtgcgagttcatgatcatcttgattgatctcgtcctgcacaagacaagggcgtaccgccatgttctgtttaataagctgagcatgggatcatccgttgacaaggtatgaaatatgaatctatgctttctaggccgactctggttgctgtatcacattcctggaaacatcaaattggtgcttggctcatactgcaaacatcgagtaccacctttcttttggctggtctcatagtagtaatgctctaaatctctaatcatttatgcatttcactttgacttgccttacctaatcagtatgaaacaattgttactggagatgcccacttgtcgagtagttaatgtatggatgaagctaaatatggctttgtcatcgttatccatgctaaattgcctggacccaggtgtgctctcctttctgcattaaagcaaagcatttacttcttcggtatcttttctgtttcaattttatctcgtggagtaacacaagcaatcaggaaggtatggatggcattcaattttactcaataattcccatgcttctgcttgaaaaactggaacttttctttctgccttttgctaacgatagcattcctgtttcaccgaaccttcggccttttgtgatttttcgacccttcacaacagcatacaagaaccaatttgacaacaacatacaagaaccaatttggcacaaaaaagttttctatccgtataggttctaaatgaacagtttggcaatcttgttgcaatctgatctcatattgtagtgatttcataccttccctcaagaacatatttggtgggtatgtcttcatgaccatatataatttgattccttttctaaaatgtctgttgtgttctggtttgcagggaatactttaccggtctactttgatacacattgctcttgacacatgtatccttagaattcataatttttttctttgatttggtttactataaactgtctgcccaacttaagcagtccatgactatgtaatgtaagtcagaatatctttttcgaaaggaaacagagctggtggggcttcttccaggagcattttctcaacagtttccaattgcactgaggttgttggcgatgcattattgggaaacatcgtatttatattcatgttactcctgggagtgcgattttttctcaaattatctttcgatattataaggtatagggatattctgttcgctgtcatcatttcaagctacttcaagttgtttcttttcacaatgatggtttgggagtttccgtcatctgttatattcattgttgagatgtttgttctctcatcaaacgttgtagccctgagagtttccaagagcccactgtttcgcggtctgcttactagcgcacgcagcaaaatacttgacccagcgatggatccttggaacgccatgagagcctgaactcgtacagatcaatcatcctggtgcttccagcgacgtctataggtatactgtggcctgatgatgagctctggtttctatcgagttctttgactgtgttgccttgtctcctccaccccctctccctgtgactgtgagtactatcttcaatgtacttgcggcgaagacggatatggcatctttactcataggcagtagctgttgagtgttgtgtggttggtacttggtcccttgacccaaccaccggcctactactacgtagcatctgcggcgtctcctgttcacgaaagaatgcagcaaaggaaagacctactaggctattaccatcgtgttcttctttggcggttctgtcaacattacctgtgaactctcgtttcctggctgcagctgcagatgtgctccagtggagcctaccgct

SEQ ID NO: 11348 - DNA, 2130 bp, Zea Mays
gccttttgttttgtttcctatttcctttccttctcgtgtagcttttcggccggcgaccgcgacctgaccgtccgccactgcgcacctgccggcgtctgggcgacgccccgccgccagcctgccaccaccacgacgcctgcaccggaatccgacactgtctcaaccactccgtcgtgcctatccgaagctcaacggcggagcccggtgggatagggcggaggcgctgaggcctgagggggagactggacctgggctgcacgaggtaggctgtgcggtggcggaaggaatcaccgatgagcgatgcgcaggcgacaggggatggtccgcgctgcgttggctgcggcgggcgcgtgaagacgctcttcgtgcagtactccccgggcaacatccgcttgatgaaatgcgataagtgcaaggctgttgctgatccctacatcgagtgcgagttcatgatcatcttgattgatctcgtcctgcacaagacaagggcgtaccgccatgttctgtttaataagctgagcatgggatcatccgttgacaaggtatgaaatatgaatctatgctttctaggccgactctggttgctgtatcacattcctggaaacatcaaattggtgcttggctcatactgcaaacatcgagtaccacctttcttttggctggtctcatagtagtaatgctctaaatctctaatcatttatgcatttcactttgacttgccttacctaatcagtatgaaacaattgttactggagatgcccacttgtcgagtagttaatgtatggatgaagctaaatatggctttgtcatcgttatccatgctaaattgcctggacccaggtgtgctctcctttctgcattaaagcaaagcatttacttcttcggtatcttttctgtttcaattttatctcgtggagtaacacaagcaatcaggaaggtatggatggcattcaattttactcaataattcccatgcttctgcttgaaaaactggaacttttctttctgccttttgctaacgatagcattcctgtttcaccgaaccttcggccttttgtgatttttcgacccttcacaacagcatacaagaaccaatttgacaacaacatacaagaaccaatttggcacaaaaaagttttctatccgtataggttctaaatgaacagtttggcaatcttgttgcaatctgatctcatattgtagtgatttcataccttccctcaagaacatatttggtgggtatgtcttcatgaccatatataatttgattccttttctaaaatgtctgttgtgttctggtttgcagggaatactttaccggtctactttgatacacattgctcttgacacattcagaatatctttttcgaaaggaaacagagctggtggggcttcttccaggagcattttctcaacagtttccaattgcactgaggttgttggcgatgcattattgggaaacatcgtatttatattcatgttactcctgggagtgcgattttttctcaaattatctttcgatattataaggtttgggagtttccgtcatctgttatattcattgttgagatgtttgttctctcatcaaacgttgtagccctgagagttgtctcgcagtttccaagagcccactgtttcgcggtctgcttactagcgcacgcagcaaaatacttgacccagcgatggatccttggaacgccatgagagcctgaactcgtacagatcaatcatcctggtgcttccagcgacgtctataggtatactgtggcctgatgatgagctctggtttctatcgagttctttgactgtgttgccttgtctcctccaccccctctccctgtgactgtgagtactatcttcaatgtacttgcggcgaagacggatatggcatctttactcataggcagtagctgttgagtgttgtgtggttggtacttggtcccttgacccaaccaccggcctactactacgtagcatctgcggcgtctcctgttcacgaaagaatgcagcaaaggaaagacctactaggctattaccatcgtgttcttctttggcggttctgtcaacattacctgtgaactctcgtttcctggctgcagctgcagatgtgctccagtggagcctaccgct

SEQ ID NO: 11349 - DNA, 2054 bp, Zea Mays
gccttttgttttgtttcctatttcctttccttctcgtgtagcttttcggccggcgaccgcgacctgaccgtccgccactgcgcacctgccggcgtctgggcgacgccccgccgccagcctgccaccaccacgacgcctgcaccggaatccgacactgtctcaaccactccgtcgtgcctatccgaagctcaacggcggagcccggtgggatagggcggaggcgctgaggcctgagggggagactggacctgggctgcacgaggtaggctgtgcggtggcggaaggaatcaccgatgagcgatgcgcaggcgacaggggatggtccgcgctgcgttggctgcggcgggcgcgtgaagacgctcttcgtgcagtactccccgggcaacatccgcttgatgaaatgcgataagtgcaaggctgttgctgatccctacatcgagtgcgagttcatgatcatcttgattgatctcgtcctgcacaagacaagggcgtaccgccatgttctgtttaataagctgagcatgggatcatccgttgacaaggtatgaaatatgaatctatgctttctaggccgactctggttgctgtatcacattcctggaaacatcaaattggtgcttggctcatactgcaaacatcgagtaccacctttcttttggctggtctcatagtagtaatgctctaaatctctaatcatttatgcatttcactttgacttgccttacctaatcagtatgaaacaattgttactggagatgcccacttgtcgagtagttaatgtatggatgaagctaaatatggctttgtcatcgttatccatgctaaattgcctggacccaggtgtgctctcctttctgcattaaagcaaagcatttacttcttcggtatcttttctgtttcaattttatctcgtggagtaacacaagcaatcaggaaggtatggatggcattcaattttactcaataattcccatgcttctgcttgaaaaactggaacttttctttctgccttttgctaacgatagcattcctgtttcaccgaaccttcggccttttgtgatttttcgacccttcacaacagcatacaagaaccaatttgacaacaacatacaagaaccaatttggcacaaaaaagttttctatccgtataggttctaaatgaacagtttggcaatcttgttgcaatctgatctcatattgtagtgatttcataccttccctcaagaacatatttggtgggtatgtcttcatgaccatatataatttgattccttttctaaaatgtctgttgtgttctggtttgcagggaatactttaccggtctactttgatacacattgctcttgacacattcagaatatctttttcgaaaggaaacagagctggtggggcttcttccaggagcattttctcaacagtttccaattgcactgaggttgttggcgatgcattattgggaaacatcgtatttatattcatgttactcctgggagtgcgattttttctcaaattatctttcgatattataagttgtctcgcagtttccaagagcccactgtttcgcggtctgcttactagcgcacgcagcaaaatacttgacccagcgatggatccttggaacgccatgagagcctgaactcgtacagatcaatcatcctggtgcttccagcgacgtctataggtatactgtggcctgatgatgagctctggtttctatcgagttctttgactgtgttgccttgtctcctccaccccctctccctgtgactgtgagtactatcttcaatgtacttgcggcgaagacggatatggcatctttactcataggcagtagctgttgagtgttgtgtggttggtacttggtcccttgacccaaccaccggcctactactacgtagcatctgcggcgtctcctgttcacgaaagaatgcagcaaaggaaagacctactaggctattaccatcgtgttcttctttggcggttctgtcaacattacctgtgaactctcgtttcctggctgcagctgcagatgtgctccagtggagcctaccgct

SEQ ID NO: 11350 - DNA, 2193 bp, Zea Mays
gccttttgttttgtttcctatttcctttccttctcgtgtagcttttcggccggcgaccgcgacctgaccgtccgccactgcgcacctgccggcgtctgggcgacgccccgccgccagcctgccaccaccacgacgcctgcaccggaatccgacactgtctcaaccactccgtcgtgcctatccgaagctcaacggcggagcccggtgggatagggcggaggcgctgaggcctgagggggagactggacctgggctgcacgaggtaggctgtgcggtggcggaaggaatcaccgatgagcgatgcgcaggcgacaggggatggtccgcgctgcgttggctgcggcgggcgcgtgaagacgctcttcgtgcagtactccccgggcaacatccgcttgatgaaatgcgataagtgcaaggctgttgctgatccctacatcgagtgcgagttcatgatcatcttgattgatctcgtcctgcacaagacaagggcgtaccgccatgttctgtttaataagctgagcatgggatcatccgttgacaaggtatgaaatatgaatctatgctttctaggccgactctggttgctgtatcacattcctggaaacatcaaattggtgcttggctcatactgcaaacatcgagtaccacctttcttttggctggtctcatagtagtaatgctctaaatctctaatcatttatgcatttcactttgacttgccttacctaatcagtatgaaacaattgttactggagatgcccacttgtcgagtagttaatgtatggatgaagctaaatatggctttgtcatcgttatccatgctaaattgcctggacccaggtgtgctctcctttctgcattaaagcaaagcatttacttcttcggtatcttttctgtttcaattttatctcgtggagtaacacaagcaatcaggaaggtatggatggcattcaattttactcaataattcccatgcttctgcttgaaaaactggaacttttctttctgccttttgctaacgatagcattcctgtttcaccgaaccttcggccttttgtgatttttcgacccttcacaacagcatacaagaaccaatttgacaacaacatacaagaaccaatttggcacaaaaaagttttctatccgtataggttctaaatgaacagtttggcaatcttgttgcaatctgatctcatattgtagtgatttcataccttccctcaagaacatatttggtgggtatgtcttcatgaccatatataatttgattccttttctaaaatgtctgttgtgttctggtttgcagggaatactttaccggtctactttgatacacattgctcttgacacataatatctttttcgaaaggaaacagagctggtggggcttcttccaggagcattttctcaacagtttccaattgcactgaggttgttggcgatgcattattgggaaacatcgtatttatattcatgttactcctgggagtgcgattttttctcaaattatctttcgatattataaggtatagggatattctgttcgctgtcatcatttcaagctacttcaagttgtttcttttcacaatgatggtttgggagtttccgtcatctgttatattcattgttgagatgtttgttctctcatcaaacgttgtagccctgagagttgtctcgcagtttccaagagcccactgtttcgcggtctgcttactagcgcacgcagcaaaatacttgacccagcgatggatccttggaacgccatgagagcctgaactcgtacagatcaatcatcctggtgcttccagcgacgtctataggtatactgtggcctgatgatgagctctggtttctatcgagttctttgactgtgttgccttgtctcctccaccccctctccctgtgactgtgagtactatcttcaatgtacttgcggcgaagacggatatggcatctttactcataggcagtagctgttgagtgttgtgtggttggtacttggtcccttgacccaaccaccggcctactactacgtagcatctgcggcgtctcctgttcacgaaagaatgcagcaaaggaaagacctactaggctattaccatcgtgttcttctttggcggttctgtcaacattacctgtgaactctcgtttcctggctgcagctgcagatgtgctccagtggagcctaccgct

SEQ ID NO: 11351 - DNA, 2186 bp, Zea Mays
gccttttgttttgtttcctatttcctttccttctcgtgtagcttttcggccggcgaccgcgacctgaccgtccgccactgcgcacctgccggcgtctgggcgacgccccgccgccagcctgccaccaccacgacgcctgcaccggaatccgacactgtctcaaccactccgtcgtgcctatccgaagctcaacggcggagcccggtgggatagggcggaggcgctgaggcctgagggggagactggacctgggctgcacgaggtaggctgtgcggtggcggaaggaatcaccgatgagcgatgcgcaggcgacaggggatggtccgcgctgcgttggctgcggcgggcgcgtgaagacgctcttcgtgcagtactccccgggcaacatccgcttgatgaaatgcgataagtgcaaggctgttgctgatccctacatcgagtgcgagttcatgatcatcttgattgatctcgtcctgcacaagacaagggcgtaccgccatgttctgtttaataagctgagcatgggatcatccgttgacaaggtatgaaatatgaatctatgctttctaggccgactctggttgctgtatcacattcctggaaacatcaaattggtgcttggctcatactgcaaacatcgagtaccacctttcttttggctggtctcatagtagtaatgctctaaatctctaatcatttatgcatttcactttgacttgccttacctaatcagtatgaaacaattgttactggagatgcccacttgtcgagtagttaatgtatggatgaagctaaatatggctttgtcatcgttatccatgctaaattgcctggacccaggtgtgctctcctttctgcattaaagcaaagcatttacttcttcggtatcttttctgtttcaattttatctcgtggagtaacacaagcaatcaggaaggtatggatggcattcaattttactcaataattcccatgcttctgcttgaaaaactggaacttttctttctgccttttgctaacgatagcattcctgtttcaccgaaccttcggccttttgtgatttttcgacccttcacaacagcatacaagaaccaatttgacaacaacatacaagaaccaatttggcacaaaaaagttttctatccgtataggttctaaatgaacagtttggcaatcttgttgcaatctgatctcatattgtagtgatttcataccttccctcaagaacatatttggtgggtatgtcttcatgaccatatataatttgattccttttctaaaatgtctgttgtgttctggtttgcagggaatactttaccggtctactttgatacacattgctcttgacacatgtatccttagaattcataatttttttctttgatttggtttactataaactgtctgcccaacttaagcagtccatgactatgtaatgtaagtcagaatatctttttcgaaaggaaacagagctggtggggcttcttccaggagcattttctcaacagtttccaattgcactgagggatattctgttcgctgtcatcatttcaagctacttcaagttgtttcttttcacaatgatggtttgggagtttccgtcatctgttatattcattgttgagatgtttgttctctcatcaaacgttgtagccctgagagttgtctcgcagtttccaagagcccactgtttcgcggtctgcttactagcgcacgcagcaaaatacttgacccagcgatggatccttggaacgccatgagagcctgaactcgtacagatcaatcatcctggtgcttccagcgacgtctataggtatactgtggcctgatgatgagctctggtttctatcgagttctttgactgtgttgccttgtctcctccaccccctctccctgtgactgtgagtactatcttcaatgtacttgcggcgaagacggatatggcatctttactcataggcagtagctgttgagtgttgtgtggttggtacttggtcccttgacccaaccaccggcctactactacgtagcatctgcggcgtctcctgttcacgaaagaatgcagcaaaggaaagacctactaggctattaccatcgtgttcttctttggcggttctgtcaacattacctgtgaactctcgtttcctggctgcagctgcagatgtgctccagtggagcctaccgct

SEQ ID NO: 11352 - DNA, 2197 bp, Zea Mays
gccttttgttttgtttcctatttcctttccttctcgtgtagcttttcggccggcgaccgcgacctgaccgtccgccactgcgcacctgccggcgtctgggcgacgccccgccgccagcctgccaccaccacgacgcctgcaccggaatccgacactgtctcaaccactccgtcgtgcctatccgaagctcaacggcggagcccggtgggatagggcggaggcgctgaggcctgagggggagactggacctgggctgcacgaggtaggctgtgcggtggcggaaggaatcaccgatgagcgatgcgcaggcgacaggggatggtccgcgctgcgttggctgcggcgggcgcgtgaagacgctcttcgtgcagtactccccgggcaacatccgcttgatgaaatgcgataagtgcaaggctgttgctgatccctacatcgagtgcgagttcatgatcatcttgattgatctcgtcctgcacaagacaagggcgtaccgccatgttctgtttaataagctgagcatgggatcatccgttgacaaggtatgaaatatgaatctatgctttctaggccgactctggttgctgtatcacattcctggaaacatcaaattggtgcttggctcatactgcaaacatcgagtaccacctttcttttggctggtctcatagtagtaatgctctaaatctctaatcatttatgcatttcactttgacttgccttacctaatcagtatgaaacaattgttactggagatgcccacttgtcgagtagttaatgtatggatgaagctaaatatggctttgtcatcgttatccatgctaaattgcctggacccaggtgtgctctcctttctgcattaaagcaaagcatttacttcttcggtatcttttctgtttcaattttatctcgtggagtaacacaagcaatcaggaaggtatggatggcattcaattttactcaataattcccatgcttctgcttgaaaaactggaacttttctttctgccttttgctaacgatagcattcctgtttcaccgaaccttcggccttttgtgatttttcgacccttcacaacagcatacaagaaccaatttgacaacaacatacaagaaccaatttggcacaaaaaagttttctatccgtataggttctaaatgaacagtttggcaatcttgttgcaatctgatctcatattgtagtgatttcataccttccctcaagaacatatttggtgggtatgtcttcatgaccatatataatttgattccttttctaaaatgtctgttgtgttctggtttgcagggaatactttaccggtctactttgatacacattgctcttgacacattcagaatatctttttcgaaaggaaacagagctggtggggcttcttccaggagcattttctcaacagtttccaattgcactgaggttgttggcgatgcattattgggaaacatcgtatttatattcatgttactcctgggagtgcgattttttctcaaattatctttcgatattataaggtatagggatattctgttcgctgtcatcatttcaagctacttcaagttgtttcttttcacaatgatggtttgggagtttccgtcatctgttatattcattgttgagatgtttgttctctcatcaaacgttgtagccctgagagttgtctcgcagtttccaagagcccactgtttcgcggtctgcttactagcgcacgcagcaaaatacttgacccagcgatggatccttggaacgccatgagagcctgaactcgtacagatcaatcatcctggtgcttccagcgacgtctataggtatactgtggcctgatgatgagctctggtttctatcgagttctttgactgtgttgccttgtctcctccaccccctctccctgtgactgtgagtactatcttcaatgtacttgcggcgaagacggatatggcatctttactcataggcagtagctgttgagtgttgtgtggttggtacttggtcccttgacccaaccaccggcctactactacgtagcatctgcggcgtctcctgttcacgaaagaatgcagcaaaggaaagacctactaggctattaccatcgtgttcttctttggcggttctgtcaacattacctgtgaactctcgtttcctggctgcagctgcagatgtgctccagtggagcctaccgct

SEQ ID NO: 11353 - DNA, 2203 bp, Zea Mays
ttttagcctttttttaaaaaattttgtaggctaggcccacaatactgcagaactaaacactgctcagctgctctcggctctcgcgcctgcctgccctagccgctcgcccggtcccactcccgcataggcgccgccgccgctacccgctacccccgcagccggcactcggcaggttcttcccctggcatccggcactcggcttcttcttgccccggctcccggcgcggcggcgcccgctcctcctccccccgctcgcccgctgcaggtcctcccccgcggcacgcgcccgctgctgcagcctgcagctcccaccccaactggcgattgcagctcctccggtcctccccctgccggcgccgcctgcgagctgcacagctgcagctccccccctggctggcagagctgcagcttcaactctcttgaaggcaaaagcttgcatgctctgcgggcgccgacgccgctcgttgggagcactaggattggcttcagttcggggctccgcttttgctccaacagagtcctcagagggttaactcccattggcgcgatgaagtcgtataggctatcggagctcagcgacaccgaagttagcggcctcaaagctcgtccccgcatcgatttctcatctatttttggcacggtgaatccaatcgttgaagatgtccgtgtgagaggtgatgcagcagttaagcactacacagaaaagtttgacaaggtcatgcttgatgatgttgtcgtctgtgttagcgatcttccagatgcagagcttgatccagctgtgaaggaagcctttgatgttgcatatgacaatatatatgccttccatgtttcacaaaaaatacctgagaagacagttgaaaatatgaaaggcgtaagatgtaagagaataactagatgcattggttctgttgggctgtatgtcccaggtggcactgcagtcttgccttcaactgcattgatgcttgctgtgcctgcacagattgctggatgcaaaactattgttcttgccacaccacctagccgtgatggtagcatatgcaaggaggttctttactgtgcaaagaaagctggtgtgacacacatattgaaagctggaggagctcaggcaatctcagcaatggcatggggaactgcatcttgcccaaaggctgagaagatttttggacctggtaaccagtatgtaacagctgccaaaatgattcttcagtgaagctatggtatctatagacatgcctgctggcccttctgaagttttagtcattgctgataaatacgcgaacccagttcatgttgctgctgatctgctatcccaggcagaacatggcccagatagtcaggttgttctagttgttgctggagatggtgttgatctgggtgccattgaggcagaagttagcaagcagtgcaacgcgcttccaagaggtgaattcgcttcaaaagcacttagccacagcttcactgtgttcgcgaaagatatggttgaggcgatatcattctcaaatctgtatgcccctgagcatttgatcatcaacgtaaaggatgctgagcagtgggaggagttcatcgaaaacgcagggtcagttttcttgggccaatggaccccagagagcgtgggcgattatgcgagcgggacgaaccatgtccttccgacctatggttacgcaaggatgtacagcggtgtatcgctgaactctttcctcaaatacatcactgtccaatccctaacagaggaagggctgagaaagctggggccgtacgtcgcgaagatggccgaagtggaggggctagaggcgcacaagagagccgttacccttaggctgcaagaggttgaggccaatgtaactgtctagccgctgtccatggtctattgcaacgttcagactcgatgtgggatgctggagttcttccctaggaacctaggggaactggactattgatgtcttccaaacaggctctggaatgttagaaagaggcgtttcaactggtgcagctaataatgttcattggaccctgatttgtttcacgaataaacttgagcagaacttactgtgtatatatgcagtgttctcgtattagttatttccctagttgcttctgtaccgattttttggattgcgcatatgcatctaatgtgcttcgtgacatgtatgtgtgaggttttgatggaaaataaaaaaaatggcatcgagcaatgagattttca

SEQ ID NO: 11354 - DNA, 2231 bp, Zea Mays
ttttagcctttttttaaaaaattttgtaggctaggcccacaatactgcagaactaaacactgctcagctgctctcggctctcgcgcctgcctgccctagccgctcgcccggtcccactcccgcataggcgccgccgccgctacccgctacccccgcagccggcactcggcaggttcttcccctggcatccggcactcggcttcttcttgccccggctcccggcgcggcggcgcccgctcctcctccccccgctcgcccgctgcaggtcctcccccgcggcacgcgcccgctgctgcagcctgcagctcccaccccaactggcgattgcagctcctccggtcctccccctgccggcgccgcctgcgagctgcacagctgcagctccccccctggctggcagagctgcagcttcaactctcttgaaggcaaaagaattgaatcgcactctgttgatgggcagcttgcatgctctgcgggcgccgacgccgctcgttgggagcactaggattggcttcagttcggggctccgcttttgctccaacagagtcctcagagggttaactcccattggcgcgatgaagtcgtataggctatcggagctcagcgacaccgaagttagcggcctcaaagctcgtccccgcatcgatttctcatctatttttggcacggtgaatccaatcgttgaagatgtccgtgtgagaggtgatgcagcagttaagcactacacagaaaagtttgacaaggtcatgcttgatgatgttgtcgtctgtgttagcgatcttccagatgcagagcttgatccagctgtgaaggaagcctttgatgttgcatatgacaatatatatgccttccatgtttcacaaaaaatacctgagaagacagttgaaaatatgaaaggcgtaagatgtaagagaataactagatgcattggttctgttgggctgtatgtcccaggtggcactgcagtcttgccttcaactgcattgatgcttgctgtgcctgcacagattgctggatgcaaaactattgttcttgccacaccacctagccgtgatggtagcatatgcaaggaggttctttactgtgcaaagaaagctggtgtgacacacatattgaaagctggaggagctcaggcaatctcagcaatggcatggggaactgcatcttgcccaaaggctgagaagatttttggacctggtaaccagtatgtaacagctgccaaaatgattcttcagtgaagctatggtatctatagacatgcctgctggcccttctgaagttttagtcattgctgataaatacgcgaacccagttcatgttgctgctgatctgctatcccaggcagaacatggcccagatagtcaggttgttctagttgttgctggagatggtgttgatctgggtgccattgaggcagaagttagcaagcagtgcaacgcgcttccaagaggtgaattcgcttcaaaagcacttagccacagcttcactgtgttcgcgaaagatatggttgaggcgatatcattctcaaatctgtatgcccctgagcatttgatcatcaacgtaaaggatgctgagcagtgggaggagttcatcgaaaacgcagggtcagttttcttgggccaatggaccccagagagcgtgggcgattatgcgagcgggacgaaccatgtccttccgacctatggttacgcaaggatgtacagcggtgtatcgctgaactctttcctcaaatacatcactgtccaatccctaacagaggaagggctgagaaagctggggccgtacgtcgcgaagatggccgaagtggaggggctagaggcgcacaagagagccgttacccttaggctgcaagaggttgaggccaatgtaactgtctagccgctgtccatggtctattgcaacgttcagactcgatgtgggatgctggagttcttccctaggaacctaggggaactggactattgatgtcttccaaacaggctctggaatgttagaaagaggcgtttcaactggtgcagctaataatgttcattggaccctgatttgtttcacgaataaacttgagcagaacttactgtgtatatatgcagtgttctcgtattagttatttccctagttgcttctgtaccgattttttggattgcgcatatgcatctaatgtgcttcgtgacatgtatgtgtgaggttttgatggaaaataaaaaaaatggcatcgagcaatgagattttca

SEQ ID NO: 11355 - DNA, 2524 bp, Zea Mays
ttttagcctttttttaaaaaattttgtaggctaggcccacaatactgcagaactaaacactgctcagctgctctcggctctcgcgcctgcctgccctagccgctcgcccggtcccactcccgcataggcgccgccgccgctacccgctacccccgcagccggcactcggcaggttcttcccctggcatccggcactcggcttcttcttgccccggctcccggcgcggcggcgcccgctcctcctccccccgctcgcccgctgcaggtcctcccccgcggcacgcgcccgctgctgcagcctgcagctcccaccccaactggcgattgcagctcctccggtcctccccctgccggcgccgcctgcgagctgcacagctgcagctccccccctggctggcagagctgcagcttcaactctcttgaaggcaaaagcttgcatgctctgcgggcgccgacgccgctcgttgggagcactaggattggcttcagttcggggctccgcttttgctccaacagagtcctcagagggttaactcccattggcgcgatgaagtcgtataggctatcggagctcagcgacaccgaagttagcggcctcaaagctcgtccccgcatcgatttctcatctatttttggcacggtgaatccaatcgttgaagatgtccgtgtgagaggtgatgcagcagttaagcactacacagaaaagtttgacaaggtcatgcttgatgatgttgtcgtctgtgttagcgatcttccagatgcagagcttgatccagctgtgaaggaagcctttgatgttgcatatgacaatatatatgccttccatgtttcacaaaaaatacctgagaagacagttgaaaatatgaaaggcgtaagatgtaagagaataactagatgcattggttctgttgggctgtatgtcccaggtggcactgcagtcttgccttcaactgcattgatgcttgctgtgcctgcacagattgctggatgcaaaactattgttcttgccacaccacctagccgtgatggtagcatatgcaaggaggttctttactgtgcaaagaaagctggtgtgacacacatattgaaagctggaggagctcaggcaatctcagcaatggcatggggaactgcatcttgcccaaaggtatttgaagtataaaaacatatcgatatcatgtctaaaatcagtagtgatcttttgtgtctatatactggcctctatctaacgtgttgcttcattgcttggttgttaaattattctcatagaacttaataaactgcagttttgtgtacaggcatgccctgttcttatcactttaaactctgcctaaaacaactgttaaaatatggagatgttgactcaccaagttctacagcatttttttatgatttcctgtattggctgtgcactctcattcaaccacataacttttgctaacttcattacaatgtccatacaggctgagaagatttttggacctggtaaccagtatgtaacagctgccaaaatgattcttcagaacagtgaagctatggtatctatagacatgcctgctggcccttctgaagttttagtcattgctgataaatacgcgaacccagttcatgttgctgctgatctgctatcccaggcagaacatggcccagatagtcaggttgttctagttgttgctggagatggtgttgatctgggtgccattgaggcagaagttagcaagcagtgcaacgcgcttccaagaggtgaattcgcttcaaaagcacttagccacagcttcactgtgttcgcgaaagatatggttgaggcgatatcattctcaaatctgtatgcccctgagcatttgatcatcaacgtaaaggatgctgagcagtgggaggagttcatcgaaaacgcagggtcagttttcttgggccaatggaccccagagagcgtgggcgattatgcgagcgggacgaaccatgtccttccgacctatggttacgcaaggatgtacagcggtgtatcgctgaactctttcctcaaatacatcactgtccaatccctaacagaggaagggctgagaaagctggggccgtacgtcgcgaagatggccgaagtggaggggctagaggcgcacaagagagccgttacccttaggctgcaagaggttgaggccaatgtaactgtctagccgctgtccatggtctattgcaacgttcagactcgatgtgggatgctggagttcttccctaggaacctaggggaactggactattgatgtcttccaaacaggctctggaatgttagaaagaggcgtttcaactggtgcagctaataatgttcattggaccctgatttgtttcacgaataaacttgagcagaacttactgtgtatatatgcagtgttctcgtattagttatttccctagttgcttctgtaccgattttttggattgcgcatatgcatctaatgtgcttcgtgacatgtatgtgtgaggttttgatggaaaataaaaaaaatggcatcgagcaatgagattttca

SEQ ID NO: 11356 - DNA, 2205 bp, Zea Mays
ttttagcctttttttaaaaaattttgtaggctaggcccacaatactgcagaactaaacactgctcagctgctctcggctctcgcgcctgcctgccctagccgctcgcccggtcccactcccgcataggcgccgccgccgctacccgctacccccgcagccggcactcggcaggttcttcccctggcatccggcactcggcttcttcttgccccggctcccggcgcggcggcgcccgctcctcctccccccgctcgcccgctgcaggtcctcccccgcggcacgcgcccgctgctgcagcctgcagctcccaccccaactggcgattgcagctcctccggtcctccccctgccggcgccgcctgcgagctgcacagctgcagctccccccctggctggcagagctgcagcttcaactctcttgaaggcaaaagaattgaatcgcactctgttgatgggcagcttgcatgctctgcgggcgccgacgccgctcgttgggagcactaggattggcttcagttcggggctccgcttttgctccaacagagtcctcagagtcgtataggctatcggagctcagcgacaccgaagttagcggcctcaaagctcgtccccgcatcgatttctcatctatttttggcacggtgaatccaatcgttgaagatgtccgtgtgagaggtgatgcagcagttaagcactacacagaaaagtttgacaaggtcatgcttgatgatgttgtcgtctgtgttagcgatcttccagatgcagagcttgatccagctgtgaaggaagcctttgatgttgcatatgacaatatatatgccttccatgtttcacaaaaaatacctgagaagacagttgaaaatatgaaaggcgtaagatgtaagagaataactagatgcattggttctgttgggctgtatgtcccaggtggcactgcagtcttgccttcaactgcattgatgcttgctgtgcctgcacagattgctggatgcaaaactattgttcttgccacaccacctagccgtgatggtagcatatgcaaggaggttctttactgtgcaaagaaagctggtgtgacacacatattgaaagctggaggagctcaggcaatctcagcaatggcatggggaactgcatcttgcccaaaggctgagaagatttttggacctggtaaccagtatgtaacagctgccaaaatgattcttcagtgaagctatggtatctatagacatgcctgctggcccttctgaagttttagtcattgctgataaatacgcgaacccagttcatgttgctgctgatctgctatcccaggcagaacatggcccagatagtcaggttgttctagttgttgctggagatggtgttgatctgggtgccattgaggcagaagttagcaagcagtgcaacgcgcttccaagaggtgaattcgcttcaaaagcacttagccacagcttcactgtgttcgcgaaagatatggttgaggcgatatcattctcaaatctgtatgcccctgagcatttgatcatcaacgtaaaggatgctgagcagtgggaggagttcatcgaaaacgcagggtcagttttcttgggccaatggaccccagagagcgtgggcgattatgcgagcgggacgaaccatgtccttccgacctatggttacgcaaggatgtacagcggtgtatcgctgaactctttcctcaaatacatcactgtccaatccctaacagaggaagggctgagaaagctggggccgtacgtcgcgaagatggccgaagtggaggggctagaggcgcacaagagagccgttacccttaggctgcaagaggttgaggccaatgtaactgtctagccgctgtccatggtctattgcaacgttcagactcgatgtgggatgctggagttcttccctaggaacctaggggaactggactattgatgtcttccaaacaggctctggaatgttagaaagaggcgtttcaactggtgcagctaataatgttcattggaccctgatttgtttcacgaataaacttgagcagaacttactgtgtatatatgcagtgttctcgtattagttatttccctagttgcttctgtaccgattttttggattgcgcatatgcatctaatgtgcttcgtgacatgtatgtgtgaggttttgatggaaaataaaaaaaatggcatcgagcaatgagattttca

SEQ ID NO: 11357 - DNA, 2247 bp, Zea Mays
ttttagcctttttttaaaaaattttgtaggctaggcccacaatactgcagaactaaacactgctcagctgctctcggctctcgcgcctgcctgccctagccgctcgcccggtcccactcccgcataggcgccgccgccgctacccgctacccccgcagccggcactcggcaggttcttcccctggcatccggcactcggcttcttcttgccccggctcccggcgcggcggcgcccgctcctcctccccccgctcgcccgctgcaggtcctcccccgcggcacgcgcccgctgctgcagcctgcagctcccaccccaactggcgattgcagctcctccggtcctccccctgccggcgccgcctgcgagctgcacagctgcagctccccccctggctggcagagctgcagcttcaactctcttgaaggcaaaagaattgaatcgcactctgttgatgggcagcttgcatgctctgcgggcgccgacgccgctcgttgggagcactaggattggcttcagttcggggctccgcttttgctccaacagagtcctcagagggttaactcccattggcgcgatgaagtcgtataggctatcggagctcagcgacaccgaagttagcggcctcaaagctcgtccccgcatcgatttctcatctatttttggcacggtgaatccaatcgttgaagatgtccgtgtgagaggtgatgcagcagttaagcactacacagaaaagtttgacaaggtcatgcttgatgatgttgtcgtctgtgttagcgatcttccagatgcagagcttgatccagctgtgaaggaagcctttgatgttgcatatgacaatatatatgccttccatgtttcacaaaaaatacctgagaagacagttgaaaatatgaaaggcgtaagatgtaagagaataactagatgcattggttctgttgggctgtatgtcccaggtggcactgcagtcttgccttcaactgcattgatgcttgctgtgtttctctttctgccagcctgcacagattgctggatgcaaaactattgttcttgccacaccacctagccgtgatggtagcatatgcaaggaggttctttactgtgcaaagaaagctggtgtgacacacatattgaaagctggaggagctcaggcaatctcagcaatggcatggggaactgcatcttgcccaaaggctgagaagatttttggacctggtaaccagtatgtaacagctgccaaaatgattcttcagtgaagctatggtatctatagacatgcctgctggcccttctgaagttttagtcattgctgataaatacgcgaacccagttcatgttgctgctgatctgctatcccaggcagaacatggcccagatagtcaggttgttctagttgttgctggagatggtgttgatctgggtgccattgaggcagaagttagcaagcagtgcaacgcgcttccaagaggtgaattcgcttcaaaagcacttagccacagcttcactgtgttcgcgaaagatatggttgaggcgatatcattctcaaatctgtatgcccctgagcatttgatcatcaacgtaaaggatgctgagcagtgggaggagttcatcgaaaacgcagggtcagttttcttgggccaatggaccccagagagcgtgggcgattatgcgagcgggacgaaccatgtccttccgacctatggttacgcaaggatgtacagcggtgtatcgctgaactctttcctcaaatacatcactgtccaatccctaacagaggaagggctgagaaagctggggccgtacgtcgcgaagatggccgaagtggaggggctagaggcgcacaagagagccgttacccttaggctgcaagaggttgaggccaatgtaactgtctagccgctgtccatggtctattgcaacgttcagactcgatgtgggatgctggagttcttccctaggaacctaggggaactggactattgatgtcttccaaacaggctctggaatgttagaaagaggcgtttcaactggtgcagctaataatgttcattggaccctgatttgtttcacgaataaacttgagcagaacttactgtgtatatatgcagtgttctcgtattagttatttccctagttgcttctgtaccgattttttggattgcgcatatgcatctaatgtgcttcgtgacatgtatgtgtgaggttttgatggaaaataaaaaaaatggcatcgagcaatgagattttca

SEQ ID NO: 11358 - DNA, 2858 bp, Zea Mays
ctccgcctcttatcctctacggccctgtctctcgcacgggccggttcgctggcagttaccttacctgccgctgactcgctccagtggccaggacctgctgcagtggacgtggtgccggcggcgggccacggcggaagcagccatggaggcagtgcagacggtcatccggtccatccgtcgtcactcggcttcaacctgacgccggcaacggcgcgggcttctatgacggggcctactctttcctcgacaccaccaaggcctgcgctacccggttcagcagcgggtcagtgacatccgacgactcgccggcggtgacgcccaggctgctgtccttgatgtccagctccagccccgacaactgctcctcctcctcagaatggcccgaccgagcggcggcgtcgcgctccaatcggtacctcttcgacgcgaacgcacaggcccggtgcgcggggtacctggacctgatgaggctggaggtggatgcgcagctgggcaggctcaggggcggtgtcactggcctggagagctacgctttgccgggcaacggccgtgcgatcggaggtgcgcacctgggcatgtcgcttgatgtcatgctgattgagattgatgagaggttcaacaccctgaagctgctcatgggctccgtgttccggcaggccaaggagatgcttggttcggtcaactcgtcggtgtctgatctgcagtcggagaatgagctgcagctggaagtgttcggtgccatcatcggagagtgcgtcagtggcctgcaggaggagctagagaggaagctgtacgagcagattagcatcacaaacaccatgggcaggaactggaaggaagccataactcagtttgccgccatgcgcgaagaccttggcgctctttgtaagctactactgcctttagcaccagaagctcatatttctaatggcaagaatgaaagtccaggcagcaagagtaacagatggaagtacaatttctttggaaagaaatccagagaggatcgttctccgcgcgctgaggacagcaagagtttcaggaagcaaaaatcatttggtgcaaaggatgtcatctcagaaaagtctgactttcaccatctcaatggtatgactagagagcaagtgataacctattttaagtctgagatcagcaaaatgaaaaggatgcacgaatcagctttgcaagagaagaccgaagaactgttcaggctcaaacgggagaaggggtcacattctctcaagaatgacatagaatttgaacctttgagaaagaaaattccagagcttgtattgagaatggaccaaatcatttccaagaatataaaggtacctgcaatctgcatgacccatgatgaactcgatgaaagatgcagattgatgagcagaatcgatgctttgttctatgaaaatcagcattttcgagggttgcttgcagacaggatgaaggacgttaaggcattatcatcccagctatctgaagccagtacagaactgtcaatgcagatgctgtcggaagaagagctcctgagacaaattgataaagttagagaagactgtgaggacctccgaattgaatgtgatgttagagaaggaatgtaccaaactgttacaaaacatttgcttgatgactataaggacagtatggatggtgctgctctaaatcttagtgcaaaattgtcttcacttgaatctgcagtctctgaaaaggataaggcattatgcatatataacgaagaaaatcacaggttaaaggagaagttagctgagttagaaaaggaacgcttgatccacggtgaccaggaagttccagaagccataaaacaagatagcacagaaattgttctgcgtgacattgaggttgagccttgcacgtcaccgagaagatcaaatgtgaacaattcaaggtatgacgaacttgtgaaacttgactcaagcttagagcaaacgtcatgtgtcctcaaggaaatgaacaacaaaaatatggatcgcagtagtagcctcagtaggaatgagcaagagaagcagctggagtgcattttagtatctatcatgaaactatcaaaagattttgtagagatcgagaaaaagatgtcagcggaaagaaccgagaacaggtcagaggaactgagcgatcactgcaaccacatggtcagacaagccatggtactaacaaagatagggctttggtataaacaaatgattgaagcgaggcgttctgagctccaaaaggctgaagccaaggttatggtattaggcgacaagatcaccgcacagttgagccttctccgaaagatatatttagctctcgatcattactctcctaccttgcatcagcatcctggtctgctagacgctttcatgaagacgtgcaagcttgttgcagatctgagaagtaaacagaacgaaggcgatgcaacatgaacgaggaggcggtatggtgggatctcccttggtatagctaatgtttctcatgtgcttatccgtgttccacgcctgccgctgcagaccaagtgaaggatcctattgaactgaggttttagaattttcagatcctgatctgcagtatatcttagtgccaagtgaaccaatagctgccttgctgatcttatgcgatgcaagtggtagctgtttctatctgcaatgatgactagaaatctgaaactatgtacagatggcattgtgctcacgtcgtcacgtgcttgttggttagagaatagggttgttatttgcttagttagcagcctaggccatggaatagagaaggtgttaactacattgtaagcataaaatttattatccccactctgtgttgatgaatatctttcctccatctagattgatcatattgctactcattgg

SEQ ID NO: 11359 - DNA, 2871 bp, Zea Mays
cctgcccgttgcctcctcctccgcctcttatcctctacggccctgtctctcgcacgggccggttcgctggcagttaccttacctgccgctgactcgctccagtggccaggacctgctgcagtggacgtggtgccggcggcgggccacggcggaagcagccatggaggcagtgcagacggcactgagtgagagaacgaacccgctgctcaacaggtcatccggtccatccgtcgtcactcggcttcaacctgacgccggcaacggcgcgggcttctatgacggggcctactctttcctcgacaccaccaaggcctgcgctacccggttcagcagcgggtcagtgacatccgacgactcgccggcggtgacgcccaggctgctgtccttgatgtccagctccagccccgacaactgctcctcctcctcagaatggcccgaccgagcggcggcgtcgcgctccaatcggtacctcttcgacgcgaacgcacaggcccggtgcgcggggtacctggacctgatgaggctggaggtggatgcgcagctgggcaggctcaggggcggtgtcactggcctggagagctacgctttgccgggcaacggccgtgcgatcggaggtgcgcacctgggcatgtcgcttgatgtcatgctgattgagattgatgagaggttcaacaccctgaagctgctcatgggctccgtgttccggcaggccaaggagatgcttggttcggtcaactcgtcggtgtctgatctgcagtcggagaatgagctgcagctggaagtgttcggtgccatcatcggagagtgcgtcagtggcctgcaggaggagctagagaggaagctgtacgagcagattagcatcacaaacaccatgggcaggaactggaaggaagccataactcagtttgccgccatgcgcgaagaccttggcgctctttgtaagctactactgcctttagcaccagaagctcatatttctaatggcaagaatgaaagtccaggcagcaagagtaacagatggaagtacaatttctttggaaagaaatccagagaggatcgttctccgcgcgctgaggacagcaagagtttcaggaagcaaaaatcatttggtgcaaaggatgtcatctcagaaaagtctgactttcaccatctcaatggtatgactagagagcaagtgataacctattttaagtctgagatcagcaaaatgaaaaggatgcacgaatcagctttgcaagagaagaccgaagaactgttcaggctcaaacgggagaaggggtcacattctctcaagaatgacatagaatttgaacctttgagaaagaaaattccagagcttgtattgagaatggaccaaatcatttccaagaatataaaggtacctgcaatctgcatgacccatgatgaactcgatgaaagatgcagattgatgagcagaatcgatgctttgttctatgaaaatcagcattttcgagggttgcttgcagacaggatgaaggacgttaaggcattatcatcccagctatctgaagccagtacagaactgtcaatgcagatgctgtcggaagaagagctcctgagacaaattgataaagttagagaagactgtgaggacctccgaattgaatgtgatgttagagaaggaatgtaccaaactgttacaaaacatttgcttgatgactataaggacagtatggatggtgctgctctaaatcttagtgcaaaattgtcttcacttgaatctgcagtctctgaaaaggataaggcattatgcatatataacgaagaaaatcacaggttaaaggagaagttagctgagttagaaaaggaacgcttgatccacggtgaccaggaagttccagaagccataaaacaagatagcacagaaattgttctgcgtgacattgaggttgagccttgcacgtcaccgagaagatcaaatgtgaacaattcaaggtatgacgaacttgtgaaacttgactcaagcttagagcaaacgtcatgtgtcctcaaggaaatgaacaacaaaaatatggatcgcagtagtagcctcagtaggaatgagcaagagaagcagctggagtgcattttagtatctatcatgaaactatcaaaagattttgtagagatcgagaaaaagatgtcagcggaaagaaccgagaacaggtcagaggaactgagcgatcactgcaaccacatggtcagacaagccatggtactaacaaagatagggctttggtataaacaaatgattgaagcgaggcgttctgagctccaaaaggctgaagccaaggttatggtattaggcgacaagatcaccgcacagttgagccttctccgaaagatatatttagctctcgatcattactctcctaccttgcatcagcatcctggtatctgagaagtaaacagaacgaaggcgatgcaacatgaacgaggaggcggtatggtgggatctcccttggtatagctaatgtttctcatgtgcttatccgtgttccacgcctgccgctgcagaccaagtgaaggatcctattgaactgaggttttagaattttcagatcctgatctgcagtatatcttagtgccaagtgaaccaatagctgccttgctgatcttatgcgatgcaagtggtagctgtttctatctgcaatgatgactagaaatctgaaactatgtacagatggcattgtgctcacgtcgtcacgtgcttgttggttagagaatagggttgttatttgcttagttagcagcctaggccatggaatagagaaggtgttaactacattgtaagcataaaatttattatccccactctgtgttgatgaatatctttcctccatctagattgatcatattgctactcattgg

SEQ ID NO: 11360 - DNA, 2855 bp, Zea Mays
ctggcggcgtacgatcgatgatgacgccctctccctgaaccgccgcgtccctgctggccggccgacgtccgcacgggcgggcgctgtctcacggcctgcctcggcggctcggccctctcctctgccgccacgcccgcctcccccaacttctcccaccggcccctggcccctgcctcttggcccacccggccgccacgccactctgctgatcacacgcgcgcgcgtccctgtcgcgcgcattactccgcccgggctccgcttcactcctttccgttccgttcccgtccccgtcgcacgtcgctgtccgccgcccgggtctccctctcccactaccacttgccgcccgccctgcccgttgcctcctcctccgcctcttatcctctacggccctgtctctcgcacgggccggttcgctggcagttaccttacctgccgctgactcgctccagtggccaggacctgctgcagtggacgtggtgccggcggcgggccacggcggaagcagccatggaggcagtgcagacggcactgagtgagagaacgaacccgctgctcaacaggtcatccggtccatccgtcgtcactcggcttcaacctgacgccggcaacggcgcgggcttctatgacggggcctactctttcctcgacaccaccaaggcctgcgctacccggttcagcagcgggtcagtgacatccgacgactcgccggcggtgacgcccaggctgctgtccttgatgtccagctccagccccgacaactgctcctcctcctcagaatggcccgaccgagcggcggcgtcgcgctccaatcggtacctcttcgacgcgaacgcacaggcccggtgcgcggggtacctggacctgatgaggctggaggtggatgcgcagctgggcaggctcaggggcggtgtcactggcctggagagctacgctttgccgggcaacggccgtgcgatcggaggtgcgcacctgggcatgtcgcttgatgtcatgctgattgagattgatgagaggttcaacaccctgaagctgctcatgggctccgtgttccggcaggccaaggagatgcttggttcggtcaactcgtcggtgtctgatctgcagtcggagaatgagctgcagctggaagtgttcggtgccatcatcggagagtgcgtcagtggcctgcaggaggagctagagaggaagctgtacgagcagattagcatcacaaacaccatgggcaggaactggaaggaagccataactcagtttgccgccatgcgcgaagaccttggcgctctttgtaagctactactgcctttagcaccagaagctcatatttctaatggcaagaatgaaagtccaggcagcaagagtaacagatggaagtacaatttctttggaaagaaatccagagaggatcgttctccgcgcgctgaggacagcaagagtttcaggaagcaaaaatcatttggtgcaaaggatgtcatctcagaaaagtctgactttcaccatctcaatggtatgactagagagcaagtgataacctattttaagtctgagatcagcaaaatgaaaaggatgcacgaatcagctttgcaagagaagaccgaagaactgttcaggctcaaacgggagaaggggtcacattctctcaagaatgacatagaatttgaacctttgagaaagaaaattccagagcttgtattgagaatggaccaaatcatttccaagaatataaaggtacctgcaatctgcatgacccatgatgaactcgatgaaagatgcagattgatgagcagaatcgatgctttgttctatgaaaatcagcattttcgagggttgcttgcagacaggatgaaggacgttaaggcattatcatcccagctatctgaagccagtacagaactgtcaatgcagatgctgtcggaagaagagctcctgagacaaattgataaagttagagaagactgtgaggacctccgaattgaatgtgatgttagagaaggaatgtaccaaactgttacaaaacatttgcttgatgactataaggacagtatggatggtgctgctctaaatcttagtgcaaaattgtcttcacttgaatctgcagtctctgaaaaggataaggcattatgcatatataacgaagaaaatcacaggttaaaggagaagttagctgagttagaaaaggaacgcttgatccacggtgaccaggaagttccagaagccataaaacaagatagcacagaaattgttctgcgtgacattgaggttgagccttgcacgtcaccgagaagatcaaatgtgaacaattcaaggtatgacgaacttgtgaaacttgactcaagcttagagcaaacgtcatgtgtcctcaaggaaatgaacaacaaaaatatggatcgcagtagtagcctcagtaggaatgagcaagagaagcagctggagtgcattttagtatctatcatgaaactatcaaaagattttgtagagatcgagaaaaagatgtcagcggaaagaaccgagaacaggtcagaggaactgagcgatcactgcaaccacatggtcagacaagccatggtactaacaaagatagggctttggtataaacaaatgattgaagcgaggcgttctgagctccaaaaggctgaagccaaggttatggtattaggcgacaagatcaccgcacagttgagccttctccgaaagatatatttagctctcgatcattactctcctaccttgcatcagcatcctggtctgctagacgctttcatgaagacgtgcaagcttgttgcagatctgagaagtaaacagaacgaaggcgatgcaacatgaacgaggaggcgattgatcatattgctactcattgg

SEQ ID NO: 11361 - DNA, 768 bp, Zea Mays
gttgattgccactagagagttcagataaactaaacacctcatgtgcaactgttctactccggtttgggttgatgatttggtggaggcgtccaagtcaatttcaacattgccttctatggttgagcgagacattcagaccgacactgtcaggaaaccagggagccatacaaggaatctgcttagagtgaagcgcgggattgatatggttaaagtcctgtttgagcaaattcttgtcacagaaggcaactcactaagggatgcagcatcggtggcttatgctcaggtctttgctcctcaccatggatgggcaataaggaaagcagtttctgctggaatgtacgcccttccctcaaagtcccagctgttgaagaaattgaatgaagatgaggaatcagcaaaggttcaaatgcagaactttgtcaggtcatcagctccagtaatctgctatgttgatgaccttttcacctcaaggaatttgggcatagattggtgaagaaaaatatggatacgtttgtttgatgtactaatccagtcagatggtgtgctgtgtgagctgggctcagaaaacctttttctggatccgtgtttccaagtcgtaaactaatataactacttagcgatcccgttctggagttatttgtgatgtttgcgcagtataaatatacgtgtcgacaaatataactacttagcgatccctgataatactggagttaggcgatgagaaaatatacgtgtcggctgattggaaaattttctagacatgctgct

SEQ ID NO: 11362 - DNA, 759 bp, Zea Mays
cttcaattctttctcggtgcacggattttggcttgtgattagtaaccaaaactatgaggttgatgatttggtggaggcgtccaagtcaatttcaacattgccttctatggttgagcgagacattcagaccgacactgtcaggaaaccagggagccatacaaggaatctgcttagagtgaagcgcgggattgatatggttaaagtcctgtttgagcaaattcttgtcacagaaggcaactcactaagggatgcagcatcggtggcttatgctcaggtctttgctcctcaccatggatgggcaataaggaaagcagtttctgctggaatgtacgcccttccctcaaagtcccagctgttgaagaaattgaatgaagatgaggaatcagcaaaggttcaaatgcagaactttgtcaggtcatcagctccagtaatctgctatgttgatgaccttttcacctcaaggaatttgggcatagattggtgaagaaaaatatggatacgtttgtttgatgtactaatccagtcagatggtgtgctgtgtgagctgggctcagaaaacctttttctggatccgtgtttccaagtcgtaaactaatataactacttagcgatcccgttctggagttatttgtgatgtttgcgcagtataaatatacgtgtcgacaaatataactacttagcgatccctgataatactggagttaggcgatgagaaaatatacgtgtcggctgattggaaaattttctagacatgctgct

SEQ ID NO: 11363 - DNA, 729 bp, Zea Mays
gtcgtactttgggctcaaaacgatggtggttgatgatttggtggaggcgtccaagtcaatttcaacattgccttctatggttgagcgagacattcagaccgacactgtcaggaaaccagggagccatacaaggaatctgcttagagtgaagcgcgggattgatatggttaaagtcctgtttgagcaaattcttgtcacagaaggcaactcactaagggatgcagcatcggtggcttatgctcaggtctttgctcctcaccatggatgggcaataaggaaagcagtttctgctggaatgtacgcccttccctcaaagtcccagctgttgaagaaattgaatgaagatgaggaatcagcaaaggttcaaatgcagaactttgtcaggtcatcagctccagtaatctgctatgttgatgaccttttcacctcaaggaatttgggcatagattggtgaagaaaaatatggatacgtttgtttgatgtactaatccagtcagatggtgtgctgtgtgagctgggctcagaaaacctttttctggatccgtgtttccaagtcgtaaactaatataactacttagcgatcccgttctggagttatttgtgatgtttgcgcagtataaatatacgtgtcgacaaatataactacttagcgatccctgataatactggagttaggcgatgagaaaatatacgtgtcggctgattggaaaattttctagacatgctgct

SEQ ID NO: 11364 - DNA, 755 bp, Zea Mays
cacactctcactgatatcagagcatctactttcgagaccttgtttgctgttatggttgatgatttggtggaggcgtccaagtcaatttcaacattgccttctatggttgagcgagacattcagaccgacactgtcaggaaaccagggagccatacaaggaatctgcttagagtgaagcgcgggattgatatggttaaagtcctgtttgagcaaattcttgtcacagaaggcaactcactaagggatgcagcatcggtggcttatgctcaggtctttgctcctcaccatggatgggcaataaggaaagcagtttctgctggaatgtacgcccttccctcaaagtcccagctgttgaagaaattgaatgaagatgaggaatcagcaaaggttcaaatgcagaactttgtcaggtcatcagctccagtaatctgctatgttgatgaccttttcacctcaaggaatttgggcatagattggtgaagaaaaatatggatacgtttgtttgatgtactaatccagtcagatggtgtgctgtgtgagctgggctcagaaaacctttttctggatccgtgtttccaagtcgtaaactaatataactacttagcgatcccgttctggagttatttgtgatgtttgcgcagtataaatatacgtgtcgacaaatataactacttagcgatccctgataatactggagttaggcgatgagaaaatatacgtgtcggctgattggaaaattttctagacatgctgct

SEQ ID NO: 11365 - DNA, 1013 bp, Zea Mays
aaaaatgaacgcgttgaaacaccgaaaggcaagccggcagcaccaaacttttctcctaaaaatcctccaaaaaaacaaaaaaggggagggaaaaaattctcgtcttcttccccgtgcttgccagcacccgaggtcggcgagctctccgaaagcggcggcgatgggttccagccaggccgataagccactgcgtcgtatagcggtgtcgttcgaggagctcgccgccgtcgctaagcagcagcccgcggtgcccatggacgctggggccttctcgcgcgcctgctccaacgtctccgtcctcttcggctgcctcggcatcgctttcaagttcgcggagatggactacgtcgccaaggttgatgatttggtggaggcgtccaagtcaatttcaacattgccttctatggttgagcgagacattcagaccgacactgtcaggaaaccagggagccatacaaggaatctgcttagagtgaagcgcgggattgatatggttaaagtcctgtttgagcaaattcttgtcacagagtctttgctcctcaccatggatgggcaataaggaaagcagtttctgctggaatgtacgcccttccctcaaagtcccagctgttgaagaaattgaatgaagatgaggaatcagcaaaggttcaaatgcagaactttgtcaggtcatcagctccagtaatctgctatgttgatgaccttttcacctcaaggaatttgggcatagattggtgaagaaaaatatggatacgtttgtttgatgtactaatccagtcagatggtgtgctgtgtgagctgggctcagaaaacctttttctggatccgtgtttccaagtcgtaaactaatataactacttagcgatcccgttctggagttatttgtgatgtttgcgcagtataaatatacgtgtcgacaaatataactacttagcgatccctgataatactggagttaggcgatgagaaaatatacgtgtcggctgattggaaaattttctagacatgctgct

SEQ ID NO: 11366 - DNA, 1331 bp, Zea Mays
acaacgcgtgtagccgaattcttctacggtcgtctagcattcttgactcccatgatttctcgctgctcggtgcgttttttggtcgaaacagtgttgttttcccatcttttgattttgatttcttttgaattcatcagtgtcgatggtcgtgtcggaggatgatgatatggtttttgtcgccccagtcttaggatccggacttccggacctttgctgattgacatgttatcgtttctgactccactgttcatgagttcgccttcaccacttcctcccatccgttgcagtgtgttacatttgtgttcttttttttttctcatctttgctgcatgcctgtatccattcttcagaggatgatgatgcgcaattgtcgccccagtcttaggatccgttcacatgacggttctttgctgattgacataacagtggatctgactctttacagattgtcataatctgacagtttcggagacttagcaggtgtctgtttcttggggccatttgctattttatttatcatactctcagttgtgggcttcaccactatttcgtttcttgatactgtcagggattcatcactacatcaatgctgagcaggccgaaagtattactacattccgaaatgacggtgttgatgatttggtggaggcgtccaagtcaatttcaacattgccttctatggttgagcgagacattcagaccgacactgtcaggaaaccagggagccatacaaggaatctgcttagagtgaagcgcgggattgatatggttaaagtcctgtttgagcaaattcttgtcacagaaggcaactcactaagggatgcagcatcggtggcttatgctcaggtctttgctcctcaccatggatgggcaataaggaaagcagtttctgctggaatgtacgcccttccctcaaagtcccagctgttgaagaaattgaatgaagatgaggaatcagcaaaggttcaaatgcagaactttgtcaggtcatcagctccagtaatctgctatgttgatgaccttttcacctcaaggaatttgggcatagattggtgaagaaaaatatggatacgtttgtttgatgtactaatccagtcagatggtgtgctgtgtgagctgggctcagaaaacctttttctggatccgtgtttccaagtcgtaaactaatataactacttagcgatcccgttctggagttatttgtgatgtttgcgcagtataaatatacgtgtcgacaaatataactacttagcgatccctgataatactggagttaggcgatgagaaaatatacgtgtcggctgattggaaaattttctagacatgctgct

SEQ ID NO: 11367 - DNA, 515 bp, Zea Mays
cttccccttcttggctcgcggtcgctggcgttccctgctccaagccttctaggctccacgatgggccttcgtgggctgattcagaaagctaaagatggaggcttggatgtcattcagacctacgcctggaaatggaattggaaaatggaagagcagctggctggagagggcaagaactcttgaagagcaactgaatatatttatctctaaagaaaatccggtgtggccctttaatccccaagattcaaatggagtataacttaaatggtccacataaccattgaatatggaccaccaagcaagtattctagcactttccagaatctgttgtctcaaaaaatggtagcaatggtgctctatcagccatgaaccccaaacgcttaatgtagcatgtgcttagacataagtcttgatggttggattatggtccacctaccatttatgtaacctgattgtatacaatggtttactgtatgtgtcattatattctatatactattcaatatgtcttatta

SEQ ID NO: 11368 - DNA, 4734 bp, Zea Mays
cgtttcgcccaggagcgacaggcgcgggcgccacggagtgtgtgtgagagagagatagagagagagggagatgcgagaggaggtgaggagctcgtcgggggcggtggcagaaacgccgatggccgtcgcccggtcctcgtcgccgccgcacaccccggtagccagttccgtcggtgcctcgtcacctgctatgcaaactaatgttgcaagcatagattggttgggtggcaaacaagcttccagagttgactcgtcgtcgcaagttgctgcacatgcttatcacccttcccatagttttgatgcagctggcactgctatggattctgcaccatcatgcagaccatgggaacgtggagacttacttcgtcgactggcaacatttaagccttcaacttgggcttctaaaccgaaggctgctagttctttggcctgtgctcagagaggttgggtgaatgttgacatggacaaaattgaatgcgagtcatgtggcacacatctaatcttcaatgcattgacatcctggtcccctgttgaagttgcaaatgctggagaatcctttgccgagcagcttgatgcagcacaccagaatagttgtccctggagaggcaataactgtgctgacagcttggtccagcttcaccttacacaatcagctcttattggaggttttaaagaccgctgtgatgggcttttacagtttacctctcttcctgtgattgcaccatctgcaattgagaacatgaagcttacaaggagtgtacaaattgatcatctgttgtcccaatcaattacctttttatctggtattctgggctgcagagcagagagtacagcaggaattgatatccaccaagatttctcttgtagctactctcaagtatgctggtcccttttcatgtacacatgctatgttttttattggcgctaacatgctattatcttgcgttgcctccagcttctttaatttaggtgcttttatcaatgagtttgtaggcacaaaagctcataagcctgtgtggatgggagcctaggtggcttccaaatgttcaagactgtgaagaaaattcaacgcattcagctaaaaatttaccctcagttggacctgacgaacggttatatccccattttgttgaacataacaaaaattcattttctgcatcagccaagaaagataaggggaaaggcaaattgcccgttggagattctggatgcagcatgaggtcaccgttgttagattgtaacctgtgtggagctacagtcaggatgcgggactttagacctgtattatgtccttctcgtttcagtccaaataacattgttgtgcctggaacaggcagaaagctaacactgacacatggagttagtgctgccagtggtatcaatgagtgggttactgatggggtggaaagaggtcaagatgaagggcgtgatgaagcagcaacaaatgagggaaaaccactatcacttgttggagtagacctaaacctaacaatggctggaggattaccgtcacctcaatctgccatgcctgctatgtcagagcggtttaataatggaggaatgggaagggatctgatgattggacagcctacaggcagtgaagtaggtgattgtgaaacctcatatgaatctcggggtccgagttcaaggaagcgtaaccttgaggaaggtgggagcacagctgacaatccacaagataggctgcagcatgctgatagcatacaaggaaatttcattgatcgtgatggtgaggaagttgatgatgctgcacaggattcagatgtcccgaataagaagtcccgtgggttcgatctgtttgatgcctatcgtccttcctctggagctggtcccagtagaaatttgtcctttggccctcatgaggatgctggtatgttcagtcactcaagagcaattgacctggcagctgttgagcgtccgactgctagggattcactgagagcatcttctgttattgcaatgcatactattcatacttccgaggaagattctatggagagtgttgagtattacccaggtgatggtaatgatatcgatatgccttcttctagtacacaaaggaacattgaaatgaatgatgccttggatcttaactatagcaaccaagcacagcaaagtgctaatgcacatgctggtgctggaagcgatgcaagagaaattggaggaagcagtacaaatgaaggggaggaggtcattaatgctgaaacagttcccccttttggaagggatcaacttagtttaggaattagtggtggtagtgttggcatgggggctagtcatgaggctgaaattcatggaaatgctggttctctgcacagaactgagagtgttgtaggtgatgctgaacctattgccgagcttactgagacaatgggtcagactggtgaatcagctccaggacctggattaatggatgaatttgtacctgaggtagaccgagatgaacctcatggagacagccaagatacggtgtcccggtcagttggccaagccgacagtggatcgaaaatatatggctataccaaagctgattctgttgaaagtggagaaaagataggtcatgccaccggtaatggaagcagcatgcgtccttctctttcttgcaacgcagggatgtgtgctggttttgatctgtctaaagatgatgtgacacatactggcaaaatactaactactgatgatgcattaatggggttagattatgatcctggaaatggattaggagctactaatggagaaaatgactatgaatcgggtctgctggaatttgatcctgttaagcatcacaatacttactgcccatgggtgaacgggaatgttgcagcggcttgctgcaacaacattggctccagctcaagtagttcagcgccctctggttggcagctaacaatagatgcagtcgacacgtaccaatcacttggtcaagcccaaaatcaaataatgcaatctgattctgcagcttcattatatatgcaggatgaccaaataactcataaccgcaaggtagggagacggccttctgtgagcagaagctttgggaagtgctgatcggaactcctgtagctcaagtgtttcctagacagaaacagcattacagaagttccagattggtgtaacaggagaaacaaaataatgatagtctcagtagattgttatcaccccgtgggtgtgagcttatagctgttttatgttgttgcatattgatacatcatatatatgtgtatttatattccgaaagggtttattcaacagtctttcatttgacagtaacattttcaagcgaactaggtacattattatggtgagattatgtaaacttcatattcatatatttatcgccgttcttgttgcgtccatgtacctcatctaatgatatggttgtgttcagatttttcttcttctgtttctttgtatctggctgactgtttcttcgcgcggggtgctatctgagaggccatcgccctcgtcaaatctcagcagccaatgagcaccacccagagtgccaggtcgtcagcaacgaccagataaagaagtggatgagatgccacttcacttcactccacccctgcttgtattgtatcctcgtcttttcccttctctccgtctatttccaagctttctccagatcaaatcagaaaggggaagggaagaacggcccagcaatgccgctctgcagcttctacgcctccacctccgttcccgtcgtcaagccccagcagtccgtcgcctcgtccaagccccccaccacggcggtggcctccgtggcgacaactgtgccgatgcgcagtgcagcgacggtgacgccagccgtggccacaacaacgagcctagcgctgtctctgcacctgccggagctgccgtcgcaggtgaaggacaagatcctgagcctggagctgatgggcgtggactatgggcgcgcgctggagcagaacccggcgctccgcgacgcggcgccggagtccatccacgcggtggtgtcgttcctccagtcccgcgggctccagttcaaggacctgggccgcgtcttcggcatgtgcccgtccgtgctgaccgccagcgtccgcgccgacctccgccccgtgttcgccttcctctccgcggacctgggcgtgccggagtcggcgcaccggcgcgtggtgatcaagtgcccgcgcgtgctggcctgcagcgtccgcgaccagctccgccccgcgctcatctacctccgccgcctgggcttccgggacagccgcgcgctggcgctgcaggacccgatcctcctcgtctccagcgtggagcgcaccctggcgccgaagctggagtacctggccgggctcggcatgtcccgcgacgacgcggtcgccatggtgctgcgctgcccggcgctcttcaccttcagcatcgagcggaactaccggcccaagttcgagtacctggtggacgccatgggcggcggcgtcgaggacgtcaaggccttcccgcagtacttcgccttcagcctcgagaagcggatcgcgccgcgccaccgcgccgcggaggacgccggcgtcgcgctgccgcttccggacatgctcaaggccaccgacgaggagttcagggagatgctcgacaaggagcgggagctgcacgagcaggcagcgacgacggactgatcgatcggggggctagtacagcggtttgcacctgatccgactctccgaagcatccaaccgccgtcttcgtggcgatcgagtgtcc

SEQ ID NO: 11369 - DNA, 5008 bp, Zea Mays
cgtttcgcccaggagcgacaggcgcgggcgccacggagtgtgtgtgagagagagatagagagagagggagatgcgagaggaggtgaggagctcgtcgggggcggtggcagaaacgccgatggccgtcgcccggtcctcgtcgccgccgcacaccccggtagccagttccgtcggtgcctcgtcacctgctatgcaaactaatgttgcaagcatagattggttgggtggcaaacaagcttccagagttgactcgtcgtcgcaagttgctgcacatgcttatcacccttcccatagttttgatgcagctggcactgctatggattctgcaccatcatgcagaccatgggaacgtggagacttacttcgtcgactggcaacatttaagccttcaacttgggcttctaaaccgaagttctttggcctgtgctcagagaggttgggtgaatgttgacatggacaaaattgaatgcgagtcatgtggcacacatctaatcttcaatgcattgacatcctggtcccctgttgaagttgcaaatgctggagaatcctttgccgagcagcttgatgcagcacaccagaatagttgtccctggagaggcaataactgtgctgacagcttggtccagcttcaccttacacaatcagctcttattggaggttttaaagaccgctgtgatgggcttttacagtttacctctcttcctgtgattgcaccatctgcaattgagaacatgaagcttacaaggagtgtacaaattgatcatctgttgtcccaatcaattacctttttatctggtattctgggctgcagagcagagagtacagcaggaattgatatccaccaagatttctcttgtagctactctcaacttctttaatttaggtgcttttatcaatgagtttgtaggcacaaaagctcataagcctgtgtggatgggagcctaggtggcttccaaatgttcaagactgtgaagaaaattcaacgcattcagctaaaaatttaccctcagttggacctgacgaacggttatatccccattttgttgaacataacaaaaattcattttctgcatcagccaagaaagataaggggaaaggcaaattgcccgttggagattctggatgcagcatgaggtcaccgttgttagattgtaacctgtgtggagctacagtcaggatgcgggactttagacctgtattatgtccttctcgtttcagtccaaataacattgttgtgcctggaacaggcagaaagctaacactgacacatggagttagtgctgccagtggtatcaatgagtgggttactgatggggtggaaagaggtcaagatgaagggcgtgatgaagcagcaacaaatgagggaaaaccactatcacttgttggagtagacctaaacctaacaatggctggaggattaccgtcacctcaatctgccatgcctgctatgtcagagcggtttaataatggaggaatgggaagggatctgatgattggacagcctacaggcagtgaagtaggtgattgtgaaacctcatatgaatctcggggtccgagttcaaggaagcgtaaccttgaggaaggtgggagcacagctgacaatccacaagataggctgcagcatgctgatagcatacaaggaaatttcattgatcgtgatggtgaggaagttgatgatgctgcacaggattcagatgtcccgaataagaagtcccgtgggttcgatctgtttgatgcctatcgtccttcctctggagctggtcccagtagaaatttgtcctttggccctcatgaggatgctggtatgttcagtcactcaagagcaattgacctggcagctgttgagcgtccgactgctagggattcactgagagcatcttctgttattgcaatgcatactattcatacttccgaggaagattctatggagagtgttgagtattacccaggtgatggtaatgatatcgatatgccttcttctagtacacaaaggaacattgaaatgaatgatgccttggatcttaactatagcaaccaagcacagcaaagtgctaatgcacatgctggtgctggaagcgatgcaagagaaattggaggaagcagtacaaatgaaggggaggaggtcattaatgctgaaacagttcccccttttggaagggatcaacttagtttaggaattagtggtggtagtgttggcatgggggctagtcatgaggctgaaattcatggaaatgctggttctctgcacagaactgagagtgttgtaggtgatgctgaacctattgccgagcttactgagacaatgggtcagactggtgaatcagctccaggacctggattaatggatgaatttgtacctgaggtagaccgagatgaacctcatggagacagccaagatacggtgtcccggtcagttggccaagccgacagtggatcgaaaatatatggctataccaaagctgattctgttgaaagtggagaaaagataggtcatgccaccggtaatggaagcagcatgcgtccttctctttcttgcaacgcagggatgtgtgctggttttgatctgtctaaagatgatgtgacacatactggcaaaatactaactactgatgatgcattaatggggttagattatgatcctggaaatggattaggagctactaatggagaaaatgactatgaatcgggtctgctggaatttgatcctgttaagcatcacaatacttactgcccatgggtgaacgggaatgttgcagcggcttgctgcaacaacattggctccagctcaagtagttcagcgccctctggttggcagctaacaatagatgcagtcgacacgtaccaatcacttggtcaagcccaaaatcaaataatgcaatctgattctgcagcttcattatatatgcaggatgaccaaataactcataaccgcaaggtagggagacggccttctgtgagcagaagctttgggaagtgctgatcggaactcctgtagctcaagtgtttcctagacagaaacagcattacagaagttccagattggtgtaacaggagaaacaaaataatgatagtctcagtagattgttatcaccccgtgggtgtgagcttatagctgttttatgttgttgcatattgatacatcatatatatgtgtatttatattccgaaagggtttattcaacagtctttcatttgacagtaacattttcaagcgaactaggtacattattatggtgagattatgtaaacttcatattcatatatttatcgccgttcttgttgcgtccatgtacctcatctaatgatatggttgtgttcagatttttcttcttctgtttctttgtatctggctgactgtttcttcgcgcggggtgctatctgagaggccatcgccctcgtcaaatctcagcagccaatgagcaccacccagagtgccaggtcgtcagcaacgaccagataaagaagtggatgagatgccacttcacttcactccacccctgcttgtattgtatcctcgtcttttcccttctctccgtctatttccaagctttctccagatcaaatcagaaaggggaagggaagaacggcccagcaatgccgctctgcagcttctacgcctccacctccgttcccgtcgtcaagccccagcagtccgtcgcctcgtccaagccccccaccacggcggtggcctccgtggcgacaactgtgccgatgcgcagtgcagcgacggtgacgccagccgtggccacaacaacgagcctagcgctgtctctgcacctgccggagctgccgtcgcaggtgaaggacaagatcctgagcctggagctgatgggcgtggactatgggcgcgcgctggagcagaacccggcgctccgcgacgcggcgccggagtccatccacgcggtggtgtcgttcctccagtcccgcgggctccagttcaaggacctgggccgcgtcttcggcatgtgcccgtccgtgctgaccgccagcgtccgcgccgacctccgccccgtgttcgccttcctctccgcggacctgggcgtgccggagtcggcgcaccggcgcgtggtgatcaagtgcccgcgcgtgctggcctgcagcgtccgcgaccagctccgccccgcgctcatctacctccgccgcctgggcttccgggacagccgcgcgctggcgctgcaggacccgatcctcctcgtctccagcgtggagcgcaccctggcgccgaagctggagtacctggccgggctcggcatgtcccgcgacgacgcggtcgccatggtgctgcgctgcccggcgctcttcaccttcagcatcgagcggaactaccggcccaagttcgagtacctggtggacgccatgggcggcggcgtcgaggacgtcaaggccttcccgcagtacttcgccttcagcctcgagaagcggatcgcgccgcgccaccgcgccgcggaggacgccggcgtcgcgctgccgcttccggacatgctcaaggccaccgacgaggagttcagggagatgctcgacaaggagcgggagctgcacgagcaggcagcgacgacggactgatcgatcggggggctagtacagcggtttgcacctgatccgactctccgaagcatccaaccgccgtcttcgtggcgatcgagtgtcctggccatgacggtagccagcacatgtagtcatttgatttgagtaattagtagcctgtacatatatgcattgacattatttgctatagtcacgattcgtagctcatgagagaatatgcctgttctttctccattccaagtgaataagcacagagctggaagtcgtgtcttgtacacacgtgtaatgaatgaatgtaccaagttcattagatattatttgctctgagctgcacgcttgcgcaacacgtcttgtctcgtgtggttgtaattaatggtgtcaaaagctatggttgaaatccaaaggacaagcaaacaaatgctaatggagcatctccagtagacaaaaaaaagtttttcaagtc

SEQ ID NO: 11370 - DNA, 4985 bp, Zea Mays
cgtttcgcccaggagcgacaggcgcgggcgccacggagtgtgtgtgagagagagatagagagagagggagatgcgagaggaggtgaggagctcgtcgggggcggtggcagaaacgccgatggccgtcgcccggtcctcgtcgccgccgcacaccccggtagccagttccgtcggtgcctcgtcacctgctatgcaaactaatgttgcaagcatagattggttgggtggcaaacaagcttccagagttgactcgtcgtcgcaagttgctgcacatgcttatcacccttcccatagttttgatgcagctggcactgctatggattctgcaccatcatgcagaccatgggaacgtggagacttacttcgtcgactggcaacatttaagccttcaacttgggcttctaaaccgaaggctgctagttctttggcctgtgctcagagaggttgggtgaatgttgacatggacaaaattgaatgcgagtcatgtggcacacatctaatcttcaatgcattgacatcctggtcccctgttgaagttgcaaatgctggagaatcctttgccgagcagcttgatgcagcacaccagaatagttgtccctggagaggcaataactgtgctgacagcttggtccagcttcaccttacacaatcagctcttattggaggttttaaagaccgctgtgatgggcttttacagtttacctctcttcctgtgattgcaccatctgcaattgagaacatgaagcttacaaggagtgtacaaattgatcatctgttgtcccaatcaattacctttttatctggtattctgggctgcagagcagagagtacagcaggaattgatatccaccaagatttctcttgtagctactctcaatttgtaggcacaaaagctcataagcctgtgtggatgggagcctaggtggcttccaaatgttcaagactgtgaagaaaattcaacgcattcagctaaaaatttaccctcagttggacctgacgaacggttatatccccattttgttgaacataacaaaaattcattttctgcatcagccaagaaagataaggggaaaggcaaattgcccgttggagattctggatgcagcatgaggtcaccgttgttagattgtaacctgtgtggagctacagtcaggatgcgggactttagacctgtattatgtccttctcgtttcagtccaaataacattgttgtgcctggaacaggcagaaagctaacactgacacatggagttagtgctgccagtggtatcaatgagtgggttactgatggggtggaaagaggtcaagatgaagggcgtgatgaagcagcaacaaatgagggaaaaccactatcacttgttggagtagacctaaacctaacaatggctggaggattaccgtcacctcaatctgccatgcctgctatgtcagagcggtttaataatggaggaatgggaagggatctgatgattggacagcctacaggcagtgaagtaggtgattgtgaaacctcatatgaatctcggggtccgagttcaaggaagcgtaaccttgaggaaggtgggagcacagctgacaatccacaagataggctgcagcatgctgatagcatacaaggaaatttcattgatcgtgatggtgaggaagttgatgatgctgcacaggattcagatgtcccgaataagaagtcccgtgggttcgatctgtttgatgcctatcgtccttcctctggagctggtcccagtagaaatttgtcctttggccctcatgaggatgctggtatgttcagtcactcaagagcaattgacctggcagctgttgagcgtccgactgctagggattcactgagagcatcttctgttattgcaatgcatactattcatacttccgaggaagattctatggagagtgttgagtattacccaggtgatggtaatgatatcgatatgccttcttctagtacacaaaggaacattgaaatgaatgatgccttggatcttaactatagcaaccaagcacagcaaagtgctaatgcacatgctggtgctggaagcgatgcaagagaaattggaggaagcagtacaaatgaaggggaggaggtcattaatgctgaaacagttcccccttttggaagggatcaacttagtttaggaattagtggtggtagtgttggcatgggggctagtcatgaggctgaaattcatggaaatgctggttctctgcacagaactgagagtgttgtaggtgatgctgaacctattgccgagcttactgagacaatgggtcagactggtgaatcagctccaggacctggattaatggatgaatttgtacctgaggtagaccgagatgaacctcatggagacagccaagatacggtgtcccggtcagttggccaagccgacagtggatcgaaaatatatggctataccaaagctgattctgttgaaagtggagaaaagataggtcatgccaccggtaatggaagcagcatgcgtccttctctttcttgcaacgcagggatgtgtgctggttttgatctgtctaaagatgatgtgacacatactggcaaaatactaactactgatgatgcattaatggggttagattatgatcctggaaatggattaggagctactaatggagaaaatgactatgaatcgggtctgctggaatttgatcctgttaagcatcacaatacttactgcccatgggtgaacgggaatgttgcagcggcttgctgcaacaacattggctccagctcaagtagttcagcgccctctggttggcagctaacaatagatgcagtcgacacgtaccaatcacttggtcaagcccaaaatcaaataatgcaatctgattctgcagcttcattatatatgcaggatgaccaaataactcataaccgcaaggtagggagacggccttctgtgagcagaagctttgggaagtgctgatcggaactcctgtagctcaagtgtttcctagacagaaacagcattacagaagttccagattggtgtaacaggagaaacaaaataatgatagtctcagtagattgttatcaccccgtgggtgtgagcttatagctgttttatgttgttgcatattgatacatcatatatatgtgtatttatattccgaaagggtttattcaacagtctttcatttgacagtaacattttcaagcgaactaggtacattattatggtgagattatgtaaacttcatattcatatatttatcgccgttcttgttgcgtccatgtacctcatctaatgatatggttgtgttcagatttttcttcttctgtttctttgtatctggctgactgtttcttcgcgcggggtgctatctgagaggccatcgccctcgtcaaatctcagcagccaatgagcaccacccagagtgccaggtcgtcagcaacgaccagataaagaagtggatgagatgccacttcacttcactccacccctgcttgtattgtatcctcgtcttttcccttctctccgtctatttccaagctttctccagatcaaatcagaaaggggaagggaagaacggcccagcaatgccgctctgcagcttctacgcctccacctccgttcccgtcgtcaagccccagcagtccgtcgcctcgtccaagccccccaccacggcggtggcctccgtggcgacaactgtgccgatgcgcagtgcagcgacggtgacgccagccgtggccacaacaacgagcctagcgctgtctctgcacctgccggagctgccgtcgcaggtgaaggacaagatcctgagcctggagctgatgggcgtggactatgggcgcgcgctggagcagaacccggcgctccgcgacgcggcgccggagtccatccacgcggtggtgtcgttcctccagtcccgcgggctccagttcaaggacctgggccgcgtcttcggcatgtgcccgtccgtgctgaccgccagcgtccgcgccgacctccgccccgtgttcgccttcctctccgcggacctgggcgtgccggagtcggcgcaccggcgcgtggtgatcaagtgcccgcgcgtgctggcctgcagcgtccgcgaccagctccgccccgcgctcatctacctccgccgcctgggcttccgggacagccgcgcgctggcgctgcaggacccgatcctcctcgtctccagcgtggagcgcaccctggcgccgaagctggagtacctggccgggctcggcatgtcccgcgacgacgcggtcgccatggtgctgcgctgcccggcgctcttcaccttcagcatcgagcggaactaccggcccaagttcgagtacctggtggacgccatgggcggcggcgtcgaggacgtcaaggccttcccgcagtacttcgccttcagcctcgagaagcggatcgcgccgcgccaccgcgccgcggaggacgccggcgtcgcgctgccgcttccggacatgctcaaggccaccgacgaggagttcagggagatgctcgacaaggagcgggagctgcacgagcaggcagcgacgacggactgatcgatcggggggctagtacagcggtttgcacctgatccgactctccgaagcatccaaccgccgtcttcgtggcgatcgagtgtcctggccatgacggtagccagcacatgtagtcatttgatttgagtaattagtagcctgtacatatatgcattgacattatttgctatagtcacgattcgtagctcatgagagaatatgcctgttctttctccattccaagtgaataagcacagagctggaagtcgtgtcttgtacacacgtgtaatgaatgaatgtaccaagttcattagatattatttgctctgagctgcacgcttgcgcaacacgtcttgtctcgtgtggttgtaattaatggtgtcaaaagctatggttgaaatccaaaggacaagcaaacaaatgctaatggagcatctccagtagacaaaaaaaagtttttcaagtc

SEQ ID NO: 11371 - DNA, 4846 bp, Zea Mays
cgtttcgcccaggagcgacaggcgcgggcgccacggagtgtgtgtgagagagagatagagagagagggagatgcgagaggaggtgaggagctcgtcgggggcggtggcagaaacgccgatggccgtcgcccggtcctcgtcgccgccgcacaccccggtagccagttttgatgcagctggcactgctatggattctgcaccatcatgcagaccatgggaacgtggagacttacttcgtcgactggcaacatttaagccttcaacttgggcttctaaaccgaaggctgctagttctttggcctgtgctcagagaggttgggtgaatgttgacatggacaaaattgaatgcgagtcatgtggcacacatctaatcttcaatgcattgacatcctggtcccctgttgaagttgcaaatgctggagaatcctttgccgagcagcttgatgcagcacaccagaatagttgtccctggagaggcaataactgtgctgacagcttggtccagcttcaccttacacaatcagctcttattggaggttttaaagaccgctgtgatgggcttttacagtttacctctcttcctgtgattgcaccatctgcaattgagaacatgaagcttacaaggagtgtacaaattgatcatctgttgtcccaatcaattacctttttatctggtattctgggctgcagagcagagagtacagcaggaattgatatccaccaagatttctcttgtagctactctcaagcacaaaagctcataagcctgtgtggatgggagcctaggtggcttccaaatgttcaagactgtgaagaaaattcaacgcattcagctaaaaatttaccctcagttggacctgacgaacggttatatccccattttgttgaacataacaaaaattcattttctgcatcagccaagaaagataaggggaaaggcaaattgcccgttggagattctggatgcagcatgaggtcaccgttgttagattgtaacctgtgtggagctacagtcaggatgcgggactttagacctgtattatgtccttctcgtttcagtccaaataacattgttgtgcctggaacaggcagaaagctaacactgacacatggagttagtgctgccagtggtatcaatgagtgggttactgatggggtggaaagaggtcaagatgaagggcgtgatgaagcagcaacaaatgagggaaaaccactatcacttgttggagtagacctaaacctaacaatggctggaggattaccgtcacctcaatctgccatgcctgctatgtcagagcggtttaataatggaggaatgggaagggatctgatgattggacagcctacaggcagtgaagtaggtgattgtgaaacctcatatgaatctcggggtccgagttcaaggaagcgtaaccttgaggaaggtgggagcacagctgacaatccacaagataggctgcagcatgctgatagcatacaaggaaatttcattgatcgtgatggtgaggaagttgatgatgctgcacaggattcagatgtcccgaataagaagtcccgtgggttcgatctgtttgatgcctatcgtccttcctctggagctggtcccagtagaaatttgtcctttggccctcatgaggatgctggtatgttcagtcactcaagagcaattgacctggcagctgttgagcgtccgactgctagggattcactgagagcatcttctgttattgcaatgcatactattcatacttccgaggaagattctatggagagtgttgagtattacccaggtgatggtaatgatatcgatatgccttcttctagtacacaaaggaacattgaaatgaatgatgccttggatcttaactatagcaaccaagcacagcaaagtgctaatgcacatgctggtgctggaagcgatgcaagagaaattggaggaagcagtacaaatgaaggggaggaggtcattaatgctgaaacagttcccccttttggaagggatcaacttagtttaggaattagtggtggtagtgttggcatgggggctagtcatgaggctgaaattcatggaaatgctggttctctgcacagaactgagagtgttgtaggtgatgctgaacctattgccgagcttactgagacaatgggtcagactggtgaatcagctccaggacctggattaatggatgaatttgtacctgaggtagaccgagatgaacctcatggagacagccaagatacggtgtcccggtcagttggccaagccgacagtggatcgaaaatatatggctataccaaagctgattctgttgaaagtggagaaaagataggtcatgccaccggtaatggaagcagcatgcgtccttctctttcttgcaacgcagggatgtgtgctggttttgatctgtctaaagatgatgtgacacatactggcaaaatactaactactgatgatgcattaatggggttagattatgatcctggaaatggattaggagctactaatggagaaaatgactatgaatcgggtctgctggaatttgatcctgttaagcatcacaatacttactgcccatgggtgaacgggaatgttgcagcggcttgctgcaacaacattggctccagctcaagtagttcagcgccctctggttggcagctaacaatagatgcagtcgacacgtaccaatcacttggtcaagcccaaaatcaaataatgcaatctgattctgcagcttcattatatatggatgaccaaataactcataaccgcaaggtagggagacggccttctgtgagcagaagctttgggaagtgctgatcggaactcctgtagctcaagtgtttcctagacagaaacagcattacagaagttccagattggtgtaacaggagaaacaaaataatgatagtctcagtagattgttatcaccccgtgggtgtgagcttatagctgttttatgttgttgcatattgatacatcatatatatgtgtatttatattccgaaagggtttattcaacagtctttcatttgacagtaacattttcaagcgaactaggtacattattatggtgagattatgtaaacttcatattcatatatttatcgccgttcttgttgcgtccatgtacctcatctaatgatatggttgtgttcagatttttcttcttctgtttctttgtatctggctgactgtttcttcgcgcggggtgctatctgagaggccatcgccctcgtcaaatctcagcagccaatgagcaccacccagagtgccaggtcgtcagcaacgaccagataaagaagtggatgagatgccacttcacttcactccacccctgcttgtattgtatcctcgtcttttcccttctctccgtctatttccaagctttctccagatcaaatcagaaaggggaagggaagaacggcccagcaatgccgctctgcagcttctacgcctccacctccgttcccgtcgtcaagccccagcagtccgtcgcctcgtccaagccccccaccacggcggtggcctccgtggcgacaactgtgccgatgcgcagtgcagcgacggtgacgccagccgtggccacaacaacgagcctagcgctgtctctgcacctgccggagctgccgtcgcaggtgaaggacaagatcctgagcctggagctgatgggcgtggactatgggcgcgcgctggagcagaacccggcgctccgcgacgcggcgccggagtccatccacgcggtggtgtcgttcctccagtcccgcgggctccagttcaaggacctgggccgcgtcttcggcatgtgcccgtccgtgctgaccgccagcgtccgcgccgacctccgccccgtgttcgccttcctctccgcggacctgggcgtgccggagtcggcgcaccggcgcgtggtgatcaagtgcccgcgcgtgctggcctgcagcgtccgcgaccagctccgccccgcgctcatctacctccgccgcctgggcttccgggacagccgcgcgctggcgctgcaggacccgatcctcctcgtctccagcgtggagcgcaccctggcgccgaagctggagtacctggccgggctcggcatgtcccgcgacgacgcggtcgccatggtgctgcgctgcccggcgctcttcaccttcagcatcgagcggaactaccggcccaagttcgagtacctggtggacgccatgggcggcggcgtcgaggacgtcaaggccttcccgcagtacttcgccttcagcctcgagaagcggatcgcgccgcgccaccgcgccgcggaggacgccggcgtcgcgctgccgcttccggacatgctcaaggccaccgacgaggagttcagggagatgctcgacaaggagcgggagctgcacgagcaggcagcgacgacggactgatcgatcggggggctagtacagcggtttgcacctgatccgactctccgaagcatccaaccgccgtcttcgtggcgatcgagtgtcctggccatgacggtagccagcacatgtagtcatttgatttgagtaattagtagcctgtacatatatgcattgacattatttgctatagtcacgattcgtagctcatgagagaatatgcctgttctttctccattccaagtgaataagcacagagctggaagtcgtgtcttgtacacacgtgtaatgaatgaatgtaccaagttcattagatattatttgctctgagctgcacgcttgcgcaacacgtcttgtctcgtgtggttgtaattaatggtgtcaaaagctatggttgaaatccaaaggacaagcaaacaaatgctaatggagcatctccagtagacaaaaaaaagtttttcaagtc

SEQ ID NO: 11372 - DNA, 5119 bp, Zea Mays
ggccttatgggcccaactcccgggggcgctcgaattgacggcgtgagatggatactaacggtgactaacggtcgatgtaacggccgcatcaatgcgccgcccggcgcgtcgcgatcgggggaatcttttccccatttcgtttcgcccaggagcgacaggcgcgggcgccacggagtgtgtgtgagagagagatagagagagagggagatgcgagaggaggtgaggagctcgtcgggggcggtggcagaaacgccgatggccgtcgcccggtcctcgtcgccgccgcacaccccggtagccagttccgtcggtgcctcgtcacctgctatgcaaactaatgttgcaagcatagattggttgggtggcaaacaagcttccagagttgactcgtcgtcgcaagttgctgcacatgcttatcacccttcccatagttttgatgcagctggcactgctatggattctgcaccatcatgcagaccatgggaacgtggagacttacttcgtcgactggcaacatttaagccttcaacttgggcttctaaaccgaaggctgctagttctttggcctgtgctcagagaggttgggtgaatgttgacatggacaaaattgaatgcgagtcatgtggcacacatctaatcttcaatgcattgacatcctggtcccctgttgaagttgcaaatgctggagaatcctttgccgagcagcttgatgcagcacaccagaatagttgtccctggagaggcaataactgtgctgacagcttggtccagcttcaccttacacaatcagctcttattggaggttttaaagaccgctgtgatgggcttttacagtttacctctcttcctgtgattgcaccatctgcaattgagaacatgaagcttacaaggagtgtacaaattgatcatctgttgtcccaatcaattacctttttatctggtattctgggctgcagagcagagagtacagcaggaattgatatccaccaagatttctcttgtagctactctcaatttgtaggcacaaaagctcataagcctgtgtggatgggagcctaggtggcttccaaatgttcaagactgtgaagaaaattcaacgcattcagctaaaaatttaccctcagttggacctgacgaacggttatatccccattttgttgaacataacaaaaattcattttctgcatcagccaagaaagataaggggaaaggcaaattgcccgttggagattctggatgcagcatgaggtcaccgttgttagattgtaacctgtgtggagctacagtcaggatgcgggactttagacctgtattatgtccttctcgtttcagtccaaataacattgttgtgcctggaacaggcagaaagctaacactgacacatggagttagtgctgccagtggtatcaatgagtgggttactgatggggtggaaagaggtcaagatgaagggcgtgatgaagcagcaacaaatgagggaaaaccactatcacttgttggagtagacctaaacctaacaatggctggaggattaccgtcacctcaatctgccatgcctgctatgtcagagcggtttaataatggaggaatgggaagggatctgatgattggacagcctacaggcagtgaagtaggtgattgtgaaacctcatatgaatctcggggtccgagttcaaggaagcgtaaccttgaggaaggtgggagcacagctgacaatccacaagataggctgcagcatgctgatagcatacaaggaaatttcattgatcgtgatggtgaggaagttgatgatgctgcacaggattcagatgtcccgaataagaagtcccgtgggttcgatctgtttgatgcctatcgtccttcctctggagctggtcccagtagaaatttgtcctttggccctcatgaggatgctggtatgttcagtcactcaagagcaattgacctggcagctgttgagcgtccgactgctagggattcactgagagcatcttctgttattgcaatgcatactattcatacttccgaggaagattctatggagagtgttgagtattacccaggtgatggtaatgatatcgatatgccttcttctagtacacaaaggaacattgaaatgaatgatgccttggatcttaactatagcaaccaagcacagcaaagtgctaatgcacatgctggtgctggaagcgatgcaagagaaattggaggaagcagtacaaatgaaggggaggaggtcattaatgctgaaacagttcccccttttggaagggatcaacttagtttaggaattagtggtggtagtgttggcatgggggctagtcatgaggctgaaattcatggaaatgctggttctctgcacagaactgagagtgttgtaggtgatgctgaacctattgccgagcttactgagacaatgggtcagactggtgaatcagctccaggacctggattaatggatgaatttgtacctgaggtagaccgagatgaacctcatggagacagccaagatacggtgtcccggtcagttggccaagccgacagtggatcgaaaatatatggctataccaaagctgattctgttgaaagtggagaaaagataggtcatgccaccggtaatggaagcagcatgcgtccttctctttcttgcaacgcagggatgtgtgctggttttgatctgtctaaagatgatgtgacacatactggcaaaatactaactactgatgatgcattaatggggttagattatgatcctggaaatggattaggagctactaatggagaaaatgactatgaatcgggtctgctggaatttgatcctgttaagcatcacaatacttactgcccatgggtgaacgggaatgttgcagcggcttgctgcaacaacattggctccagctcaagtagttcagcgccctctggttggcagctaacaatagatgcagtcgacacgtaccaatcacttggtcaagcccaaaatcaaataatgcaatctgattctgcagcttcattatatatggatgaccaaataactcataaccgcaaggtagggagacggccttctgtgagcagaagctttgggaagtgctgatcggaactcctgtagctcaagtgtttcctagacagaaacagcattacagaagttccagattggtgtaacaggagaaacaaaataatgatagtctcagtagattgttatcaccccgtgggtgtgagcttatagctgttttatgttgttgcatattgatacatcatatatatgtgtatttatattccgaaagggtttattcaacagtctttcatttgacagtaacattttcaagcgaactaggtacattattatggtgagattatgtaaacttcatattcatatatttatcgccgttcttgttgcgtccatgtacctcatctaatgatatggttgtgttcagatttttcttcttctgtttctttgtatctggctgactgtttcttcgcgcggggtgctatctgagaggccatcgccctcgtcaaatctcagcagccaatgagcaccacccagagtgccaggtcgtcagcaacgaccagataaagaagtggatgagatgccacttcacttcactccacccctgcttgtattgtatcctcgtcttttcccttctctccgtctatttccaagctttctccagatcaaatcagaaaggggaagggaagaacggcccagcaatgccgctctgcagcttctacgcctccacctccgttcccgtcgtcaagccccagcagtccgtcgcctcgtccaagccccccaccacggcggtggcctccgtggcgacaactgtgccgatgcgcagtgcagcgacggtgacgccagccgtggccacaacaacgagcctagcgctgtctctgcacctgccggagctgccgtcgcaggtgaaggacaagatcctgagcctggagctgatgggcgtggactatgggcgcgcgctggagcagaacccggcgctccgcgacgcggcgccggagtccatccacgcggtggtgtcgttcctccagtcccgcgggctccagttcaaggacctgggccgcgtcttcggcatgtgcccgtccgtgctgaccgccagcgtccgcgccgacctccgccccgtgttcgccttcctctccgcggacctgggcgtgccggagtcggcgcaccggcgcgtggtgatcaagtgcccgcgcgtgctggcctgcagcgtccgcgaccagctccgccccgcgctcatctacctccgccgcctgggcttccgggacagccgcgcgctggcgctgcaggacccgatcctcctcgtctccagcgtggagcgcaccctggcgccgaagctggagtacctggccgggctcggcatgtcccgcgacgacgcggtcgccatggtgctgcgctgcccggcgctcttcaccttcagcatcgagcggaactaccggcccaagttcgagtacctggtggacgccatgggcggcggcgtcgaggacgtcaaggccttcccgcagtacttcgccttcagcctcgagaagcggatcgcgccgcgccaccgcgccgcggaggacgccggcgtcgcgctgccgcttccggacatgctcaaggccaccgacgaggagttcagggagatgctcgacaaggagcgggagctgcacgagcaggcagcgacgacggactgatcgatcggggggctagtacagcggtttgcacctgatccgactctccgaagcatccaaccgccgtcttcgtggcgatcgagtgtcctggccatgacggtagccagcacatgtagtcatttgatttgagtaattagtagcctgtacatatatgcattgacattatttgctatagtcacgattcgtagctcatgagagaatatgcctgttctttctccattccaagtgaataagcacagagctggaagtcgtgtcttgtacacacgtgtaatgaatgaatgtaccaagttcattagatattatttgctctgagctgcacgcttgcgcaacacgtcttgtctcgtgtggttgtaattaatggtgtcaaaagctatggttgaaatccaaaggacaagcaaacaaatgctaatggagcatctccagtagacaaaaaaaagtttttcaagtc

SEQ ID NO: 11373 - DNA, 5143 bp, Zea Mays
ctaaatcttgagggcctatctaattcacgtgggccttatgggcccaactcccgggggcgctcgaattgacggcgtgagatggatactaacggtgactaacggtcgatgtaacggccgcatcaatgcgccgcccggcgcgtcgcgatcgggggaatcttttccccatttcgtttcgcccaggagcgacaggcgcgggcgccacggagtgtgtgtgagagagagatagagagagagggagatgcgagaggaggtgaggagctcgtcgggggcggtggcagaaacgccgatggccgtcgcccggtcctcgtcgccgccgcacaccccggtagccagttccgtcggtgcctcgtcacctgctatgcaaactaatgttgcaagcatagattggttgggtggcaaacaagcttccagagttgactcgtcgtcgcaagttgctgcacatgcttatcacccttcccatagttttgatgcagctggcactgctatggattctgcaccatcatgcagaccatgggaacgtggagacttacttcgtcgactggcaacatttaagccttcaacttgggcttctaaaccgaaggctgctagttctttggcctgtgctcagagaggttgggtgaatgttgacatggacaaaattgaatgcgagtcatgtggcacacatctaatcttcaatgcattgacatcctggtcccctgttgaagttgcaaatgctggagaatcctttgccgagcagcttgatgcagcacaccagaatagttgtccctggagaggcaataactgtgctgacagcttggtccagcttcaccttacacaatcagctcttattggaggttttaaagaccgctgtgatgggcttttacagtttacctctcttcctgtgattgcaccatctgcaattgagaacatgaagcttacaaggagtgtacaaattgatcatctgttgtcccaatcaattacctttttatctggtattctgggctgcagagcagagagtacagcaggaattgatatccaccaagatttctcttgtagctactctcaagcacaaaagctcataagcctgtgtggatgggagcctaggtggcttccaaatgttcaagactgtgaagaaaattcaacgcattcagctaaaaatttaccctcagttggacctgacgaacggttatatccccattttgttgaacataacaaaaattcattttctgcatcagccaagaaagataaggggaaaggcaaattgcccgttggagattctggatgcagcatgaggtcaccgttgttagattgtaacctgtgtggagctacagtcaggatgcgggactttagacctgtattatgtccttctcgtttcagtccaaataacattgttgtgcctggaacaggcagaaagctaacactgacacatggagttagtgctgccagtggtatcaatgagtgggttactgatggggtggaaagaggtcaagatgaagggcgtgatgaagcagcaacaaatgagggaaaaccactatcacttgttggagtagacctaaacctaacaatggctggaggattaccgtcacctcaatctgccatgcctgctatgtcagagcggtttaataatggaggaatgggaagggatctgatgattggacagcctacaggcagtgaagtaggtgattgtgaaacctcatatgaatctcggggtccgagttcaaggaagcgtaaccttgaggaaggtgggagcacagctgacaatccacaagataggctgcagcatgctgatagcatacaaggaaatttcattgatcgtgatggtgaggaagttgatgatgctgcacaggattcagatgtcccgaataagaagtcccgtgggttcgatctgtttgatgcctatcgtccttcctctggagctggtcccagtagaaatttgtcctttggccctcatgaggatgctggtatgttcagtcactcaagagcaattgacctggcagctgttgagcgtccgactgctagggattcactgagagcatcttctgttattgcaatgcatactattcatacttccgaggaagattctatggagagtgttgagtattacccaggtgatggtaatgatatcgatatgccttcttctagtacacaaaggaacattgaaatgaatgatgccttggatcttaactatagcaaccaagcacagcaaagtgctaatgcacatgctggtgctggaagcgatgcaagagaaattggaggaagcagtacaaatgaaggggaggaggtcattaatgctgaaacagttcccccttttggaagggatcaacttagtttaggaattagtggtggtagtgttggcatgggggctagtcatgaggctgaaattcatggaaatgctggttctctgcacagaactgagagtgttgtaggtgatgctgaacctattgccgagcttactgagacaatgggtcagactggtgaatcagctccaggacctggattaatggatgaatttgtacctgaggtagaccgagatgaacctcatggagacagccaagatacggtgtcccggtcagttggccaagccgacagtggatcgaaaatatatggctataccaaagctgattctgttgaaagtggagaaaagataggtcatgccaccggtaatggaagcagcatgcgtccttctctttcttgcaacgcagggatgtgtgctggttttgatctgtctaaagatgatgtgacacatactggcaaaatactaactactgatgatgcattaatggggttagattatgatcctggaaatggattaggagctactaatggagaaaatgactatgaatcgggtctgctggaatttgatcctgttaagcatcacaatacttactgcccatgggtgaacgggaatgttgcagcggcttgctgcaacaacattggctccagctcaagtagttcagcgccctctggttggcagctaacaatagatgcagtcgacacgtaccaatcacttggtcaagcccaaaatcaaataatgcaatctgattctgcagcttcattatatatggatgaccaaataactcataaccgcaaggtagggagacggccttctgtgagcagaagctttgggaagtgctgatcggaactcctgtagctcaagtgtttcctagacagaaacagcattacagaagttccagattggtgtaacaggagaaacaaaataatgatagtctcagtagattgttatcaccccgtgggtgtgagcttatagctgttttatgttgttgcatattgatacatcatatatatgtgtatttatattccgaaagggtttattcaacagtctttcatttgacagtaacattttcaagcgaactaggtacattattatggtgagattatgtaaacttcatattcatatatttatcgccgttcttgttgcgtccatgtacctcatctaatgatatggttgtgttcagatttttcttcttctgtttctttgtatctggctgactgtttcttcgcgcggggtgctatctgagaggccatcgccctcgtcaaatctcagcagccaatgagcaccacccagagtgccaggtcgtcagcaacgaccagataaagaagtggatgagatgccacttcacttcactccacccctgcttgtattgtatcctcgtcttttcccttctctccgtctatttccaagctttctccagatcaaatcagaaaggggaagggaagaacggcccagcaatgccgctctgcagcttctacgcctccacctccgttcccgtcgtcaagccccagcagtccgtcgcctcgtccaagccccccaccacggcggtggcctccgtggcgacaactgtgccgatgcgcagtgcagcgacggtgacgccagccgtggccacaacaacgagcctagcgctgtctctgcacctgccggagctgccgtcgcaggtgaaggacaagatcctgagcctggagctgatgggcgtggactatgggcgcgcgctggagcagaacccggcgctccgcgacgcggcgccggagtccatccacgcggtggtgtcgttcctccagtcccgcgggctccagttcaaggacctgggccgcgtcttcggcatgtgcccgtccgtgctgaccgccagcgtccgcgccgacctccgccccgtgttcgccttcctctccgcggacctgggcgtgccggagtcggcgcaccggcgcgtggtgatcaagtgcccgcgcgtgctggcctgcagcgtccgcgaccagctccgccccgcgctcatctacctccgccgcctgggcttccgggacagccgcgcgctggcgctgcaggacccgatcctcctcgtctccagcgtggagcgcaccctggcgccgaagctggagtacctggccgggctcggcatgtcccgcgacgacgcggtcgccatggtgctgcgctgcccggcgctcttcaccttcagcatcgagcggaactaccggcccaagttcgagtacctggtggacgccatgggcggcggcgtcgaggacgtcaaggccttcccgcagtacttcgccttcagcctcgagaagcggatcgcgccgcgccaccgcgccgcggaggacgccggcgtcgcgctgccgcttccggacatgctcaaggccaccgacgaggagttcagggagatgctcgacaaggagcgggagctgcacgagcaggcagcgacgacggactgatcgatcggggggctagtacagcggtttgcacctgatccgactctccgaagcatccaaccgccgtcttcgtggcgatcgagtgtcctggccatgacggtagccagcacatgtagtcatttgatttgagtaattagtagcctgtacatatatgcattgacattatttgctatagtcacgattcgtagctcatgagagaatatgcctgttctttctccattccaagtgaataagcacagagctggaagtcgtgtcttgtacacacgtgtaatgaatgaatgtaccaagttcattagatattatttgctctgagctgcacgcttgcgcaacacgtcttgtctcgtgtggttgtaattaatggtgtcaaaagctatggttgaaatccaaaggacaagcaaacaaatgctaatggagcatctccagtagacaaaaaaaagtttttcaagtc

SEQ ID NO: 11374 - DNA, 2571 bp, Zea Mays
cttcggttttcctgcaggttgacaaacaaagacgattaagaatccggtaaccggtataaatgttagtttggatacactatagcgattccatcatgctagtttggatgaaccttctacttattaattccagaaaaacgtaataataccatgtgatcccagcgtacataattacatacaaccctaacaaactagtctccaaacgggtaaacaagataacaaacaaaacaatagcttctcgtagttaggaagcaggggcgaatttagctaggtttgtcggcgtcagccggccccgataaaatttataaatcttttatcaatatactgttaaagctcaagaaattttatattatatagcaaaactaacgctgctgaccccgacaatattctcggctagatttgccactcttagaaagtataacaacaaacgctctagattgggtacagaataatggcactctagattgttacagtatctgatggaaagcaacgttcaatcaataagcctggaagtgtctagctcactgagtttggaactctggatagctcagtgcaagcaaagcaccagaaatggtggcatatcctacctcaagaaataaagaccgaatcttgacgaccacaacctaataataccaagatttgacagatcccgacaccacagaatatatagagatgaacaatgtttttcatggataatgggaaaacaaagctggatatttattagtggtctataggggggggggggggggggtactctctctcaactgttgagtacacaagcattttgttgatgtcaaggctctctcagtcatgttttactagcaacactgtacatttttccttgtgataggagtataggacacacagtaaaaactgatgaaagatcatacagaagtacagttcagtgcaaaccatagagggtcctactgccatagtcatgtattaccaagtaaaaccatacttgagccaacacccaatcaaagctgaatcgagtatggcggagcttccgcttacaggtgctatgcattttttttttgcgcttttatctctggtgtaattatgtaatctttttatactctagcggcggtgcctcttggctactacttgactctattctttattaatagaaacatgcacattcccgtgccgtttgttataaaaaaaacacccaatcgaagccctactatgcagtatgcacttgtgcagtaggcggccaagcatggcgtgcatgaacggatcatcaagtagattcatggggtcatgggaagtaataagttcagtggaacaacttatggtttgtaactctataattagggttttagccgattgcatttgttttgaaattccttggcatctaagctaaagtttgtacgagcactcagaattttatagtatcacatttcagcgagctttagctgagggtccatataccagcgcaagtagaaacgcatgttctatcagtctatcacaaacctaagatctcagatcacctacatcaattttccttgttaatatgaactatggtactgttgagtaccatttatggcagtggacacaaccggacagtctggccctgaggctcgggtggttcggctcacggacggtgcgtccataggcacggacagtccacgaataaatcgaatcaggcggttaaaactcctatctccttacgtgtttagctctctaatcccgcgggagctattggagaacgcctagcaatgggtctagacctcccacttacatatttgaagggatacgaccgattgaaggaccaacaatcaaattattttatgttctttaccttttgccttaggagtaggcagtaacttagatttctctctctaatcttcatctatcttcggctctacgtcgtttagagacgtcttaggtggtctgccgattccaagacaaactctaggatcttttctccttcgagatccctcccgagagcgagatccaggtgctgtcggtaaactccgccgcccgtacactccgtcgcccatacgcacgcgcggaccgtccagctcatcaggaaggaaccctagcctctgcgccagatcacggaccgtccgctccccggctatgaaccgtccacgcttgcgcagagaagtgcctcgctcggcgtcaacaggtacaaatcagattaagatctgttgcgtactaagcctttcatgcatgcaaaggtagtgttcgatcccttttcagcaatgctacgtagctacagcacacaacaaagcaatttaatacaataaaatgcaatgcatgccaaacagaagccatgtgatcatgcaaaatcctctccaatgaagagcaaatgacgcctgaagtactgacacccgtcaggtcaactggaacacaacaagacagtttgacgttatgggcacgaccgcacgaggctacctcgagcgccacgaagaaggtaatcatgccgaaatgacaatttgagtacattacgggcgacaaagataaaaagttgagagagtatcatcttactattgaagaatatgcaatcagctcctgcccttctccttcatgccggagtgccggagtccgtcccagagctgtaacgccgcc

SEQ ID NO: 11375 - DNA, 1334 bp, Zea Mays
atccatggctatacccgtactagtttctccttgccagcagcccagcagccgcctcctctcgtagcagtgctcctagtgtactcatcgctactgcttgcaaatacagtactgcttaaaaaaagcacagcagcagtacctgaacctcccaaaaaaatcatgcgccgctgtgctgttggtctccgcctggctagttttccatatatagaaaaaccgcagctctagacgaccaccagatcggactaggtagaccacacttcccttcacctctcatcggcgctctttcccttcctcgcagtcccaggtctcggctcccctctcagtcaagccgtttcatttcctccctcctacaaatatcctgatatggacgacgacgacgactccccgccgccaccgcctcgccggccagcaccaccaccactctcaccacctcatacgccggcgcccccgacggcggcaccagcaccaacgacgacgacgacgctgacgacgccggggagctcgacctcaacctcagcctctagcactgcttgtatctacatctacctacgcgccaaggttattaatcgtgtgccggcctatccgtaagctacgcgtgtcacttaattagctcttagtaggcacgttaatccctctctctctatctctgctccctccctctgtatgtcctgttattattagtacgtctcgtcatctcccgtcccttctcccatggcctcatgaattgtttttttttggctcttgtttttcttgaggatttgtctgattgcgccccatcatcatccttgctggggcatccggttgtttgttgggggttcgccattgcctcgcgtgtatcgggggagtgaccgctgctgcctgatggtccggcgcgcggcagcaatcagcccgcaccagtggcaagcgcaatgcccgcccgcgcccagacccacgccacacccacggcgttgctgttgagctccttcctgcgtgctcgccatctaccgctgtgctgtgctgtacctgtaccacctgccgtcgtgacgtacgtacgccgtccggcgaccggcacgggcggggcggggcggggcggagctggcatgtcgtcgctgtgcatgctggcccgacggggggcacgcacggccaatcaatttactgatgctattggggtgcagatggccatatattttttgttcggtccgcgtcccatcttgctgggatcatgttttaaaaagcaagtggacgtgcaacagaatcccttctcgactcaacgtgttttttttattggatactatctatttattactatttttacctgaactactgtactacttgtttgtcgtatagtaaaacagcag

SEQ ID NO: 11376 - DNA, 1136 bp, Zea Mays
caaaattctgttttgatctgttagatgatgtatacatgcccatgtgatattggagttacatatggctaatataaaaaagacacctgaaccttaggatgggggttgcaacttctttgagtggtgcgatgctccatctcccgcccctgccaatgcacgaaataacatggttgtacactcagagacatcagcaacagatatgctttgcccatgcagtgctggaacttgcttaattctcaccacaaagacagggaaaaatgttgggaggcaattcttttgctgcccattaaatcagggtggtggtggtggctcttgtggctttttcaagtggtgtgacgagctacagcctagggttggtgcaccactgcaagcttcagcgcaataccaagcggattccatgccaagcatccaaaaccccagccagaggagctcgtcttcctgcttcaagtgcgggcaggagaaccactgggctcgagactgtccgaatcaaccgtcggatccttatcctgacaagggtgggagaccagtagctccagcgggctcacctggtgcgtgctacaactgtggtcggtccggccactggtcccgcgactgcccaacctcgaatagtggtggtggtggtaccggcaccagccgtgccaggtcgtcctcagccttgagctcgtggaatagtcagagatactgataggagggtcctgtgaactcaattgaactgacatggacatgctgtacgaaacttggacaattgcccccctccacgtgttgcttaggtatgtgctcacgtcgatgccttttgctgctctacgctatctctctatatgtaagagagaactgttgctgttctctgtcttcaccctcaccctgttttatgctcctatctctgtcgaacttgggtctactgtttttttatctactctaggatttttcacatataaaatattgtatgtgtgggtctaaggagaaccatatcgtccaagcatttctttccatgaacttccatgcttatatagttctgttcagttcagttctgttcagttattgtctccttttgaagacttggttttagatattaactaatgatgatatgaagtagtcatttctaaactttatttattgtaccctggactttgtgaggtggg

SEQ ID NO: 11377 - DNA, 2892 bp, Zea Mays
cctgagtataggctgagttccctttccctccgaggctccgacgctgctctggccccgtctctctcgtcttcctggctctccccgcgcaccaaaccctccccaaaacccaaacgcttctcgccctcccgtcctgttctcgaccatgtcggtgtccgacggggacgacgacgaggccttcctcatcgccctcgacgccgcggaggccgccgcgctggactcctccaagcgccgccgcctctccaccacctcgtcctcaccgaccccctcaacctcacccgccgccaccgaggggccctacctggccgcgctcaagggaagccacagctccacctggaagcagcagctgcaagaccttggctatgcccacaagcggcccgacggctctaaatccttagccccgggtacgggcgcgagcggatcgtgcttcaagtgcggggaccccgggcactgggcacgggagtgccctcaatccgtgccgaacacggggggaggaggtcagatcggcggtggcggtggcggtggcggcggtggcggcggcggatatgtaaatgcgggcgtagaggtggaggacaaggcgtgcccctgcggtgtcgggagctgcctcgtgctcacgtccaacacgccgaagaaccccggtcgcaagttctacaagtgccccatgcgggatgggggttgcaacttctttgagtggtgcgatgctccatctcccgcccctgccaatgcacgaaataacatggttgtacactcagagacatcagcaacagatatgctttgcccatgcagtgctggaacttgcttaattctcaccacaaagacagggaaaaatgttgggaggcaattcttttgctgcccattaaatcaggtaaactcaggattcaccaatgttacctgaattcatgacattttgccgtaccatatagcggcctatactggtttgtttttctggaagaacttggcccctttttatctgacacaacttgtttaattataacattgaacatctgcaaccctactccttcctgaatttgagtaatcaacatttgtgggattttgaacttgttaataataacattgaacatctgcaaccatcctccttcctgaatttgagttatcaactaattgtgagatttttattgcaggatgccaccgatatcaattgtatagatagaagttgccgtagtgatttggattgtaggcgggaatttgaactgtttatcttgcagctgtgactcattagttggatctcatgtgttactttaatagataacagaagatgcagacagtatgatagttactgttgcagaatgcatttatcgattagctttcagtaggcaacatcagagatttggattttcaaaacactaacccatgactcatttgtctccccctcttgctcttatgtcaaacaactggtttacttttgggctattctttaatctagacatcagcataattattcttgttgtggtaaaatggcctgcttatacagttaaacttacacatgccatttcctgttggctgcctggtatagtagtgcatttcaagtcttggtcttgttagtggtaatgaaagatatatccttgtcctaaattgtttgtgtttaaactacatggtaatattgtgaagaataacattgttttcttgtcacgcttaaagcagccatgttgttagaccaggactagggatcctaacaatttaatctactgccatgtttggttttcatactaaaaatgtccagttgcactaataaaatgctacccgttcctttttttatatatagaaaaaggtaaatcagtgattcaatcctagttcctggtcctagatattgttccttctcttagtggagcacttagttacatctgtatcttcacgtacagcaactgatgctaggataccattattattatattttttattttaactcatgtgatattccacattccttttcatctttttcctctattagttttataatgcaccctcttatttttttctaacttgggcctttcatgtctatttctggtgcacgacggggacaaatcacccagggtggtggtggtggctcttgtggctttttcaagtggtgtgacgagctacagcctagggttggtgcaccactgcaagcttcagcgcaataccaagcggattccatgccaagcatccaaaaccccagccagaggagctcgtcttcctgcttcaagtgcgggcaggagaaccactgggctcgagactgtccgaatcaaccgtcggatccttatcctgacaagggtgggagaccagtagctccagcgggctcacctggtgcgtgctacaactgtggtcggtccggccactggtcccgcgactgcccaacctcgaatagtggtggtggtggtaccggcaccagccgtgccaggtcgtcctcagccttgagctcgtggaatagtcagagatactgataggagggtcctgtgaactcaattgaactgacatggacatgctgtacgaaacttggacaattgcccccctccacgtgttgcttaggtatgtgctcacgtcgatgccttttgctgctctacgctatctctctatatgtaagagagaactgttgctgttctctgtcttcaccctcaccctgttttatgctcctatctctgtcgaacttgggtctactgtttttttatctactctaggatttttcacatataaaatattgtatgtgtgggtctaaggagaaccatatcgtccaagcatttctttccatgaacttccatgcttatatagttctgttcagttcagttctgttcagttattgtctccttttgaagacttggttttagatattaactaatgatgatatgaagtagtcatttctaaactttatttattgtaccctggactttgtgaggtggg

SEQ ID NO: 11378 - DNA, 753 bp, Zea Mays
aggagtcgtcgtaagaataaattgttataatcttcttaacataataattatgacgataatgcatgacaatacccttatgtcacaaacatataatgtattttaaagaaaatatatattattgttcgtattaggtaactccaacgatgcatcaaattggtccctcaaattgaaatataggctccgcatagcaaaaattactccacctttgtctttgaccatgggctgaggcatggtcaaaaataattctaacctcttctcatttctatgtgtggcccattagccaataaaaatctgtctatagaagtaaaacttccagcacatgctcgtgttgcgccgcccgccgccgccctcacaaaatcgtccgcccgcgtccccatacctcgacagcaaggctcctccccgtcggtctctgcgcatcccctgtctcctccatgggcgatctggctccccacgagtcctgcacagattcaggctgtccgcagcggttctccctaaatttttccctctatacgttactatgcagtcacgtcagtaagattctctcccctatattcaatcttcccgcaatcatttcctctatatattctcctatatatctccccacacataaaatatatatatcaatccaactaccatcaactaccatctttttttaatttttattttcttaacgtacaaatccattgaataattgatttaatttttcaattagacatataatctccataaattattgaggggcacataatgtgt

SEQ ID NO: 11379 - DNA, 297 bp, Zea Mays
cccttctactacattacatttaactaactatactactagcttctactacattacttcgctaatactatttctactactaatctacactaacatataaaactagtggcgtctagccactggccttgttgctgcccttgctgctgcccttgctgccgccactgccgtcgccgccgccacccttgccgctgtcaccgccgccgtcaccgtcgcctccgtcgtcgtcgccgtcgccgccgccaccctcctcggacgagtcggaggaattctcctcgtccgaggagtactccgactcatccg

SEQ ID NO: 11380 - DNA, 2029 bp, Zea Mays
cgccgcgccgcgacacaccacgcaggaggcagcgagcgcaataatgcgcacgcagaggagcacagcggcgtcactgctgcggcagtaatggccgcctggttccacttccaccacggtgtgcactagcgctacaccgaggccaccttttcttggttccttcaacacgcctactccggcctccggatcgggcaccacgtctgccccctgctcccggaatctttgccaagcggcgccgctactgtccggcaaggcgaccccgtctctcggccggcgttgatctgtttgcgtctttatgttactgtggttgaggcgggcggagtggcggcgcgatgggcatctcggcgaggtggctcaagtcgttagttgggttgaggaaggtggggcggcagcagcagcagcggcgaaaggatgatgcagatgttggtcgaatggcaaggagagcccgccgagctttaaaagggttggttaggcttcaagcccttgtaagaggtcatatagtaagaaagcgagcagctacgacactccgttgtatgcaagctttggtcagggttcaggcccgtgttagagcaaggcgagttcgcatggctttggaaaaccagactgatcggcaaaatacttcaccagagcacacgatcgaggcacgtgtcagagaaatcgaggatggctggtgtgatagtatcggttctgtgggagatatccaagcaaaacttctaaagaggcaggaagcggcagctaaacgtgagcgagccatggcctatgctctagctcatcagtggcaggcaagttcaagacaacctacagcatttgaacctgacaagaacagctggggctggaattggctagagagatggatggctgttcggccttgggagagtcggttccttggcacttacgggacagatgggatttttgtagttaatgaaaccagacaacctgacagaagtgcaaccaagaccccatacagaaaacctgttaaaaagcatgattcaacccttcaatcaaacatgttgaaccagaaggtcttcccatcaaactcagagggtggtggctcctcgacaaatcgatcaagtggtttggtatcaactaaatctagactgaaggttttacccagagaaggttctgaggaagcctcatctcatccttcagtaattgtgcggtccactagtaatccgaaggagaggatttccagtattaattcaaaggagaggactggggacttggattttcaagttcataaaagatcctccttgcctggcattggtccagaagctggcaaacacctgacaaagaaaggcatggttaaccgatccctgaaggccacaaaagattcccaaatactggggtcaaggcatcatcttgccagttccattgatccagttcccaccagagttgaactggagacttgagaaggcatgttatgctcgaacatcgccatggattgcacctagcagcttggatgccgttcatgcctcaatggctgcatgaatgtgtcgcaacatctatgttatactggtggtggcggttttcgagtttcgacaccatatatgtaggctcatttcatgagataaaatcagatgcatgtgagcatgtccatatatgttaagaggattaccattggttttattgttgtatttgtaagttgccgttaggaggtgtaaatttgtgtcgtcgagtggtacttattatgtgttgtcgtatagttgtgactcgaaggttaaaggtggttttggttctactgcgaagtgtgaactgtagtgagctgtgttctgtaaaaaaataaagttgttgtgatttgtctactgtaaaaaaaatggaagtaacttggttcaagctgccgtgaaaatgtagattttatatgattttttttttttttttgcaatgctcctgagagtctgatagattttttatatgcaaaacgatactaacacaacattttttgagatgactaacgtaatttccattgctataatattccatacatacagataattaaaatatatagacgttcatagttcatctcaaagtttgc

SEQ ID NO: 11381 - DNA, 2373 bp, Zea Mays
cgccgcgccgcgacacaccacgcaggaggcagcgagcgcaataatgcgcacgcagaggagcacagcggcgtcactgctgcggcagtaatggccgcctggttccacttccaccacggtgtgcactagcgctacaccgaggccaccttttcttggttccttcaacacgcctactccggcctccggatcgggcaccacgtctgccccctgctcccggaatctttgccaagcggcgccgctactgtccggcaaggcgaccccgtctctcggccggcgttgatctggcgggcggagtggcggcgcgatgggcatctcggcgaggtggctcaagtcgttagttgggttgaggaaggtggggcggcagcagcagcagcggcgaaaggatgatgcagatgttggtcgaatgattcagcactctcaagatgacaatagcattgctgcacaagaaattccagaggtttcttatggaaatgatccacctgaagatgattctaatgtaccttcatgcttcgagcctgctcgtagttcagctcatatgccattttgtcaaactgaagaagcccagaaagagatctgggctgctacaattattcagacagcatttagagctttcctgcctcttttttaatgtggaagcatcgcaatgcctgtgtcttcgagggggcctcgccttgcgatcacaacatcctcacgtgcatcaaggaggatgtggggttgtggtgcttagctggggcctcaaggcttagaaggatttggccttaatctgtcagtgggtcaggcaaggagagcccgccgagctttaaaagggttggttaggcttcaagcccttgtaagaggtcatatagtaagaaagcgagcagctacgacactccgttgtatgcaagctttggtcagggttcaggcccgtgttagagcaaggcgagttcgcatggctttggaaaaccagactgatcggcaaaatacttcaccagagcacacgatcgaggcacgtgtcagagaaatcgaggatggctggtgtgatagtatcggttctgtgggagatatccaagcaaaacttctaaagaggcaggaagcggcagctaaacgtgagcgagccatggcctatgctctagctcatcagtggcaggcaagttcaagacaacctacagcatttgaacctgacaagaacagctggggctggaattggctagagagatggatggctgttcggccttgggagagtcggttccttggcacttacgggacagatgggatttttgtagttaatgaaaccagacaacctgacagaagtgcaaccaagaccccatacagaaaacctgttaaaaagcatgattcaacccttcaatcaaacatgttgaaccagaaggtcttcccatcaaactcagagggtggtggctcctcgacaaatcgatcaagtggtttggtatcaactaaatctagactgaaggttttacccagagaaggttctgaggaagcctcatctcatccttcagtaattgtgcggtccactagtaatccgaaggagaggatttccagtattaattcaaaggagaggactggggacttggattttcaagttcataaaagatcctccttgcctggcattggtccagaagctggcaaacacctgacaaagaaaggcatggttaaccgatccctgaaggccacaaaagattcccaaatactggggtcaaggcatcatcttgccagttccattgatccagttcccaccagagttgaactggagacttgagaaggcatgttatgctcgaacatcgccatggattgcacctagcagcttggatgccgttcatgcctcaatggctgcatgaatgtgtcgcaacatctatgttatactggtggtggcggttttcgagtttcgacaccatatatgtaggctcatttcatgagataaaatcagatgcatgtgagcatgtccatatatgttaagaggattaccattggttttattgttgtatttgtaagttgccgttaggaggtgtaaatttgtgtcgtcgagtggtacttattatgtgttgtcgtatagttgtgactcgaaggttaaaggtggttttggttctactgcgaagtgtgaactgtagtgagctgtgttctgtaaaaaaataaagttgttgtgatttgtctactgtaaaaaaaatggaagtaacttggttcaagctgccgtgaaaatgtagattttatatgattttttttttttttttgcaatgctcctgagagtctgatagattttttatatgcaaaacgatactaacacaacattttttgagatgactaacgtaatttccattgctataatattccatacatacagataattaaaatatatagacgttcatagttcatctcaaagtttgc

SEQ ID NO: 11382 - DNA, 1895 bp, Zea Mays
gttgcaagtgttgccacgccgcgccgcgacacaccacgcaggaggcagcgagcgcaataatgcgcacgcagaggagcacagcggcgtcactgctgcggcagtaatggccgcctggttccacttccaccacggtgtgcactagcgctacaccgaggccaccttttcttggttccttcaacacgcctactccggcctccggatcgggcaccacgtctgccccctgctcccggaatctttgccaagcggcgccgctactgtccggcaaggcgaccccgtctctcggccggcgttgatctggcaaggagagcccgccgagctttaaaagggttggttaggcttcaagcccttgtaagaggtcatatagtaagaaagcgagcagctacgacactccgttgtatgcaagctttggtcagggttcaggcccgtgttagagcaaggcgagttcgcatggctttggaaaaccagactgatcggcaaaatacttcaccagagcacacgatcgaggcacgtgtcagagaaatcgaggatggctggtgtgatagtatcggttctgtgggagatatccaagcaaaacttctaaagaggcaggaagcggcagctaaacgtgagcgagccatggcctatgctctagctcatcagtggcaggcaagttcaagacaacctacagcatttgaacctgacaagaacagctggggctggaattggctagagagatggatggctgttcggccttgggagagtcggttccttggcacttacgggacagatgggatttttgtagttaatgaaaccagacaacctgacagaagtgcaaccaagaccccatacagaaaacctgttaaaaagcatgattcaacccttcaatcaaacatgttgaaccagaaggtcttcccatcaaactcagagggtggtggctcctcgacaaatcgatcaagtggtttggtatcaactaaatctagactgaaggttttacccagagaaggttctgaggaagcctcatctcatccttcagtaattgtgcggtccactagtaatccgaaggagaggatttccagtattaattcaaaggagaggactggggacttggattttcaagttcataaaagatcctccttgcctggcattggtccagaagctggcaaacacctgacaaagaaaggcatggttaaccgatccctgaaggccacaaaagattcccaaatactggggtcaaggcatcatcttgccagttccattgatccagttcccaccagagttgaactggagacttgagaaggcatgttatgctcgaacatcgccatggattgcacctagcagcttggatgccgttcatgcctcaatggctgcatgaatgtgtcgcaacatctatgttatactggtggtggcggttttcgagtttcgacaccatatatgtaggctcatttcatgagataaaatcagatgcatgtgagcatgtccatatatgttaagaggattaccattggttttattgttgtatttgtaagttgccgttaggaggtgtaaatttgtgtcgtcgagtggtacttattatgtgttgtcgtatagttgtgactcgaaggttaaaggtggttttggttctactgcgaagtgtgaactgtagtgagctgtgttctgtaaaaaaataaagttgttgtgatttgtctactgtaaaaaaaatggaagtaacttggttcaagctgccgtgaaaatgtagattttatatgattttttttttttttttgcaatgctcctgagagtctgatagattttttatatgcaaaacgatactaacacaacattttttgagatgactaacgtaatttccattgctataatattccatacatacagataattaaaatatatagacgttcatagttcatctcaaagtttgc

SEQ ID NO: 11383 - DNA, 2313 bp, Zea Mays
gtcctttctcgttcccttccgtgcagttgcaagtgttgccacgccgcgccgcgacacaccacgcaggaggcagcgagcgcaataatgcgcacgcagaggagcacagcggcgtcactgctgcggcagtaatggccgcctggttccacttccaccacggtgtgcactagcgctacaccgaggccaccttttcttggttccttcaacacgcctactccggcctccggatcgggcaccacgtctgccccctgctcccggaatctttgccaagcggcgccgctactgtccggcaaggcgaccccgtctctcggccggcgttgatctgtttgcgtctttatgttactgtggttgaggcgggcggagtggcggcgcgatgggcatctcggcgaggtggctcaagtcgttagttgggttgaggaaggtggggcggcagcagcagcagcggcgaaaggatgatgcagatgttggtcgaatgaaaaccgatgtcgccgaccagtttcattttcagattcagcactctcaagatgacaatagcattgctgcacaagaaattccagaggtttcttatggaaatgatccacctgaagatgattctaatgtaccttcatgcttcgagcctgctcgtagttcagctcatatgccattttgtcaaactgaagaagcccagaaagagatctgggctgctacaattattcagacagcatttagagctttcctggcaaggagagcccgccgagctttaaaagggttggttaggcttcaagcccttgtaagaggtcatatagtaagaaagcgagcagctacgacactccgttgtatgcaagctttggtcagggttcaggcccgtgttagagcaaggcgagttcgcatggctttggaaaaccagactgatcggcaaaatacttcaccagagcacacgatcgaggcacgtgtcagagaaatcgaggatggctggtgtgatagtatcggttctgtgggagatatccaagcaaaacttctaaagaggcaggaagcggcagctaaacgtgagcgagccatggcctatgctctagctcatcagtggcaggcaagttcaagacaacctacagcatttgaacctgacaagaacagctggggctggaattggctagagagatggatggctgttcggccttgggagagtcggttccttggcacttacgggacagatgggatttttgtagttaatgaaaccagacaacctgacagaagtgcaaccaagaccccatacagaaaacctgttaaaaagcatgattcaacccttcaatcaaacatgttgaaccagaaggtcttcccatcaaactcagagggtggtggctcctcgacaaatcgatcaagtggtttggtatcaactaaatctagactgaaggttttacccagagaaggttctgaggaagcctcatctcatccttcagtaattgtgcggtccactagtaatccgaaggagaggatttccagtattaattcaaaggagaggactggggacttggattttcaagttcataaaagatcctccttgcctggcattggtccagaagctggcaaacacctgacaaagaaaggcatggttaaccgatccctgaaggccacaaaagattcccaaatactggggtcaaggcatcatcttgccagttccattgatccagttcccaccagagttgaactggagacttgagaaggcatgttatgctcgaacatcgccatggattgcacctagcagcttggatgccgttcatgcctcaatggctgcatgaatgtgtcgcaacatctatgttatactggtggtggcggttttcgagtttcgacaccatatatgtaggctcatttcatgagataaaatcagatgcatgtgagcatgtccatatatgttaagaggattaccattggttttattgttgtatttgtaagttgccgttaggaggtgtaaatttgtgtcgtcgagtggtacttattatgtgttgtcgtatagttgtgactcgaaggttaaaggtggttttggttctactgcgaagtgtgaactgtagtgagctgtgttctgtaaaaaaataaagttgttgtgatttgtctactgtaaaaaaaatggaagtaacttggttcaagctgccgtgaaaatgtagattttatatgattttttttttttttttgcaatgctcctgagagtctgatagattttttatatgcaaaacgatactaacacaacattttttgagatgactaacgtaatttccattgctataatattccatacatacagataattaaaatatatagacgttcatagttcatctcaaagtttgc

SEQ ID NO: 11384 - DNA, 2086 bp, Zea Mays
ctccgacatgcggtgcagaaagtgaaaacgcgagaaaagcgcccgtcctttctcgttcccttccgtgcagttgcaagtgttgccacgccgcgccgcgacacaccacgcaggaggcagcgagcgcaataatgcgcacgcagaggagcacagcggcgtcactgctgcggcagtaatggccgcctggttccacttccaccacggtgtgcactagcgctacaccgaggccaccttttcttggttccttcaacacgcctactccggcctccggatcgggcaccacgtctgccccctgctcccggaatctttgccaagcggcgccgctactgtccggcaaggcgaccccgtctctcggccggcgttgatctggcgggcggagtggcggcgcgatgggcatctcggcgaggtggctcaagtcgttagttgggttgaggaaggtggggcggcagcagcagcagcggcgaaaggatgatgcagatgttggtcgaatggcaaggagagcccgccgagctttaaaagggttggttaggcttcaagcccttgtaagaggtcatatagtaagaaagcgagcagctacgacactccgttgtatgcaagctttggtcagggttcaggcccgtgttagagcaaggcgagttcgcatggctttggaaaaccagactgatcggcaaaatacttcaccagagcacacgatcgaggcacgtgtcagagaaatcgaggatggctggtgtgatagtatcggttctgtgggagatatccaagcaaaacttctaaagaggcaggaagcggcagctaaacgtgagcgagccatggcctatgctctagctcatcagtggcaggcaagttcaagacaacctacagcatttgaacctgacaagaacagctggggctggaattggctagagagatggatggctgttcggccttgggagagtcggttccttggcacttacgggacagatgggatttttgtagttaatgaaaccagacaacctgacagaagtgcaaccaagaccccatacagaaaacctgttaaaaagcatgattcaacccttcaatcaaacatgttgaaccagaaggtcttcccatcaaactcagagggtggtggctcctcgacaaatcgatcaagtggtttggtatcaactaaatctagactgaaggttttacccagagaaggttctgaggaagcctcatctcatccttcagtaattgtgcggtccactagtaatccgaaggagaggatttccagtattaattcaaaggagaggactggggacttggattttcaagttcataaaagatcctccttgcctggcattggtccagaagctggcaaacacctgacaaagaaaggcatggttaaccgatccctgaaggccacaaaagattcccaaatactggggtcaaggcatcatcttgccagttccattgatccagttcccaccagagttgaactggagacttgagaaggcatgttatgctcgaacatcgccatggattgcacctagcagcttggatgccgttcatgcctcaatggctgcatgaatgtgtcgcaacatctatgttatactggtggtggcggttttcgagtttcgacaccatatatgtaggctcatttcatgagataaaatcagatgcatgtgagcatgtccatatatgttaagaggattaccattggttttattgttgtatttgtaagttgccgttaggaggtgtaaatttgtgtcgtcgagtggtacttattatgtgttgtcgtatagttgtgactcgaaggttaaaggtggttttggttctactgcgaagtgtgaactgtagtgagctgtgttctgtaaaaaaataaagttgttgtgatttgtctactgtaaaaaaaatggaagtaacttggttcaagctgccgtgaaaatgtagattttatatgattttttttttttttttgcaatgctcctgagagtctgatagattttttatatgcaaaacgatactaacacaacattttttgagatgactaacgtaatttccattgctataatattccatacatacagataattaaaatatatagacgttcatagttcatctcaaagtttgc

SEQ ID NO: 11385 - DNA, 2943 bp, Zea Mays
ctccgacatgcggtgcagaaagtgaaaacgcgagaaaagcgcccgtcctttctcgttcccttccgtgcagttgcaagtgttgccacgccgcgccgcgacacaccacgcaggaggcagcgagcgcaataatgcgcacgcagaggagcacagcggcgtcactgctgcggcagtaatggccgcctggttccacttccaccacggtgtgcactagcgctacaccgaggccaccttttcttggttccttcaacacgcctactccggcctccggatcgggcaccacgtctgccccctgctcccggaatctttgccaagcggcgccgctactgtccggcaaggcgaccccgtctctcggccggcgttgatctggcgggcggagtggcggcgcgatgggcatctcggcgaggtggctcaagtcgttagttgggttgaggaaggtggggcggcagcagcagcagcggcgaaaggatgatgcagatgttggtcgaatgaaaaccgatgtcgccgaccagtttcattttcagattcagcactctcaagatgacaatagcattgctgcacaagaaattccagaggtttcttatggaaatgatccacctgaagatgattctaatgtaccttcatgcttcgagcctgctcgtagttcagctcatatgccattttgtcaaactgaagaagcccagaaagagatctgggctgctacaattattcagacagcatttagagctttcctgcctcttttttaatgtggaagcatcgcaatgcctgtgtcttcgagggggcctcgccttgcgatcacaacatcctcacgtgcatcaaggaggatgtggggttgtggtgcttagctggggcctcaaggcttagaaggatttggccttaatctgtcagtgggtcaggttttgtttgatgtcttgtaattgtggtttataaccttttgccccttaaagggggtttgtactgacctattttggattccatttcttaatataatgatgtgcagctctcctgcgcgtccgagaaaaaaatagcctcttttttaattaaaactcagttctgtttgtagctaatgccaatgcaattttgatttcctagtgtaaaagtagatcagctaatttatgttctatacctctatgtccattcttgtgggtacccagtgctcctgtagtgatgcttgaaattgtttgttcacaatctgattgtacattaccctttgcaactgcagaagttggcaaaacaagttttctctaccaagaaaaaaatgtagaaaatgtggaaagaaaacgaatataccatcattctcacttaatgctttaattccttatagttcccacttgggtttcttcttcaggcaaggagagcccgccgagctttaaaagggttggttaggcttcaagcccttgtaagaggtcatatagtaagaaagcgagcagctacgacactccgttgtatgcaagctttggtcagggttcaggcccgtgttagagcaaggcgagttcgcatggctttggaaaaccagactgatcggcaaaatacttcaccagagcacacgatcgaggcacgtgtcagagaaatcgaggatggctggtgtgatagtatcggttctgtgggagatatccaagcaaaacttctaaagaggcaggaagcggcagctaaacgtgagcgagccatggcctatgctctagctcatcagtggcaggcaagttcaagacaacctacagcatttgaacctgacaagaacagctggggctggaattggctagagagatggatggctgttcggccttgggagagtcggttccttggcacttacgggacagatgggatttttgtagttaatgaaaccagacaacctgacagaagtgcaaccaagaccccatacagaaaacctgttaaaaagcatgattcaacccttcaatcaaacatgttgaaccagaaggtcttcccatcaaactcagagggtggtggctcctcgacaaatcgatcaagtggtttggtatcaactaaatctagactgaaggttttacccagagaaggttctgaggaagcctcatctcatccttcagtaattgtgcggtccactagtaatccgaaggagaggatttccagtattaattcaaaggagaggactggggacttggattttcaagttcataaaagatcctccttgcctggcattggtccagaagctggcaaacacctgacaaagaaaggcatggttaaccgatccctgaaggccacaaaagattcccaaatactggggtcaaggcatcatcttgccagttccattgatccagttcccaccagagttgaactggagacttgagaaggcatgttatgctcgaacatcgccatggattgcacctagcagcttggatgccgttcatgcctcaatggctgcatgaatgtgtcgcaacatctatgttatactggtggtggcggttttcgagtttcgacaccatatatgtaggctcatttcatgagataaaatcagatgcatgtgagcatgtccatatatgttaagaggattaccattggttttattgttgtatttgtaagttgccgttaggaggtgtaaatttgtgtcgtcgagtggtacttattatgtgttgtcgtatagttgtgactcgaaggttaaaggtggttttggttctactgcgaagtgtgaactgtagtgagctgtgttctgtaaaaaaataaagttgttgtgatttgtctactgtaaaaaaaatggaagtaacttggttcaagctgccgtgaaaatgtagattttatatgattttttttttttttttgcaatgctcctgagagtctgatagattttttatatgcaaaacgatactaacacaacattttttgagatgactaacgtaatttccattgctataatattccatacatacagataattaaaatatatagacgttcatagttcatctcaaagtttgc

SEQ ID NO: 11386 - DNA, 3202 bp, Zea Mays
ctccgacatgcggtgcagaaagtgaaaacgcgagaaaagcgcccgtcctttctcgttcccttccgtgcagttgcaagtgttgccacgccgcgccgcgacacaccacgcaggaggcagcgagcgcaataatgcgcacgcagaggagcacagcggcgtcactgctgcggcagtaatggccgcctggttccacttccaccacggtgtgcactagcgctacaccgaggccaccttttcttggttccttcaacacgcctactccggcctccggatcgggcaccacgtctgccccctgctcccggaatctttgccaagcggcgccgctactgtccggcaaggcgaccccgtctctcggccggcgttgatctgttttgtgccggtgctaacggaaaccggaaagtttgcgtctttatgttactgtggttgaggcgggcggagtggcggcgcgatgggcatctcggcgaggtggctcaagtcgttagttgggttgaggaaggtggggcggcagcagcagcagcggcgaaaggatgatgcagatgttggtcgaatggtacgcgccgcgccgagtttcttccaatcattatccagttctggcgtatcttgttcttaaattggtggttggtgcattcatttcgcttattgcctggacctatgtggattatgcaagaatcatttttcatacccgagtcaatccacaccaccaaaagaatgaactatttaatcaggcttcttgatcatatcctgggaaggtctgtactgatcaatgttagttatccatccttgactgaatcgggattgcagtcggtaattccttgtgcactggttgaattaattttaatttttttttactgaggagagcatattgttgagtaatttgttacctgctttgttcaaagcttacttaagtacttgacttcattggcacttcttgaactatgagaacaaaaaatcttggtggttatgcaatcacaagagctttaaattaactgatggatatgtatagcttagtatggccaaaccttgccttctgatatacacatggagaacatatttttgtgccacttccctcagactcagaatatacattgttttgcttacgagttgccaactggagaaactgcagaaaaccgatgtcgccgaccagtttcattttcagattcagcactctcaagatgacaatagcattgctgcacaagaaattccagaggtttcttatggaaatgatccacctgaagatgattctaatgtaccttcatgcttcgagcctgctcgtagttcagctcatatgccattttgtcaaactgaagaagcccagaaagagatctgggctgctacaattattcagacagcatttagagctttcctggtatgcattcatgtcatgtggattccattttctgattcaattctcagctctaatatcccaacaaaccctaatacacattcttatgctcatagcctcttttttaatgtggaagcatcgcaatgcctgtgtcttcgagggggcctcgccttgcgatcacaacatcctcacgtgcatcaaggaggatgtggggttgtggtgcttagctggggcctcaaggcttagaaggatttggccttaatctgcaaggagagcccgccgagctttaaaagggttggttaggcttcaagcccttgtaagaggtcatatagtaagaaagcgagcagctacgacactccgttgtatgcaagctttggtcagggttcaggcccgtgttagagcaaggcgagttcgcatggctttggaaaaccagactgatcggcaaaatacttcaccagagcacacgatcgaggcacgtgtcagagaaatcgaggatggctggtgtgatagtatcggttctgtgggagatatccaagcaaaacttctaaagaggcaggaagcggcagctaaacgtgagcgagccatggcctatgctctagctcatcagtggcaggcaagttcaagacaacctacagcatttgaacctgacaagaacagctggggctggaattggctagagagatggatggctgttcggccttgggagagtcggttccttggcacttacgggacagatgggatttttgtagttaatgaaaccagacaacctgacagaagtgcaaccaagaccccatacagaaaacctgttaaaaagcatgattcaacccttcaatcaaacatgttgaaccagaaggtcttcccatcaaactcagagggtggtggctcctcgacaaatcgatcaagtggtttggtatcaactaaatctagactgaaggttttacccagagaaggttctgaggaagcctcatctcatccttcagtaattgtgcggtccactagtaatccgaaggagaggatttccagtattaattcaaaggagaggactggggacttggattttcaagttcataaaagatcctccttgcctggcattggtccagaagctggcaaacacctgacaaagaaaggcatggttaaccgatccctgaaggccacaaaagattcccaaatactggggtcaaggcatcatcttgccagttccattgatccagttcccaccagagttgaactggagacttgagaaggcatgttatgctcgaacatcgccatggattgcacctagcagcttggatgccgttcatgcctcaatggctgcatgaatgtgtcgcaacatctatgttatactggtggtggcggttttcgagtttcgacaccatatatgtaggctcatttcatgagataaaatcagatgcatgtgagcatgtccatatatgttaagaggattaccattggttttattgttgtatttgtaagttgccgttaggaggtgtaaatttgtgtcgtcgagtggtacttattatgtgttgtcgtatagttgtgactcgaaggttaaaggtggttttggttctactgcgaagtgtgaactgtagtgagctgtgttctgtaaaaaaataaagttgttgtgatttgtctactgtaaaaaaaatggaagtaacttggttcaagctgccgtgaaaatgtagattttatatgattttttttttttttttgcaatgctcctgagagtctgatagattttttatatgcaaaacgatactaacacaacattttttgagatgactaacgtaatttccattgctataatattccatacatacagataattaaaatatatagacgttcatagttcatctcaaagtttgc

SEQ ID NO: 11387 - DNA, 2324 bp, Zea Mays
tgaaattccacaggatgaaggggaaaacggcaacaaaagggactccgacatgcggtgcagaaagtgaaaacgcgagaaaagcgcccgtcctttctcgttcccttccgtgcagttgcaagtgttgccacgccgcgccgcgacacaccacgcaggaggcagcgagcgcaataatgcgcacgcagaggagcacagcggcgtcactgctgcggcagtaatggccgcctggttccacttccaccacggtgtgcactagcgctacaccgaggccaccttttcttggttccttcaacacgcctactccggcctccggatcgggcaccacgtctgccccctgctcccggaatctttgccaagcggcgccgctactgtccggcaaggcgaccccgtctctcggccggcgttgatctgtcgttagttgggttgaggaaggtggggcggcagcagcagcagcggcgaaaggatgatgcagatgttggtcgaatgaaaaccgatgtcgccgaccagtttcattttcagattcagcactctcaagatgacaatagcattgctgcacaagaaattccagaggtttcttatggaaatgatccacctgaagatgattctaatgtaccttcatgcttcgagcctgctcgtagttcagctcatatgccattttgtcaaactgaagaagcccagaaagagatctgggctgctacaattattcagacagcatttagagctttcctggcaaggagagcccgccgagctttaaaagggttggttaggcttcaagcccttgtaagaggtcatatagtaagaaagcgagcagctacgacactccgttgtatgcaagctttggtcagggttcaggcccgtgttagagcaaggcgagttcgcatggctttggaaaaccagactgatcggcaaaatacttcaccagagcacacgatcgaggcacgtgtcagagaaatcgaggatggctggtgtgatagtatcggttctgtgggagatatccaagcaaaacttctaaagaggcaggaagcggcagctaaacgtgagcgagccatggcctatgctctagctcatcagtggcaggcaagttcaagacaacctacagcatttgaacctgacaagaacagctggggctggaattggctagagagatggatggctgttcggccttgggagagtcggttccttggcacttacgggacagatgggatttttgtagttaatgaaaccagacaacctgacagaagtgcaaccaagaccccatacagaaaacctgttaaaaagcatgattcaacccttcaatcaaacatgttgaaccagaaggtcttcccatcaaactcagagggtggtggctcctcgacaaatcgatcaagtggtttggtatcaactaaatctagactgaaggttttacccagagaaggttctgaggaagcctcatctcatccttcagtaattgtgcggtccactagtaatccgaaggagaggatttccagtattaattcaaaggagaggactggggacttggattttcaagttcataaaagatcctccttgcctggcattggtccagaagctggcaaacacctgacaaagaaaggcatggttaaccgatccctgaaggccacaaaagattcccaaatactggggtcaaggcatcatcttgccagttccattgatccagttcccaccagagttgaactggagacttgagaaggcatgttatgctcgaacatcgccatggattgcacctagcagcttggatgccgttcatgcctcaatggctgcatgaatgtgtcgcaacatctatgttatactggtggtggcggttttcgagtttcgacaccatatatgtaggctcatttcatgagataaaatcagatgcatgtgagcatgtccatatatgttaagaggattaccattggttttattgttgtatttgtaagttgccgttaggaggtgtaaatttgtgtcgtcgagtggtacttattatgtgttgtcgtatagttgtgactcgaaggttaaaggtggttttggttctactgcgaagtgtgaactgtagtgagctgtgttctgtaaaaaaataaagttgttgtgatttgtctactgtaaaaaaaatggaagtaacttggttcaagctgccgtgaaaatgtagattttatatgattttttttttttttttgcaatgctcctgagagtctgatagattttttatatgcaaaacgatactaacacaacattttttgagatgactaacgtaatttccattgctataatattccatacatacagataattaaaatatatagacgttcatagttcatctcaaagtttgc

SEQ ID NO: 11388 - DNA, 4450 bp, Zea Mays
cttctgtagtcttatatacgtgttcagcatccatcaagaaataactccacgcctcgttttttaagaggcgagcttaacatttatgatgcacaataagtataattacattaagcacgataaacttcctcataataaaatatattctctataataaacatactagagatataaatgttgataacagatgcgcagttattttttgagactggaggaataacctgttgtgtgctcgcaatttcctaatgcggcaggtggctgcggtgcgtgcgtggtccttatctccaagtacaacccggccaccgacgaggcgaccgagttctcagcgagctcctgcctgacactgctccgtagcattgaccgctgctcagtgaccacgagcgagggcattggcaacaccaaggatggctaccacgcggtgcagcagcggctcgcaggcttccacgcttcccagtgcggcttctgcacgccgggcatctgcatgtcaatcttctcagcgctggccaaggccgacaaggtggccagccgccctaccccgcccacaggcttctccaagctcaccacctcggaggctgaaaaggccgtgtccggcaacctgtgccggtgcaccggatacaggcccatcgtcgacgcctgcaagagcttcgcggcggacgtggaccttgaggatctgggtctcaactgcttctggaggaagggcgatgaacctgctaccgtcagcaaactacctggctacagtagtgctgcagtctgcaccttccctgagttcctcaagtctgagatcaagtcctctagggagaatgcagatggtgctgcagtagcagtctccagtgatggctggtaccatcctcaaagcattgaagagctccacaggttgtttgattcctactggtttgatgaaagttctgtgaagattgtggctgcaaacaccgggtctggagtgtacaaggatcaggacctctatgacaagtacattgacatcaaaggaataccagagctatcagtcatcaacagcagcgttaagggaattgagcttggatcggttgtgtccatctctacagccattgaggtgttgtcagatggaaatctgatcttcagaaaaattgccgatcacctaagcaaagtggcttcgccatttgttcggaacacagcaaccataggtggcaacataatcatggcgcagaggttgccattcgagtcagacatagcaactgtgctactggctgcaggtacaacagtcacaattcagacagcttccaaaaggttgtgccttactttggaggagttcttgcagcagtctccatgtgattctaggaccctgctgatgagcatattcatcccaaagtgggattcagatggcatcacctttgagacattccgggcagcgcctcggccatttggcaatgctgcttcatatgtcaatgctgctctcttggcaaggacttcaactgatgcagcttcagggaagaacatcatggaggatatatgcttggtgttcggtgcttatggagctgaccatgccatcagagctagcaaggtagaggattttctaaagggaaaatcactgagctcttctgttatacttaaagcagttcagttgcttaaagagacggtttcaccaccagaaggcacaacacatcctgagtatagggtcagcttggctgtcagcttcttgttcaccttcttatcctccttaaccaacagcatgaatgaaacagcaaaggttaatgttatcaatggatcacttactaatagaactacaaatattagcggtgggtactcactgaaggaaaatcttgaggttgacagaaattatttaccaatacactcaagacaagaaatggttttcggtgatgaatacaagccagttggcaagccgatcaagaaagtcggggcagagctccaagcttctggggaggctgtgtacgttgatgatatccctgttcccaagggttgcttgtatggagcatttatctacagcacacgccctcatgctcatgtgaagggcatcaacttcaaatcatctttggcttcacagaaggtcatcacagtcattactgcaaaggatattcccagaggcggacaaaatataggatccagcttcccgatgttaggagaagaagtgctttttgcagatcaagttgttgaatttgctggtcaaaatattggcatcgtgatttctgaaacacaaaggtatgcttatatggctgcaaagcaagctgttgttgagtatagcacagaaaatttgcagccaccaattctgactatacaagatgccatccaacagagcagctacttccagattcccacatttttatctcctaagccagttggtgattacaaccaaggggtttctaaggctgatcacactttgtcagcagaggtaaagcttgaatcccaatactatttttacatggagacacaggtggcactggctattcctgatgaagacaactgcataaccatctattcctcgacgcaatttgttgagatcacacaagatgtagttgcaaggtgccttggcattccgttgcacaacgtccgtgtgatcacaagaagagtcggcggaggctttggtggaaaggcaatgaaagcaatacacattgcatgtgcatgcgccgttgccgcattcaagctacagcgtcctgttaagatgtaccttgatcgcaagacggacatgataatagcgggtgggcgacaccctatgaagacaaagtattctgttgggttcaaatcagatggcaagatcacagccgtgcacttggaccttggtctcaatgctggaataacaccggatctgagtgcaatattgccaaatactatcattggtagtttcaaaaagtacaattggggggctcttgcatttgacatcaagctctgcaagacgaatgtctcaccaaagtcaacaatgcgggctcctggagaggtgcagggatcatttattgcagaagccatcgttgagcatgttgcatcggtgctctcagtcgataccaacaccattaggaggaagaaccttcatgacttcaagagtcttgcagcgttctacggagagagtgcgggtgaagcacccacatacacgctggccaccatgtttgataagctggccttgtctccagactaccagcacagagctacaatggttgagcacttcaatagcagcaacaagtggaagaaacgtggcatttcttgtgtacccatcacatatgaggtgagtcttcgggctgctccaggcaaggtgtctatcatgaatgacggttcaattgctgttgagattggaggggttgagataggccagggcttgtggacgaaagtgaagcagatgacagcatttgggctgggacaactgtgtgctgatggcggggaatgcctccttgacaaggtgcggattatccaggtcgactcgttgagcatgatccagggagggttcaccggtgggagcaccacttctgaaaatagttgcgaagcggttcggcattcgtgccttcgacttgttgaaaggctcaagcctgtaaaggagagtttggaggctaagggtgccacaatggaatggggtgccttgattgctcaggcaagtatggcgagtgtgaacttatcagcgcatgcatactggaacccaacttccaggagttacttaaactatggagctggcattagtgaggtggaagttgatgtactgacaggagcaaccacgatcctacggagcgacctcattcatgactgcgggcagagcctgaaccctgcagtagaccttggccaggtggaaggcgcattcatccaaggagtgggcttcttcacgaacgaggagtacaaaacgaacaccgacggcatggtcatccatgacggcacatggacgtacaagattccaacggtcgacaccatcccgaagcagttcaacgtcgagttaatcaacagcgctggcgataggaagcgtgtcctttcatccaaagcgtcgggcgagccaccgcttcttctcgcgtcgtcggtgcactgtgcgatgagggaggccatcagggccgccaggaaggagttctctatctgcaccgggcccgcgaactccgccgtcacgttccagatggacgtgccggcgacgatgcccgtcgtcaaggagctctgcggactcgacgtcgtcgaacgttacctccagagcgtgtcagccggcccaaccaccccgagagccattagcaaataatggtgtgtttagcctcgagtggcgtatgttgttgtgatgtatttctagaaggacactgtaaaataacaatggcgagcagcgagcatggcgaatgtttgtaggaaatcatttgattttgactggttcccggagaaattttgcaacgaacccatcgtcggggcgtccgtgcgtacctggatagatgcggatcggcttgaagcctcgaaccagttcggagcctagccagcttccggttaggcgccaggccacgccggcggacagtgg

SEQ ID NO: 11389 - DNA, 4657 bp, Zea Mays
cttctgtagtcttatatacgtgttcagcatccatcaagaaataactccacgcctcgttttttaagaggcgagcttaacatttatgatgcacaataagtataattacattaagcacgataaacttcctcataataaaatatattctctataataaacatactagagatataaatgttgataacagatgcgcagttattttttgagactggaggaataacctgttgtgtgctcgcaatttcctaatgcggcaggtggctgcggtgcgtgcgtggtccttatctccaagtacaacccggccaccgacgaggcgaccgagttctcagcgagctcctgcctgacactgctccgtagcattgaccgctgctcagtgaccacgagcgagggcattggcaacaccaaggatggctaccacgcggtgcagcagcggctcgcaggcttccacgcttcccagtgcggcttctgcacgccgggcatctgcatgtcaatcttctcagcgctggccaaggccgacaaggtggccagccgccctaccccgcccacaggcttctccaagctcaccacctcggaggctgaaaaggccgtgtccggcaacctgtgccggtgcaccggatacaggcccatcgtcgacgcctgcaagagcttcgcggcggacgtggaccttgaggatctgggtctcaactgcttctggaggaagggcgatgaacctgctaccgtcagcaaactacctggctacagtagtgctgcagtctgcaccttccctgagttcctcaagtctgagatcaagtcctctagggagaatgcagatggtgctgcagtagcagtctccagtgatggctggtaccatcctcaaagcattgaagagctccacaggttgtttgattcctactggtttgatgaaagttctgtgaagattgtggctgcaaacaccgggtctggagtgtacaaggatcaggacctctatgacaagtacattgacatcaaaggaataccagagctatcagtcatcaacagcagcgttaagggaattgagcttggatcggttgtgtccatctctacagccattgaggtgttgtcagatggaaatctgatcttcagaaaaattgccgatcacctaagcaaagtggcttcgccatttgttcggaacacagcaaccataggtggcaacataatcatggcgcagaggttgccattcgagtcagacatagcaactgtgctactggctgcaggtacaacagtcacaattcagacagcttccaaaaggttgtgccttactttggaggagttcttgcagcagtctccatgtgattctaggaccctgctgatgagcatattcatcccaaagtgggattcagatggcatcacctttgagacattccgggcagcgcctcggccatttggcaatgctgcttcatatgtcaatgctgctctcttggcaaggacttcaactgatgcagcttcagggaagaacatcatggaggatatatgcttggtgttcggtgcttatggagctgaccatgccatcagagctagcaaggtagaggattttctaaagggaaaatcactgagctcttctgttatacttaaagcagttcagttgcttaaagagacggtttcaccaccagaaggcacaacacatcctgagtatagggtcagcttggctgtcagcttcttgttcaccttcttatcctccttaaccaacagcatgaatgaaacagcaaaggttaatgttatcaatggatcacttactaatagaactacaaatattagcggtgggtactcactgaaggaaaatcttgaggttgacagaaattatttaccaatacactcaagacaagaaatggttttcggtgatgaatacaagccagttggcaagccgatcaagaaagtcggggcagagctccaagcttctggggaggctgtgtacgttgatgatatccctgttcccaagggttgcttgtatggagcatttatctacagcacacgccctcatgctcatgtgaagggcatcaacttcaaatcatctttggcttcacagaaggtcatcacagtcattactgcaaaggatattcccagaggcggacaaaatataggatccagcttcccgatgttaggagaagaagtgctttttgcagatcaagttgttgaatttgctggtcaaaatattggcatcgtgatttctgaaacacaaaggtatgcttatatggctgcaaagcaagctgttgttgagtatagcacagaaaatttgcagccaccaattctgactatacaagatgccatccaacagagcagctacttccagattcccacatttttatctcctaagccagttggtgattacaaccaaggggtttctaaggctgatcacactttgtcagcagaggtaaagcttgaatcccaatactatttttacatggagacacaggtggcactggctattcctgatgaagacaactgcataaccatctattcctcgacgcaatttgttgagatcacacaagatgtagttgcaaggtgccttggcattccgttgcacaacgtccgtgtgatcacaagaagagtcggcggaggctttggtggaaaggcaatgaaagcaatacacattgcatgtgcatgcgccgttgccgcattcaagctacagcgtcctgttaagatgtaccttgatcgcaagacggacatgataatagcgggtgggcgacaccctatgaagacaaagtattctgttgggttcaaatcagatggcaagatcacagccgtgcacttggaccttggtctcaatgctggaataacaccggatctgagtgcaatattgccaaatactatcattggtagtttcaaaaagtacaattggggggctcttgcatttgacatcaagctctgcaagacgaatgtctcaccaaagtcaacaatgcgggctcctggagaggtgcagggatcatttattgcagaagccatcgttgagcatgttgcatcggtgctctcagtcgataccaacaccattaggaggaagaaccttcatgacttcaagagtcttgcagcgttctacggagagagtgcgggtgaagcacccacatacacgctggccaccatgtttgataagctggccttgtctccagactaccagcacagagctacaatggttgagcacttcaatagcagcaacaagtggaagaaacgtggcatttcttgtgtacccatcacatatgaggtgagtcttcgggctgctccaggcaaggtgtctatcatgaatgacggttcaattgctgttgagattggaggggttgagataggccagggcttgtggacgaaagtgaagcagatgacagcatttgggctgggacaactgtgtgctgatggcggggaatgcctccttgacaaggtgcggattatccaggtcgactcgttgagcatgatccagggagggttcaccggtgggagcaccacttctgaaaatagttgcgaagcggttcggcattcgtgccttcgacttgttgaaaggctcaagcctgtaaaggagagtttggaggctaagggtgccacaatggaatggggtgccttgattgctcaggtgaaaatacccttatgttatgactttatctgttgtcacatataccagttaacctgattgaaacagataccaagaatcacatgcaaatcttttgcctccctcatttccatcatcaatgtactgcgatcagtatgggtagcaaataagtgtgagatacccatcattttactattccaattgtccgtgccatttgttcgtcatttgcaggcaagtatggcgagtgtgaacttatcagcgcatgcatactggaacccaacttccaggagttacttaaactatggagctggcattagtgaggtggaagttgatgtactgacaggagcaaccacgatcctacggagcgacctcattcatgactgcgggcagagcctgaaccctgcagtagaccttggccaggtggaaggcgcattcatccaaggagtgggcttcttcacgaacgaggagtacaaaacgaacaccgacggcatggtcatccatgacggcacatggacgtacaagattccaacggtcgacaccatcccgaagcagttcaacgtcgagttaatcaacagcgctggcgataggaagcgtgtcctttcatccaaagcgtcgggcgagccaccgcttcttctcgcgtcgtcggtgcactgtgcgatgagggaggccatcagggccgccaggaaggagttctctatctgcaccgggcccgcgaactccgccgtcacgttccagatggacgtgccggcgacgatgcccgtcgtcaaggagctctgcggactcgacgtcgtcgaacgttacctccagagcgtgtcagccggcccaaccaccccgagagccattagcaaataatggtgtgtttagcctcgagtggcgtatgttgttgtgatgtatttctagaaggacactgtaaaataacaatggcgagcagcgagcatggcgaatgtttgtaggaaatcatttgattttgactggttcccggagaaattttgcaacgaacccatcgtcggggcgtccgtgcgtacctggatagatgcggatcggcttgaagcctcgaaccagttcggagcctagccagcttccggttaggcgccaggccacgccggcggacagtgg

SEQ ID NO: 11390 - DNA, 5020 bp, Zea Mays
atggggaaggcgccggccgcggtggtggtggccgtgaacgggcagcgttacgaggccaccggtgtggatccgtcgacgacgctgctggagttcctgcgcacccagacgcccgttaggggccccaagctcggctgcggcgaaggtggctgcggtgcgtgcgtggtccttatctccaagtacaacccggccaccgacgaggcgaccgagttctcagcgagctcctgcctgacactgctccgtagcattgaccgctgctcagtgaccacgagcgagggcattggcaacaccaaggatggctaccacgcggtgcagcagcggctcgcaggcttccacgcttcccagtgcggcttctgcacgccgggcatctgcatgtcaatcttctcagcgctggccaaggccgacaaggtggccagccgccctaccccgcccacaggcttctccaagctcaccacctcggaggctgaaaaggccgtgtccggcaacctgtgccggtgcaccggatacaggcccatcgtcgacgcctgcaagagcttcgcggcggacgtggaccttgaggatctgggtctcaactgcttctggaggaagggcgatgaacctgctaccgtcagcaaactacctggctacagtagtgctgcagtctgcaccttccctgagttcctcaagtctgagatcaagtcctctagggagaatgcagatggtgctgcagtagcagtctccagtgatggctggtaccatcctcaaagcattgaagagctccacaggttgtttgattcctactggtttgatgaaagttctgtgaagattgtggctgcaaacaccgggtctggagtgtacaaggatcaggacctctatgacaagtacattgacatcaaaggaataccagagctatcagtcatcaacagcagcgttaagggaattgagcttggatcggttgtgtccatctctacagccattgaggtgttgtcagatggaaatctgatcttcagaaaaattgccgatcacctaagcaaagtggcttcgccatttgttcggaacacagcaaccataggtggcaacataatcatggcgcagaggttgccattcgagtcagacatagcaactgtgctactggctgcaggtacaacagtcacaattcagacagcttccaaaaggttgtgccttactttggaggagttcttgcagcagtctccatgtgattctaggaccctgctgatgagcatattcatcccaaagtgggattcagatggcatcacctttgagacattccgggcagcgcctcggccatttggcaatgctgcttcatatgtcaatgctgctctcttggcaaggacttcaactgatgcagcttcagggaagaacatcatggaggatatatgcttggtgttcggtgcttatggagctgaccatgccatcagagctagcaaggtagaggattttctaaagggaaaatcactgagctcttctgttatacttaaagcagttcagttgcttaaagagacggtttcaccaccagaaggcacaacacatcctgagtatagggtcagcttggctgtcagcttcttgttcaccttcttatcctccttaaccaacagcatgaatgaaacagcaaaggttaatgttatcaatggatcacttactaatagaactacaaatattagcggtgggtactcactgaaggaaaatcttgaggttgacagaaattatttaccaatacactcaagacaagaaatggttttcggtgatgaatacaagccagttggcaagccgatcaagaaagtcggggcagagctccaagcttctggtatttcccctccaatgtactgccttgccaaaacaattattttgacagcatcagcttataacctttcttcagcatattctgcaaaatactgtatagtgatgctactgttcatttttagtacttcctctgttccaaattatagacgttttagtatttctagatacgtagtctttactacgtatctagaaataatagcttatatatatctatgaatctaaaacgccttataatttggaacggatggagtacaatagttttgtcagtgctgaaccatctgaaaattcaaatatgcatatttttcctcatattattggttactgtatgcactgagctatatttatgtttcttacacaggggaggctgtgtacgttgatgatatccctgttcccaagggttgcttgtatggagcatttatctacagcacacgccctcatgctcatgtgaagggcatcaacttcaaatcatctttggcttcacagaaggtcatcacagtcattactgcaaaggatattcccagaggcggacaaaatataggatccagcttcccgatgttaggagaagaagtgctttttgcagatcaagttgttgaatttgctggtcaaaatattggcatcgtgatttctgaaacacaaaggtatgcttatatggctgcaaagcaagctgttgttgagtatagcacagaaaatttgcagccaccaattctgactatacaagatgccatccaacagagcagctacttccagattcccacatttttatctcctaagccagttggtgattacaaccaaggggtttctaaggctgatcacactttgtcagcagaggtaaagcttgaatcccaatactatttttacatggagacacaggtggcactggctattcctgatgaagacaactgcataaccatctattcctcgacgcaatttgttgagatcacacaagatgtagttgcaaggtgccttggcattccgttgcacaacgtccgtgtgatcacaagaagagtcggcggaggctttggtggaaaggcaatgaaagcaatacacattgcatgtgcatgcgccgttgccgcattcaagctacagcgtcctgttaagatgtaccttgatcgcaagacggacatgataatagcgggtgggcgacaccctatgaagacaaagtattctgttgggttcaaatcagatggcaagatcacagccgtgcacttggaccttggtctcaatgctggaataacaccggatctgagtgcaatattgccaaatactatcattggtagtttcaaaaagtacaattggggggctcttgcatttgacatcaagctctgcaagacgaatgtctcaccaaagtcaacaatgcgggctcctggagaggtgcagggatcatttattgcagaagccatcgttgagcatgttgcatcggtgctctcagtcgataccaacaccattaggaggaagaaccttcatgacttcaagagtcttgcagcgttctacggagagagtgcgggtgaagcacccacatacacgctggccaccatgtttgataagctggccttgtctccagactaccagcacagagctacaatggttgagcacttcaatagcagcaacaagtggaagaaacgtggcatttcttgtgtacccatcacatatgaggtgagtcttcgggctgctccaggcaaggtgtctatcatgaatgacggttcaattgctgttgagattggaggggttgagataggccagggcttgtggacgaaagtgaagcagatgacagcatttgggctgggacaactgtgtgctgatggcggggaatgcctccttgacaaggtgcggattatccaggtcgactcgttgagcatgatccagggagggttcaccggtgggagcaccacttctgaaaatagttgcgaagcggttcggcattcgtgccttcgacttgttgaaaggctcaagcctgtaaaggagagtttggaggctaagggtgccacaatggaatggggtgccttgattgctcaggtgaaaatacccttatgttatgactttatctgttgtcacatataccagttaacctgattgaaacagataccaagaatcacatgcaaatcttttgcctccctcatttccatcatcaatgtactgcgatcagtatgggtagcaaataagtgtgagatacccatcattttactattccaattgtccgtgccatttgttcgtcatttgcaggcaagtatggcgagtgtgaacttatcagcgcatgcatactggaacccaacttccaggagttacttaaactatggagctggcattagtgaggtagccctgatccaaattgctatagtaacactgtaaatgcaattaacaagccaaattgttggaggctgcagtttcagttcttcacgaagctgagacatgattggaaatgtcatcacaggtggaagttgatgtactgacaggagcaaccacgatcctacggagcgacctcattcatgactgcgggcagagcctgaaccctgcagtagaccttggccaggtggaaggcgcattcatccaaggagtgggcttcttcacgaacgaggagtacaaaacgaacaccgacggcatggtcatccatgacggcacatggacgtacaagattccaacggtcgacaccatcccgaagcagttcaacgtcgagttaatcaacagcgctggcgataggaagcgtgtcctttcatccaaagcgtcgggcgagccaccgcttcttctcgcgtcgtcggtgcactgtgcgatgagggaggccatcagggccgccaggaaggagttctctatctgcaccgggcccgcgaactccgccgtcacgttccagatggacgtgccggcgacgatgcccgtcgtcaaggagctctgcggactcgacgtcgtcgaacgttacctccagagcgtgtcagccggcccaaccaccccgagagccattagcaaataatggtgtgtttagcctcgagtggcgtatgttgttgtgatgtatttctagaaggacactgtaaaataacaatggcgagcagcgagcatggcgaatgtttgtaggaaatcatttgattttgactggttcccggagaaattttgcaacgaacccatcgtcggggcgtccgtgcgtacctggatagatgcggatcggcttgaagcctcgaaccagttcggagcctagccagcttccggttaggcgccaggccacgccggcggacagtgg

SEQ ID NO: 11391 - DNA, 4921 bp, Zea Mays
ccgcgcgcggagatggggaaggcgccggccgcggtggtggtggccgtgaacgggcagcgttacgaggccaccggtgtggatccgtcgacgacgctgctggagttcctgcgcacccagacgcccgttaggggccccaagctcggctgcggcgaaggtggctgcggtgcgtgcgtggtccttatctccaagtacaacccggccaccgacgaggcgaccgagttctcagcgagctcctgcctgacactgctccgtagcattgaccgctgctcagtgaccacgagcgagggcattggcaacaccaaggatggctaccacgcggtgcagcagcggctcgcaggcttccacgcttcccagtgcggcttctgcacgccgggcatctgcatgtcaatcttctcagcgctggccaaggccgacaaggtggccagccgccctaccccgcccacaggcttctccaagctcaccacctcggaggctgaaaaggccgtgtccggcaacctgtgccggtgcaccggatacaggcccatcgtcgacgcctgcaagagcttcgcggcggacgtggaccttgaggatctgggtctcaactgcttctggaggaagggcgatgaacctgctaccgtcagcaaactacctggctacagtagtgctgcagtctgcaccttccctgagttcctcaagtctgagatcaagtcctctagggagaatgcagatggtgctgcagtagcagtctccagtgatggctggtaccatcctcaaagcattgaagagctccacaggttgtttgattcctactggtttgatgaaagttctgtgaagattgtggctgcaaacaccgggtctggagtgtacaaggatcaggacctctatgacaagtacattgacatcaaaggaataccagagctatcagtcatcaacagcagcgttaagggaattgagcttggatcggttgtgtccatctctacagccattgaggtgttgtcagatggaaatctgatcttcagaaaaattgccgatcacctaagcaaagtggcttcgccatttgttcggaacacagcaaccataggtggcaacataatcatggcgcagaggttgccattcgagtcagacatagcaactgtgctactggctgcaggtacaacagtcacaattcagacagcttccaaaaggttgtgccttactttggaggagttcttgcagcagtctccatgtgattctaggaccctgctgatgagcatattcatcccaaagtgggattcagatggcatcacctttgagacattccgggcagcgcctcggccatttggcaatgctgcttcatatgtcaatgctgctctcttggcaaggacttcaactgatgcagcttcagggaagaacatcatggaggatatatgcttggtgttcggtgcttatggagctgaccatgccatcagagctagcaaggtagaggattttctaaagggaaaatcactgagctcttctgttatacttaaagcagttcagttgcttaaagagacggtttcaccaccagaaggcacaacacatcctgagtatagggtcagcttggctgtcagcttcttgttcaccttcttatcctccttaaccaacagcatgaatgaaacagcaaaggttaatgttatcaatggatcacttactaatagaactacaaatattagcggtgggtactcactgaaggaaaatcttgaggttgacagaaattatttaccaatacactcaagacaagaaatggttttcggtgatgaatacaagccagttggcaagccgatcaagaaagtcggggcagagctccaagcttctggggaggctgtgtacgttgatgatatccctgttcccaagggttgcttgtatggagcatttatctacagcacacgccctcatgctcatgtgaagggcatcaacttcaaatcatctttggcttcacagaaggtcatcacagtcattactgcaaaggatattcccagaggcggacaaaatataggatccagcttcccgatgttaggagaagaagtgctttttgcagatcaagttgttgaatttgctggtcaaaatattggcatcgtgatttctgaaacacaaaggtatgcttatatggctgcaaagcaagctgttgttgagtatagcacagaaaatttgcagccaccaattctgactatacaagatgccatccaacagagcagctacttccagattcccacatttttatctcctaagccagttggtgattacaaccaaggggtttctaaggctgatcacactttgtcagcagaggtaaagcttgaatcccaatactatttttacatggagacacaggtggcactggctattcctgatgaagacaactgcataaccatctattcctcgacgcaatttgttgagatcacacaagatgtagttgcaaggtgccttggcattccgttgcacaacgtccgtgtgatcacaagaagagtcggcggaggctttggtggaaaggcaatgaaagcaatacacattgcatgtgcatgcgccgttgccgcattcaagctacagcgtcctgttaagatgtaccttgatcgcaagacggacatgataatagcgggtgggcgacaccctatgaagacaaagtattctgttgggttcaaatcagatggcaagatcacagccgtgcacttggaccttggtctcaatgctggaataacaccggatctgagtgcaatattgccaaatactatcattggtagtttcaaaaagtacaattggggggctcttgcatttgacatcaagctctgcaagacgaatgtctcaccaaagtcaacaatgcgggctcctggagaggtgcagggatcatttattgcagaagccatcgttgagcatgttgcatcggtgctctcagtcgataccaacaccattaggaggaagaaccttcatgacttcaagagtcttgcagcgttctacggagagagtgcgggtgaagcacccacatacacgctggccaccatgtttgataagctggccttgtctccagactaccagcacagagctacaatggttgagcacttcaatagcagcaacaagtggaagaaacgtggcatttcttgtgtacccatcacatatgaggtgagtcttcgggctgctccaggcaaggtgtctatcatgaatgacggttcaattgctgttgagattggaggggttgagataggccagggcttgtggacgaaagtgaagcagatgacagcatttgggctgggacaactgtgtgctgatggcggggaatgcctccttgacaaggtgcggattatccaggtcgactcgttgagcatgatccagggagggttcaccggtgggagcaccacttctgaaaatagttgcgaagcggttcggcattcgtgccttcgacttgttgaaaggctcaagcctgtaaaggagagtttggaggctaagggtgccacaatggaatggggtgccttgattgctcaggtgaaaatacccttatgttatgactttatctgttgtcacatataccagttaacctgattgaaacagataccaagaatcacatgcaaatcttttgcctccctcatttccatcatcaatgtactgcgatcagtatgggtagcaaataagtgtgagatacccatcattttactattccaattgtccgtgccatttgttcgtcatttgcaggcaagtatggcgagtgtgaacttatcagcgcatgcatactggaacccaacttccaggagttacttaaactatggagctggcattagtgaggtggaagttgatgtactgacaggagcaaccacgatcctacggagcgacctcattcatgactgcgggcagagcctgaaccctgcagtagaccttggccaggtggaaggcgcattcatccaaggagtgggcttcttcacgaacgaggagtacaaaacgaacaccgacggcatggtcatccatgacggcacatggacgtacaagattccaacggtcgacaccatcccgaagcagttcaacgtcgagttaatcaacagcgctggcgataggaagcgtgtcctttcatccaaaggtaaacctactcttcagtggcggacccaggattttatggcagcctaggctgtgagccagtactgcggtgcaggcctgcggtagcctgggctttgcatccttttttgaactagggtcaaatacatgctccatacagacgcgcgaggcagcccaggccgtggcctgtggtgcctgtgtactgcgtccgcctctgctactcttggaatgtctcatctcctcgggcatccttggttcttgcagactttcctgaacctcctgagaacttacgtacaaaaaatactgcaacttgagatcaccataccagcataacatggcaacagtggctgcttgcgaccctgacactccggcttggatctttgcagcgtcgggcgagccaccgcttcttctcgcgtcgtcggtgcactgtgcgatgagggaggccatcagggccgccaggaaggagttctctatctgcaccgggcccgcgaactccgccgtcacgttccagatggacgtgccggcgacgatgcccgtcgtcaaggagctctgcggactcgacgtcgtcgaacgttacctccagagcgtgtcagccggcccaaccaccccgagagccattagcaaataatggtgtgtttagcctcgagtggcgtatgttgttgtgatgtatttctagaaggacactgtaaaataacaatggcgagcagcgagcatggcgaatgtttgtaggaaatcatttgattttgactggttcccggagaaattttgcaacgaacccatcgtcggggcgtccgtgcgtacctggatagatgcggatcggcttgaagcctcgaaccagttcggagcctagccagcttccggttaggcgccaggccacgccggcggacagtgg

SEQ ID NO: 11392 - DNA, 4583 bp, Zea Mays
ccgcgcgcggagatggggaaggcgccggccgcggtggtggtggccgtgaacgggcagcgttacgaggccaccggtgtggatccgtcgacgacgctgctggagttcctgcgcacccagacgcccgttaggggccccaagctcggctgcggcgaaggtggctgcggtgcgtgcgtggtccttatctccaagtacaacccggccaccgacgaggcgaccgagttctcagcgagctcctgcctgacactgctccgtagcattgaccgctgctcagtgaccacgagcgagggcattggcaacaccaaggatggctaccacgcggtgcagcagcggctcgcaggcttccacgcttcccagtgcggcttctgcacgccgggcatctgcatgtcaatcttctcagcgctggccaaggccgacaaggtggccagccgccctaccccgcccacaggcttctccaagctcaccacctcggaggctgaaaaggccgtgtccggcaacctgtgccggtgcaccggatacaggcccatcgtcgacgcctgcaagagcttcgcggcggacgtggaccttgaggatctgggtctcaactgcttctggaggaagggcgatgaacctgctaccgtcagcaaactacctggctacagtagtgctgcagtctgcaccttccctgagttcctcaagtctgagatcaagtcctctagggagaatgcagatggtgctgcagtagcagtctccagtgatggctggtaccatcctcaaagcattgaagagctccacaggttgtttgattcctactggtttgatgaaagttctgtgaagattgtggctgcaaacaccgggtctggagtgtacaaggatcaggacctctatgacaagtacattgacatcaaaggaataccagagctatcagtcatcaacagcagcgttaagggaattgagcttggatcggttgtgtccatctctacagccattgaggtgttgtcagatggaaatctgatcttcagaaaaattgccgatcacctaagcaaagtggcttcgccatttgttcggaacacagcaaccataggtggcaacataatcatggcgcagaggttgccattcgagtcagacatagcaactgtgctactggctgcaggtacaacagtcacaattcagacagcttccaaaaggttgtgccttactttggaggagttcttgcagcagtctccatgtgattctaggaccctgctgatgagcatattcatcccaaagtgggattcagatggcatcacctttgagacattccgggcagcgcctcggccatttggcaatgctgcttcatatgtcaatgctgctctcttggcaaggacttcaactgatgcagcttcagggaagaacatcatggaggatatatgcttggtgttcggtgcttatggagctgaccatgccatcagagctagcaaggtagaggattttctaaagggaaaatcactgagctcttctgttatacttaaagcagttcagttgcttaaagagacggtttcaccaccagaaggcacaacacatcctgagtatagggtcagcttggctgtcagcttcttgttcaccttcttatccaatacactcaagacaagaaatggttttcggtgatgaatacaagccagttggcaagccgatcaagaaagtcggggcagagctccaagcttctggggaggctgtgtacgttgatgatatccctgttcccaagggttgcttgtatggagcatttatctacagcacacgccctcatgctcatgtgaagggcatcaacttcaaatcatctttggcttcacagaaggtcatcacagtcattactgcaaaggatattcccagaggcggacaaaatataggatccagcttcccgatgttaggagaagaagtgctttttgcagatcaagttgttgaatttgctggtcaaaatattggcatcgtgatttctgaaacacaaaggtatgcttatatggctgcaaagcaagctgttgttgagtatagcacagaaaatttgcagccaccaattctgactatacaagatgccatccaacagagcagctacttccagattcccacatttttatctcctaagccagttggtgattacaaccaaggggtttctaaggctgatcacactttgtcagcagaggtaaagcttgaatcccaatactatttttacatggagacacaggtggcactggctattcctgatgaagacaactgcataaccatctattcctcgacgcaatttgttgagatcacacaagatgtagttgcaaggtgccttggcattccgttgcacaacgtccgtgtgatcacaagaagagtcggcggaggctttggtggaaaggcaatgaaagcaatacacattgcatgtgcatgcgccgttgccgcattcaagctacagcgtcctgttaagatgtaccttgatcgcaagacggacatgataatagcgggtgggcgacaccctatgaagacaaagtattctgttgggttcaaatcagatggcaagatcacagccgtgcacttggaccttggtctcaatgctggaataacaccggatctgagtgcaatattgccaaatactatcattggtagtttcaaaaagtacaattggggggctcttgcatttgacatcaagctctgcaagacgaatgtctcaccaaagtcaacaatgcgggctcctggagaggtgcagggatcatttattgcagaagccatcgttgagcatgttgcatcggtgctctcagtcgataccaacaccattaggaggaagaaccttcatgacttcaagagtcttgcagcgttctacggagagagtgcgggtgaagcacccacatacacgctggccaccatgtttgataagctggccttgtctccagactaccagcacagagctacaatggttgagcacttcaatagcagcaacaagtggaagaaacgtggcatttcttgtgtacccatcacatatgaggtgagtcttcgggctgctccaggcaaggtgtctatcatgaatgacggttcaattgctgttgagattggaggggttgagataggccagggcttgtggacgaaagtgaagcagatgacagcatttgggctgggacaactgtgtgctgatggcggggaatgcctccttgacaaggtgcggattatccaggtcgactcgttgagcatgatccagggagggttcaccggtgggagcaccacttctgaaaatagttgcgaagcggttcggcattcgtgccttcgacttgttgaaaggctcaagcctgtaaaggagagtttggaggctaagggtgccacaatggaatggggtgccttgattgctcaggcaagtatggcgagtgtgaacttatcagcgcatgcatactggaacccaacttccaggagttacttaaactatggagctggcattagtgaggtggaagttgatgtactgacaggagcaaccacgatcctacggagcgacctcattcatgactgcgggcagagcctgaaccctgcagtagaccttggccaggtggaaggcgcattcatccaaggagtgggcttcttcacgaacgaggagtacaaaacgaacaccgacggcatggtcatccatgacggcacatggacgtacaagattccaacggtcgacaccatcccgaagcagttcaacgtcgagttaatcaacagcgctggcgataggaagcgtgtcctttcatccaaaggtaaacctactcttcagtggcggacccaggattttatggcagcctaggctgtgagccagtactgcggtgcaggcctgcggtagcctgggctttgcatccttttttgaactagggtcaaatacatgctccatacagacgcgcgaggcagcccaggccgtggcctgtggtgcctgtgtactgcgtccgcctctgctactcttggaatgtctcatctcctcgggcatccttggttcttgcagactttcctgaacctcctgagaacttacgtacaaaaaatactgcaacttgagatcaccataccagcataacatggcaacagtggctgcttgcgaccctgacactccggcttggatctttgcagcgtcgggcgagccaccgcttcttctcgcgtcgtcggtgcactgtgcgatgagggaggccatcagggccgccaggaaggagttctctatctgcaccgggcccgcgaactccgccgtcacgttccagatggacgtgccggcgacgatgcccgtcgtcaaggagctctgcggactcgacgtcgtcgaacgttacctccagagcgtgtcagccggcccaaccaccccgagagccattagcaaataatggtgtgtttagcctcgagtggcgtatgttgttgtgatgtatttctagaaggacactgtaaaataacaatggcgagcagcgagcatggcgaatgtttgtaggaaatcatttgattttgactggttcccggagaaattttgcaacgaacccatcgtcggggcgtccgtgcgtacctggatagatgcggatcggcttgaagcctcgaaccagttcggagcctagccagcttccggttaggcgccaggccacgccggcggacagtgg

SEQ ID NO: 11393 - DNA, 2459 bp, Zea Mays
atggggaaggcgccggccgcggtggtggtggccgtgaacgggcagcgttacgaggccaccggtgtggatccgtcgacgacgctgctggagttcctgcgcacccagacgcccgttaggggccccaagctcggctgcggcgaaggtggctgcggtgcgtgcgtggtccttatctccaagtacaacccggccaccgacgaggcgaccgagttctcagcgagctcctgcctgacactgctccgtagcattgaccgctgctcagtgaccacgagcgagggcattggcaacaccaaggatggctaccacgcggtgcagcagcggctcgcaggcttccacgcttcccagtgcggcttctgcacgccgggcatctgcatgtcaatcttctcagcgctggccaaggccgacaaggtggccagccgccctaccccgcccacaggcttctccaagctcaccacctcggaggctgaaaaggccgtgtccggcaacctgtgccggtgcaccggatacaggcccatcgtcgacgcctgcaagagcttcgcggcggacgtggaccttgaggatctgggtctcaactgcttctggaggaagggcgatgaacctgctaccgtcagcaaactacctggctacagtagtgctgcagtctgcaccttccctgagttcctcaagtctgagatcaagtcctctagggagaatgcagatggtgctgcagtagcagtctccagtgatggctggtaccatcctcaaagcattgaagagctccacaggttgtttgattcctactggtttgatgaaagttctgtgaagattgtggctgcaaacaccgggtctggagtgtacaaggatcaggacctctatgacaagtacattgacatcaaaggaataccagagctatcagtcatcaacagcagcgttaagggaattgagcttggatcggttgtgtccatctctacagccattgaggtgttgtcagatggaaatctgatcttcagaaaaattgccgatcacctaagcaaagtggcttcgccatttgttcggaacacagcaaccataggtggcaacataatcatggcgcagaggttgccattcgagtcagacatagcaactgtgctactggctgcaggtacaacagtcacaattcagacagcttccaaaaggttgtgccttactttggaggagttcttgcagcagtctccatgtgattctaggaccctgctgatgagcatattcatcccaaagtgggattcagatggcatcacctttgagacattccgggcagcgcctcggccatttggcaatgctgcttcatatgtcaatgctgctctcttggcaaggacttcaactgatgcagcttcagggaagaacatcatggaggatatatgcttggtgttcggtgcttatggagctgaccatgccatcagagctagcaaggtagaggattttctaaagggaaaatcactgagctcttctgttatacttaaagcagttcagttgcttaaagagacggtttcaccaccagaaggcacaacacatcctgagtatagggtcagcttggctgtcagcttcttgttcaccttcttatcctccttaaccaacagcatgaatgaaacagcaaaggttaatgttatcaatggatcacttactaatagaactacaaatattagcggtgggtactcactgaaggaaaatcttgaggttgacagaaattatttaccaatacactcaagacaagaaatggttttcggtgatgaatacaagccagttggcaagccgatcaagaaagtcggggcagagctccaagcttctggtatttcccctccaatgtactgccttgccaaaacaattattttgacagcatcagcttataacctttcttcagcatattctgcaaaatactgtatagtgatgctactgttcatttttagtacttcctctgttccaaattatagacgttttagtatttctagatacgtagtctttactacgtatctagaaataatagcttatatatatctatgaatctaaaacgccttataatttggaacggatggagtacaatagttttgtcagtgctgaaccatctgaaaattcaaatatgcatatttttcctcatattattggttactgtatgcactgagctatatttatgtttcttacacaggggaggctgtgtacgttgatgatatccctgttcccaagggttgcttgtatggagcatttatctacagcacacgccctcatgctcatgtgaagggcatcaacttcaaatcatctttggcttcacagaaggtcatcacagtcattactgcaaaggatattcccagaggcggacaaaatataggatccagcttcccgatgttaggagaagaagtgctttttgcagatcaagttgttgaatttgctggtcaaaatattggcatcgtgaatcttgaaaattctatcaagcttaccacgccatgttggtt

SEQ ID NO: 11394 - DNA, 4685 bp, Zea Mays
gtgttgtgttgtgttgtgttgcgtgctgtggagggggaggaggagatggggaagggggcaggagcagcggagccgtcgacggtggtgctggccgtcaacggcaagcgctacgaggcggccggcgtggctccgtccacgtcgctgctggagttcctccgcagccagacgcccgtcagaggccccaagctcggatgcggcgaaggtggctgcggtgcatgcgtggtcctcgtctccaagtacgacccggccacggacgaggtgaccgagttctctgccagctcctgcctgacgctgctccacagcgtggaccgctgctcagtgaccaccagcgagggaatcggcaacaccagggatggctaccaccccgtgcagcagcgcctctccggcttccacgcctcgcagtgcggcttctgcacacccggcatgtgcatgtccatcttctccgcccttgtcaaggccgacaacaagtccgatcgcccggaccctcctgctggcttctccaagatcactacctcggaggcagagaaggctgtctcgggcaacctttgtcgttgcaccggatacagacccattgttgacacctgcaaaagctttgcctctgatgttgacctcgaggacctaggcctcaactgtttctggaagaagggcgaagaacctgcagaagtcagcaggctgccggggtacaacagcggtgccgtctgcacctttccagagtttctcaaatccgaaatcaagtctactatgaagcaggtgaacgatgtccccattgcagcctcaggtgatggctggtaccatcctaagagcattgaagagcttcacaggttgtttgattccagctggtttgatgacagttctgtgaagattgttgcttcaaacactgggtctggagtgtacaaggatcaggacctctacgacaagtacattgacatcaaaggaatcccagagctttcagtcatcaataaaaacgacaaaggaattgagcttggatcagttgtgtccatctctaaagctattgaagtgctgtcagatggaaatttggtcttcagaaagattgctgatcacctcaacaaagtggcttcaccgtttgttcggaacactgcaaccataggaggaaacataatgatggcacaaaggttgccatttgaatcggatgttgcaaccgtgctcctagctgcgggttcgacagtcacagtccaggtggcttccaaaaggctgtgcttcactctggaggaattcttggaacaacctccatgtgattctaggaccctgctgctgagcatatttatcccagaatggggttcagactatgtcacctttgagactttccgagccgccccacgaccatttggaaatgctgtctcttatgtaaactctgctttcttggcaaggacatcaggcagccttctaattgaggatatatgcttggcatttggtgcctacggagtcgatcatgccatcagagctaagaaggttgaagatttcttgaagggaaaatcgctgagctcatttgtgatacttgaagcaattaaactactcaaagataccgtttcaccatcagaaggcactacacatcatgaatacagggtcagcttggctgtcagtttcttgttcagtttcttatcttcccttgccaacagttcgagtgcaccatcaaatattgatactcccaatgggtcatatactcatgaaactggtagcaatgtggactcacctgagaggcatattaaggttgacagcaatgatttgccaattcgttcaagacaagaaatggttttcagcgatgagtacaagcctgttggcaagccgatcaagaaagtcggggcagagatccaagcatcaggtatatactcttatactgatacataaactgatttagcttgaacttccaaacttgttccactgttagtgaacctcgtctattttctatactccacaaaacaatcatctcatggctccttttttttgtctttagtgcaatagtttcgtcagccagaaccatctcataagtttctgtcccagcatgctctattgattgtatttcctcccttaaaaaatgccaaaccatattcatttttcttatacaggggaggctgtgtacgttgatgatatccctgctcccaaggattgcctctatggagcatttatctacagcacacatcctcatgctcatgtgagaagtatcaacttcaaatcatccttggcttcacagaaggtcatcacagttataaccgcaaaggatattccaagcggtggagaaaatattggaagcagcttcctgatgcaaggagaagcactatttgcagatccaatcgctgaatttgctggtcaaaatattggtgtcgtgattgctgaaacacaaagatatgctaatatggctgcaaagcaagctgttgttgagtatagcacagaaaatctgcagccaccaattctgacaatagaagatgccatccaaagaaacagctacatccaaattcccccatttttagctccaaagccagttggtgactacaacaaagggatggctgaagcagaccacaagattctatcagcagaggtaaaacttgaatcccagtactacttctacatggaaactcaagcagcactagcgattcctgatgaagataactgcataacaatctattcctcgacacaaatgcctgagctcacacaaaatttgatagcaaggtgtcttggcattccatttcacaatgtccgtgtcatcagcagaagagtaggaggaggctttggtggaaaggcaatgaaagcaacgcatactgcatgtgcatgtgcccttgctgccttcaagctgcggcgtccagttaggatgtacctcgatcgcaagacggacatgataatggctggagggagacatccaatgaaggcgaagtactctgttgggttcaagtcagatggcaagatcacagccttgcacctagatcttggaatcaatgctggaatatcaccagatgtgagtccattgatgccacgtgctatcataggagctctcaaaaagtacaactggggcactcttgaatttgacaccaaggtctgcaagacaaatgtctcatcaaagtcagcaatgcgagctcctggagatgtgcagggctctttcatcgctgaagccatcatcgagcatgttgcctcagcactcgcactagacactaacaccgtcaggaggaagaaccttcatgattttgaaagccttgaagttttctatggagaaagtgcaggtgaagcttctacatacagcctggtttccatgtttgacaagctggccttgtctccagaataccagcacagggctgcaatgattgagcagttcaatagcagcaacaaatggaagaaacgcggcatttcttgtgtgccagccacttatgaggttaatcttcgaccaactccaggcaaggtgtcaatcatgaatgatggttccatcgctgtcgaggttggaggaattgagataggtcaaggattgtggactaaagtgaagcagatgacggcctttggactgggacagctgtgtcctgatggtggcgaatgccttctggacaaggttcgggttatccaggcagacacattaagcctgatccaaggaggtatgactgctgggagcaccacttctgaaactagctgtgaagcagttcggcaatcgtgtgttgcacttgttgagaggctgaagcctatcaaggagagtctcgaagctaagtccaacacagtggaatggagtgccttgattgctcaggcaagcatggcgagtgtgaacctatcagcacaggcgtactggactcctgatccatctttcaagagctacttgaactacggagctggcaccagtgaggtggaagttgatatcctaacaggagcaaccacaattctgcgaagcgacctggtgtatgactgcgggcagagcctaaaccctgctgtagacttgggccagatcgagggctgctttgtccaaggaatagggttcttcacgaacgaggactacaagacgaattccgacggcttggtcatccacgacggcacatggacgtacaagatccccacggtggataatatcccgaaggagttcaatgttgagatgtttaacagcgcccctgacaagaagcgtgtcctatcttccaaagcgtcgggcgagccgccgctggttctcgcagcctcggtgcactgcgcgatgagggaggccatcagggcggcgaggaaggagttctcggtcagcaccagccccgcgaaatccgccgtcacattccagatggacgtgccggcgacgatgcccgtcgtcaaggagctctgcggcctcgacgtcgtggagaggtacctcgagaacgtgtctgccgccagtgccggcccaaacacagcgaaagcatagatccagcaggcctcagggtgcagtcggcgcactgccagagatgatgtgtgctgccctgatgtacagacagtacagtacagaggagagagaattgggggaactcaggaactgcgaggagcgatgaacagtatatagagtgaaaaataaaagtgcttcgtactaataatcactagaaaaaattatgcacatctcccacgcactaccggcacgactgttgaatattttgtaaaataagatgtcataagctatttattttctgtatgattagatcagcaaataatttaattcaagtataaatcacagaaatccgctattgtgc

SEQ ID NO: 11395 - DNA, 5077 bp, Zea Mays
ggccttggcgccttgcactgcagctgcgaagacgctttcgcatcctagccgctggcgacgtcagcgcgtgcatcaacaacactggccggctggctggaggatcggagcaggtcagcgactcgtatatataaacaggagggcaccacaccatcgatcggctccccgcgcagagggcgttgtgttgtgttgtgttgtgttgcgtgctgtggagggggaggaggagatggggaagggggcaggagcagcggagccgtcgacggtggtgctggccgtcaacggcaagcgctacgaggcggccggcgtggctccgtccacgtcgctgctggagttcctccgcagccagacgcccgtcagaggccccaagctcggatgcggcgaaggtggctgcggtgcatgcgtggtcctcgtctccaagtacgacccggccacggacgaggtgaccgagttctctgccagctcctgcctgacgctgctccacagcgtggaccgctgctcagtgaccaccagcgagggaatcggcaacaccagggatggctaccaccccgtgcagcagcgcctctccggcttccacgcctcgcagtgcggcttctgcacacccggcatgtgcatgtccatcttctccgcccttgtcaaggccgacaacaagtccgatcgcccggaccctcctgctggcttctccaagatcactacctcggaggcagagaaggctgtctcgggcaacctttgtcgttgcaccggatacagacccattgttgacacctgcaaaagctttgcctctgatgttgacctcgaggacctaggcctcaactgtttctggaagaagggcgaagaacctgcagaagtcagcaggctgccggggtacaacagcggtgccgtctgcacctttccagagtttctcaaatccgaaatcaagtctactatgaagcaggtgaacgatgtccccattgcagcctcaggtgatggctggtaccatcctaagagcattgaagagcttcacaggttgtttgattccagctggtttgatgacagttctgtgaagattgttgcttcaaacactgggtctggagtgtacaaggatcaggacctctacgacaagtacattgacatcaaaggaatcccagagctttcagtcatcaataaaaacgacaaaggaattgagcttggatcagttgtgtccatctctaaagctattgaagtgctgtcagatggaaatttggtcttcagaaagattgctgatcacctcaacaaagtggcttcaccgtttgttcggaacactgcaaccataggaggaaacataatgatggcacaaaggttgccatttgaatcggatgttgcaaccgtgctcctagctgcgggttcgacagtcacagtccaggtggcttccaaaaggctgtgcttcactctggaggaattcttggaacaacctccatgtgattctaggaccctgctgctgagcatatttatcccagaatggggttcagactatgtcacctttgagactttccgagccgccccacgaccatttggaaatgctgtctcttatgtaaactctgctttcttggcaaggacatcaggcagccttctaattgaggatatatgcttggcatttggtgcctacggagtcgatcatgccatcagagctaagaaggttgaagatttcttgaagggaaaatcgctgagctcatttgtgatacttgaagcaattaaactactcaaagataccgtttcaccatcagaaggcactacacatcatgaatacagggtcagcttggctgtcagtttcttgttcagtttcttatcttcccttgccaacagttcgagtgcaccatcaaatattgatactcccaatgggtcatatactcatgaaactggtagcaatgtggactcacctgagaggcatattaaggttgacagcaatgatttgccaattcgttcaagacaagaaatggttttcagcgatgagtacaagcctgttggcaagccgatcaagaaagtcggggcagagatccaagcatcaggtatatactcttatactgatacataaactgatttagcttgaacttccaaacttgttccactgttagtgaacctcgtctattttctatactccacaaaacaatcatctcatggctccttttttttgtctttagtgcaatagtttcgtcagccagaaccatctcataagtttctgtcccagcatgctctattgattgtatttcctcccttaaaaaatgccaaaccatattcatttttcttatacaggggaggctgtgtacgttgatgatatccctgctcccaaggattgcctctatggagcatttatctacagcacacatcctcatgctcatgtgagaagtatcaacttcaaatcatccttggcttcacagaaggtcatcacagttataaccgcaaaggatattccaagcggtggagaaaatattggaagcagcttcctgatgcaaggagaagcactatttgcagatccaatcgctgaatttgctggtcaaaatattggtgtcgtgattgctgaaacacaaagatatgctaatatggctgcaaagcaagctgttgttgagtatagcacagaaaatctgcagccaccaattctgacaatagaagatgccatccaaagaaacagctacatccaaattcccccatttttagctccaaagccagttggtgactacaacaaagggatggctgaagcagaccacaagattctatcagcagaggtaaaacttgaatcccagtactacttctacatggaaactcaagcagcactagcgattcctgatgaagataactgcataacaatctattcctcgacacaaatgcctgagctcacacaaaatttgatagcaaggtgtcttggcattccatttcacaatgtccgtgtcatcagcagaagagtaggaggaggctttggtggaaaggcaatgaaagcaacgcatactgcatgtgcatgtgcccttgctgccttcaagctgcggcgtccagttaggatgtacctcgatcgcaagacggacatgataatggctggagggagacatccaatgaaggcgaagtactctgttgggttcaagtcagatggcaagatcacagccttgcacctagatcttggaatcaatgctggaatatcaccagatgtgagtccattgatgccacgtgctatcataggagctctcaaaaagtacaactggggcactcttgaatttgacaccaaggtctgcaagacaaatgtctcatcaaagtcagcaatgcgagctcctggagatgtgcagggctctttcatcgctgaagccatcatcgagcatgttgcctcagcactcgcactagacactaacaccgtcaggaggaagaaccttcatgattttgaaagccttgaagttttctatggagaaagtgcaggtgaagcttctacatacagcctggtttccatgtttgacaagctggccttgtctccagaataccagcacagggctgcaatgattgagcagttcaatagcagcaacaaatggaagaaacgcggcatttcttgtgtgccagccacttatgaggttaatcttcgaccaactccaggcaaggtgtcaatcatgaatgatggttccatcgctgtcgaggttggaggaattgagataggtcaaggattgtggactaaagtgaagcagatgacggcctttggactgggacagctgtgtcctgatggtggcgaatgccttctggacaaggttcgggttatccaggcagacacattaagcctgatccaaggaggtatgactgctgggagcaccacttctgaaactagctgtgaagcagttcggcaatcgtgtgttgcacttgttgagaggctgaagcctatcaaggagagtctcgaagctaagtccaacacagtggaatggagtgccttgattgctcaggtgaggataataacttaactctaactctgttggtaacatgccacttaatatgattgaaagagatgccaagaaataaagttactcaaatctgtttgcctcccttcattccatcattaatgtattgcagtcggtagcaatgtcaaataagtttaaggaactggaactcaatatcaagcagtttaaattattcatgacatttgttcctcatttacaggcaagcatggcgagtgtgaacctatcagcacaggcgtactggactcctgatccatctttcaagagctacttgaactacggagctggcaccagtgaggtggaagttgatatcctaacaggagcaaccacaattctgcgaagcgacctggtgtatgactgcgggcagagcctaaaccctgctgtagacttgggccagatcgagggctgctttgtccaaggaatagggttcttcacgaacgaggactacaagacgaattccgacggcttggtcatccacgacggcacatggacgtacaagatccccacggtggataatatcccgaaggagttcaatgttgagatgtttaacagcgcccctgacaagaagcgtgtcctatcttccaaagcgtcgggcgagccgccgctggttctcgcagcctcggtgcactgcgcgatgagggaggccatcagggcggcgaggaaggagttctcggtcagcaccagccccgcgaaatccgccgtcacattccagatggacgtgccggcgacgatgcccgtcgtcaaggagctctgcggcctcgacgtcgtggagaggtacctcgagaacgtgtctgccgccagtgccggcccaaacacagcgaaagcatagatccagcaggcctcagggtgcagtcggcgcactgccagagatgatgtgtgctgccctgatgtacagacagtacagtacagaggagagagaattgggggaactcaggaactgcgaggagcgatgaacagtatatagagtgaaaaataaaagtgcttcgtactaataatcactagaaaaaattatgcacatctcccacgcactaccggcacgactgttgaatattttgtaaaataagatgtcataagctatttattttctgtatgattagatcagcaaataatttaattcaagtataaatcacagaaatccgctattgtgc

SEQ ID NO: 11396 - DNA, 4845 bp, Zea Mays
cttgacttgacaggccttggcgccttgcactgcagctgcgaagacgctttcgcatcctagccgctggcgacgtcagcgcgtgcatcaacaacactggccggctggctggaggatcggagcaggtcagcgactcgtatatataaacaggagggcaccacaccatcgatcggctccccgcgcagagggcgttgtgttgtgttgtgttgtgttgcgtgctgtggagggggaggaggagatggggaagggggcaggagcagcggagccgtcgacggtggtgctggccgtcaacggcaagcgctacgaggcggccggcgtggctccgtccacgtcgctgctggagttcctccgcagccagacgcccgtcagaggccccaagctcggatgcggcgaaggtggctgcggtgcatgcgtggtcctcgtctccaagtacgacccggccacggacgaggtgaccgagttctctgccagctcctgcctgacgctgctccacagcgtggaccgctgctcagtgaccaccagcgagggaatcggcaacaccagggatggctaccaccccgtgcagcagcgcctctccggcttccacgcctcgcagtgcggcttctgcacacccggcatgtgcatgtccatcttctccgcccttgtcaaggccgacaacaagtccgatcgcccggaccctcctgctggcttctccaagatcactacctcggaggcagagaaggctgtctcgggcaacctttgtcgttgcaccggatacagacccattgttgacacctgcaaaagctttgcctctgatgttgacctcgaggacctaggcctcaactgtttctggaagaagggcgaagaacctgcagaagtcagcaggctgccggggtacaacagcggtgccgtctgcacctttccagagtttctcaaatccgaaatcaagtctactatgaagcaggtgaacgatgtccccattgcagcctcaggtgatggctggtaccatcctaagagcattgaagagcttcacaggttgtttgattccagctggtttgatgacagttctgtgaagattgttgcttcaaacactgggtctggagtgtacaaggatcaggacctctacgacaagtacattgacatcaaaggaatcccagagctttcagtcatcaataaaaacgacaaaggaattgagcttggatcagttgtgtccatctctaaagctattgaagtgctgtcagatggaaatttggtcttcagaaagattgctgatcacctcaacaaagtggcttcaccgtttgttcggaacactgcaaccataggaggaaacataatgatggcacaaaggttgccatttgaatcggatgttgcaaccgtgctcctagctgcgggttcgacagtcacagtccaggtggcttccaaaaggctgtgcttcactctggaggaattcttggaacaacctccatgtgattctaggaccctgctgctgagcatatttatcccagaatggggttcagactatgtcacctttgagactttccgagccgccccacgaccatttggaaatgctgtctcttatgtaaactctgctttcttggcaaggacatcaggcagccttctaattgaggatatatgcttggcatttggtgcctacggagtcgatcatgccatcagagctaagaaggttgaagatttcttgaagggaaaatcgctgagctcatttgtgatacttgaagcaattaaactactcaaagataccgtttcaccatcagaaggcactacacatcatgaatacagggtcagcttggctgtcagtttcttgttcagtttcttatcttcccttgccaacagttcgagtgcaccatcaaatattgatactcccaatgggtcatatactcatgaaactggtagcaatgtggactcacctgagaggcatattaaggttgacagcaatgatttgccaattcgttcaagacaagaaatggttttcagcgatgagtacaagcctgttggcaagccgatcaagaaagtcggggcagagatccaagcatcaggggaggctgtgtacgttgatgatatccctgctcccaaggattgcctctatggagcatttatctacagcacacatcctcatgctcatgtgagaagtatcaacttcaaatcatccttggcttcacagaaggtcatcacagttataaccgcaaaggatattccaagcggtggagaaaatattggaagcagcttcctgatgcaaggagaagcactatttgcagatccaatcgctgaatttgctggtcaaaatattggtgtcgtgattgctgaaacacaaagatatgctaatatggctgcaaagcaagctgttgttgagtatagcacagaaaatctgcagccaccaattctgacaatagaagatgccatccaaagaaacagctacatccaaattcccccatttttagctccaaagccagttggtgactacaacaaagggatggctgaagcagaccacaagattctatcagcagaggtaaaacttgaatcccagtactacttctacatggaaactcaagcagcactagcgattcctgatgaagataactgcataacaatctattcctcgacacaaatgcctgagctcacacaaaatttgatagcaaggtgtcttggcattccatttcacaatgtccgtgtcatcagcagaagagtaggaggaggctttggtggaaaggcaatgaaagcaacgcatactgcatgtgcatgtgcccttgctgccttcaagctgcggcgtccagttaggatgtacctcgatcgcaagacggacatgataatggctggagggagacatccaatgaaggcgaagtactctgttgggttcaagtcagatggcaagatcacagccttgcacctagatcttggaatcaatgctggaatatcaccagatgtgagtccattgatgccacgtgctatcataggagctctcaaaaagtacaactggggcactcttgaatttgacaccaaggtctgcaagacaaatgtctcatcaaagtcagcaatgcgagctcctggagatgtgcagggctctttcatcgctgaagccatcatcgagcatgttgcctcagcactcgcactagacactaacaccgtcaggaggaagaaccttcatgattttgaaagccttgaagttttctatggagaaagtgcaggtgaagcttctacatacagcctggtttccatgtttgacaagctggccttgtctccagaataccagcacagggctgcaatgattgagcagttcaatagcagcaacaaatggaagaaacgcggcatttcttgtgtgccagccacttatgaggttaatcttcgaccaactccaggcaaggtgtcaatcatgaatgatggttccatcgctgtcgaggttggaggaattgagataggtcaaggattgtggactaaagtgaagcagatgacggcctttggactgggacagctgtgtcctgatggtggcgaatgccttctggacaaggttcgggttatccaggcagacacattaagcctgatccaaggaggtatgactgctgggagcaccacttctgaaactagctgtgaagcagttcggcaatcgtgtgttgcacttgttgagaggctgaagcctatcaaggagagtctcgaagctaagtccaacacagtggaatggagtgccttgattgctcaggtgaggataataacttaactctaactctgttggtaacatgccacttaatatgattgaaagagatgccaagaaataaagttactcaaatctgtttgcctcccttcattccatcattaatgtattgcagtcggtagcaatgtcaaataagtttaaggaactggaactcaatatcaagcagtttaaattattcatgacatttgttcctcatttacaggcaagcatggcgagtgtgaacctatcagcacaggcgtactggactcctgatccatctttcaagagctacttgaactacggagctggcaccagtgaggtggaagttgatatcctaacaggagcaaccacaattctgcgaagcgacctggtgtatgactgcgggcagagcctaaaccctgctgtagacttgggccagatcgagggctgctttgtccaaggaatagggttcttcacgaacgaggactacaagacgaattccgacggcttggtcatccacgacggcacatggacgtacaagatccccacggtggataatatcccgaaggagttcaatgttgagatgtttaacagcgcccctgacaagaagcgtgtcctatcttccaaagcgtcgggcgagccgccgctggttctcgcagcctcggtgcactgcgcgatgagggaggccatcagggcggcgaggaaggagttctcggtcagcaccagccccgcgaaatccgccgtcacattccagatggacgtgccggcgacgatgcccgtcgtcaaggagctctgcggcctcgacgtcgtggagaggtacctcgagaacgtgtctgccgccagtgccggcccaaacacagcgaaagcatagatccagcaggcctcagggtgcagtcggcgcactgccagagatgatgtgtgctgccctgatgtacagacagtacagtacagaggagagagaattgggggaactcaggaactgcgaggagcgatgaacagtatatagagtgaaaaataaaagtgcttcgtactaataatcactagaaaaaattatgcacatctcccacgcactaccggcacgactgttgaatattttgtaaaataagatgtcataagctatttattttctgtatgattagatcagcaaataatttaattcaagtataaatcacagaaatccgctattgtgc

SEQ ID NO: 11397 - DNA, 4467 bp, Zea Mays
cgcacctcttgacttgacaggccttggcgccttgcactgcagctgcgaagacgctttcgcatcctagccgctggcgacgtcagcgcgtgcatcaacaacactggccggctggctggaggatcggagcaggtcagcgactcgtatatataaacaggagggcaccacaccatcgatcggctccccgcgcagagggcgttgtgttgtgttgtgttgtgttgcgtgctgtggagggggaggaggagatggggaagggggcaggagcagcggagccgtcgacggtggtgctggccgtcaacggcaagcgctacgaggcggccggcgtggctccgtccacgtcgctgctggagttcctccgcagccagacgcccgtcagaggccccaagctcggatgcggcgaaggtggctgcggtgcatgcgtggtcctcgtctccaagtacgacccggccacggacgaggtgaccgagttctctgccagctcctgcctgacgctgctccacagcgtggaccgctgctcagtgaccaccagcgagggaatcggcaacaccagggatggctaccaccccgtgcagcagcgcctctccggcttccacgcctcgcagtgcggcttctgcacacccggcatgtgcatgtccatcttctccgcccttgtcaaggccgacaacaagtccgatcgcccggaccctcctgctggcttctccaagatcactacctcggaggcagagaaggctgtctcgggcaacctttgtcgttgcaccggatacagacccattgttgacacctgcaaaagctttgcctctgatgttgacctcgaggacctaggcctcaactgtttctggaagaagggcgaagaacctgcagaagtcagcaggctgccggggtacaacagcggtgccgtctgcacctttccagagtttctcaaatccgaaatcaagtctactatgaagcaggtgaacgatgtccccattgcagcctcaggtgatggctggtaccatcctaagagcattgaagagcttcacaggttgtttgattccagctggtttgatgacagttctgtgaagattgttgcttcaaacactgggtctggagtgtacaaggatcaggacctctacgacaagtacattgacatcaaaggaatcccagagctttcagtcatcaataaaaacgacaaaggaattgagcttggatcagttgtgtccatctctaaagctattgaagtgctgtcagatggaaatttggtcttcagaaagattgctgatcacctcaacaaagtggcttcaccgtttgttcggaacactgcaaccataggaggaaacataatgatggcacaaaggttgccatttgaatcggatgttgcaaccgtgctcctagctgcgggttcgacagtcacagtccaggtggcttccaaaaggctgtgcttcactctggaggaattcttggaacaacctccatgtgattctaggaccctgctgctgagcatatttatcccagaatggggttcagactatgtcacctttgagactttccgagccgccccacgaccatttggaaatgctgtctcttatgtaaactctgctttcttggcaaggacatcaggcagccttctaattgaggatatatgcttggcatttggtgcctacggagtcgatcatgccatcagagctaagaaggttgaagatttcttgaagggaaaatcgctgagctcatttgtgatacttgaagcaattaaactactcaaagataccgtttcaccatcagaaggcactacacatcatgaatacagggtcagcttggctgtcagtttcttgttcagtttcttatcttcccttgccaacagttcgagtgcaccatcaaatattgatactcccaatgggtcatatactcatgaaactggtagcaatgtggactcacctgagaggcatattaaggttgacagcaatgatttgccaattcgttcaagacaagaaatggttttcagcgatgagtacaagcctgttggcaagccgatcaagaaagtcggggcagagatccaagcatcaggggaggctgtgtacgttgatgatatccctgctcccaaggattgcctctatggagcatttatctacagcacacatcctcatgctcatgtgagaagtatcaacttcaaatcatccttggcttcacagaaggtcatcacagttataaccgcaaaggatattccaagcggtggagaaaatattggaagcagcttcctgatgcaaggagaagcactatttgcagatccaatcgctgaatttgctggtcaaaatattggtgtcgtgattgctgaaacacaaagatatgctaatatggctgcaaagcaagctgttgttgagtatagcacagaaaatctgcagccaccaattctgacaatagaagatgccatccaaagaaacagctacatccaaattcccccatttttagctccaaagccagttggtgactacaacaaagggatggctgaagcagaccacaagattctatcagcagaggtaaaacttgaatcccagtactacttctacatggaaactcaagcagcactagcgattcctgatgaagataactgcataacaatctattcctcgacacaaatgcctgagctcacacaaaatttgatagcaaggtgtcttggcattccatttcacaatgtccgtgtcatcagcagaagagtaggaggaggctttggtggaaaggcaatgaaagcaacgcatactgcatgtgcatgtgcccttgctgccttcaagctgcggcgtccagttaggatgtacctcgatcgcaagacggacatgataatggctggagggagacatccaatgaaggcgaagtactctgttgggttcaagtcagatggcaagatcacagccttgcacctagatcttggaatcaatgctggaatatcaccagatgtgagtccattgatgccacgtgctatcataggagctctcaaaaagtacaactggggcactcttgaatttgacaccaaggtctgcaagacaaatgtctcatcaaagtcagcaatgcgagctcctggagatgtgcagggctctttcatcgctgaagccatcatcgagcatgttgcctcagcactcgcactagacactaacaccgtcaggaggaagaaccttcatgattttgaaagccttgaagttttctatggagaaagtgcaggcaaggtgtcaatcatgaatgatggttccatcgctgtcgaggttggaggaattgagataggtcaaggattgtggactaaagtgaagcagatgacggcctttggactgggacagctgtgtcctgatggtggcgaatgccttctggacaaggttcgggttatccaggcagacacattaagcctgatccaaggaggtatgactgctgggagcaccacttctgaaactagctgtgaagcagttcggcaatcgtgtgttgcacttgttgagaggctgaagcctatcaaggagagtctcgaagctaagtccaacacagtggaatggagtgccttgattgctcaggcaagcatggcgagtgtgaacctatcagcacaggcgtactggactcctgatccatctttcaagagctacttgaactacggagctggcaccagtgaggtggaagttgatatcctaacaggagcaaccacaattctgcgaagcgacctggtgtatgactgcgggcagagcctaaaccctgctgtagacttgggccagatcgagggctgctttgtccaaggaatagggttcttcacgaacgaggactacaagacgaattccgacggcttggtcatccacgacggcacatggacgtacaagatccccacggtggataatatcccgaaggagttcaatgttgagatgtttaacagcgcccctgacaagaagcgtgtcctatcttccaaagcgtcgggcgagccgccgctggttctcgcagcctcggtgcactgcgcgatgagggaggccatcagggcggcgaggaaggagttctcggtcagcaccagccccgcgaaatccgccgtcacattccagatggacgtgccggcgacgatgcccgtcgtcaaggagctctgcggcctcgacgtcgtggagaggtacctcgagaacgtgtctgccgccagtgccggcccaaacacagcgaaagcatagatccagcaggcctcagggtgcagtcggcgcactgccagagatgatgtgtgctgccctgatgtacagacagtacagtacagaggagagagaattgggggaactcaggaactgcgaggagcgatgaacagtatatagagtgaaaaataaaagtgcttcgtactaataatcactagaaaaaattatgcacatctcccacgcactaccggcacgactgttgaatattttgtaaaataagatgtcataagctatttattttctgtatgattagatcagcaaataatttaattcaagtataaatcacagaaatccgctattgtgc

SEQ ID NO: 11398 - DNA, 7827 bp, Zea Mays
gcgcgcgggcaggcgtgtggcgcggctgtgtcgtctgtgagtgcatgcgaggcctccggttccggctctctctctcggtgcagttcgtccgggagggggagagcgaggtggagtggtgctaagccaagccaactagatcgagtcgtcaagaaggttggagaggagagatcgagatggggaagcaggcggcggtggtgctggccgtgaacggcaagcggtacgaggccgccggcgtggacccgtcgacgacgctgctggagtacctgcgcacccagacgcccgtcaggggccccaagctcggctgcggcgaaggtggctgcggtgcatgtgtcgtccttgtctccaagtatgacccggccaccgacgaggtgaccgagttctcagcgagctcctgcctgacgcttctccacagcgtggaccgctgctcggtgaccaccagcgagggcattggcaacaccaaggatggctaccaccctgtgcagcagcgcctctccggcttccacgcctcccagtgcgggttctgcacgcccggcatgtgcatgtccatcttctccgcgcttgtcaaggctgacaaggcggccgaccgcccagccccgcctgccggcttctccaagctcacttcctccgaggctgagaaggccgtctccggcaacctgtgccggtgcaccgggtacaggcccatcgtcgacgcctgtaagagcttcgcggccgacgttgatctcgaggacctgggcctcaactgcttctggaagaaaggtgacgagcctgcagatgtcagcaagctgccaggctacgacagtggtgccgtctgcactttccccgagtttctcaaatctgagatcaagtcctcagtcgagcaggttaacggcgctccagttcctgtttctgacgacggctggtaccgtcccaagagcattgacgagcttcacaggctgtttcaatctgagtccttcgatgaaaattctgtcaagatagtagcttcaaacactgggtccggggtgtacaaggatcaagaccttcatgacaagtacattgacatcaaagaggtcccagagctttcagtcatcaacagaagcaacaagggggtcgagcttggatcagttgtgtccatctctaaagcgattgaggtgctgtcagatggaaatgtggttttcgaaaagattgcagatcacctgaacaaagtggcctctccgtttgttcggaacacagcaaccattggtggaaacatcattatggcgcaacggttgcaatttccctcggacattgtgactgtactactagctgcaggtacaactgtcactatccaggtggtttccaaaaggctttgcctcaccttggaggagttcttgcagcagcctccatgtgattctagaaccctgttgctgagtatatttatcccctattggagttcagatggcatcacctttgagaccttccgagcagcacctcgtccacttggcaatgctgtcgcatacgtcaattcagctttcttggcaaggacttcagtggatgcagcatcaagggaccatctcattgaggatacatgtttggtgttcggtgcatatgggactgatcatgctattagagctagcaaggttgaggattacctgaagggcaaaacagtgagctcgactgttatacttgaagctgttcggttgcttaaagcgactgtcaaaccatcagaaggcacaacacatcctgagtatagaatcagcttggccgtcagcttcttgtttaccttcctatcttcccttgtcaacaatgagtcaacaaaggttaatggtcccaacgggtcatgtagtaatggagccacaaacggtgcccttgagcactcaccagagaagcatcttaagtttgacagcaacgatttgccgatacggtcaagacaagaaatatttttaactgatgaatacaagccagttggaaaaccaattaagaaagcaggtgcagagatccaagcttcaggggaagctgtgtacgttgatgatatccccgctcccaaagattgcctctatggagcatttatctacagcacccaccctcatgcccatgtaaaggctatcaactttaaatcatctttggcctcgcagaaggtcatcacagttatcaccgcaaaggatattcccagtggtggacaaaatattggttccaccttcccgatgatgggagacgaagcactttttgcagatccagttactgaatttgctggtcagaatattggtgttgtgattgctgaaacacagaagtatgcctacatggctgcaaagcaagccattattgagtatagcacagaaaatctgcagccaccaattctgacgatagaagatgcgatccaacgaaacagctacttccaagtccccccatttttagctcctaagccagttggtgattacaacaaagggatggctgaagctgatcaaaagattctatcagcggaggtaaaacttgaatcccaatactatttctacatggagacacaagtggcgctagctattcctgatgaagataactgtataaccatctattcttcgacacaaattcccgaggtcacacaaaatgtggttgcaaagtgccttggcattccatttcacaatgtccgcctcatcagcagaagagtcggaggaggctttggtggaaaggcaatgaaagcaatacatgttgcatgtgcatgtgcggttgctgcattcaagctgcggcgtccagttcggatgtacctggatcgcaagacagacatgataatggcaggcggtcggcatcctatgaaggtgaagtactctgttgggttcaagtcagatggcaagatcacagccttgcacattgatcttgggatcaatgctggaatatcaccggatgtgagcccaatgttgccacctgctatcataggtgctctcaaaaagtacaactggggcaatcttgcatttgataccaaggtctgcaagacaaatgtctcatcaaaatcagcaatgaggggtcctggagatgttcagggctctttcatcgctgaagccatcattgagcatgttgcctcagcactttcagtcgacactaacaccataaggaggaagaaccttcatgactttgagagccttgtggtgttcttcgaagatgctgcaggtgaagcttctacctacagcttagttacgatgttcgataagctggcctcctctccagaataccagcgccgagctgcaatggtggagcacttcaacagaagcaacaagtggaagaagcgtggcatttcttgtgtgccaattacatatgaggtcaatcttcggccaactccaggcaaggtgtctatcatgaatgatggttccatcgttgttgaggtcggaggggttgagataggccaagggttgtggacaaaagtgaagcagatgacggcattcggattgggacagctgtgccctgacggcggcgaaagcctcctggacaaggtccgggtcatccaggccgatacattgagcatgatccagggagggttcaccggtgggagcaccacttctgaaactagctgcgaagctgttcgacagtcgtgtgttgcgctggttgagagactgaagcccatcaaggagaatctggaagctgaggcaggcacagtggaatggagttccttgattgctcaggcaagtatggcgagtgtgaacttatcggcacatgcatactggaccccagatccaactttcagaagctatttaaactacggagctggcattagtgaggtggaaattgatgtgctgacaggagcaacaacaattctaaggagtgaccttgtctacgattgcgggcaaagcttgaaccctgctgtcgacttgggccaggtggaaggcgcattcatccaaggagtaggcttctttacaaacgaggagtacacaacaaactctgaggggttggtcatccacgatggcacatggacgtacaagatccccacagtcgacaccatcccaaagcagttgaacgttgagctgatcaacagcgcccgtgaccagaagcgtgtcctctcttccaaagcatccggcgagcctccgcttcttctagctgcctcggtgcactgcgcaatgagggaggccatcagagccgccaggaaggaattctcggtctgcactggtccagcaaactctgccatcacgttcgagatggacgtgccggcgacgatgcccatcgtcaaggagctctgcggcctggatgttgtggagaggtacctggagagcatgtccactgccggaccaacaaccactgccaaagcatagatccagcaggtgcaccgcccatgaagacgaggtagcaatgggagctgtggtcttgtgaatcaggatccatgaacattagaggaaaaaataaagtaaataagtgtcgggcagacaaatgtgtggatgaaatcatgtggttttgattggattttgaagaaatttttgcaatgaatctccgttcatactcctaggtgtgtacctgcctactgggtacatgggggataggattgtaccatccagctaggtttggccttgctgtctcgttgtgaccttcaccggtagctactccctgcgcacctatttgaactagcagagcagtgttgtgaccttcaccggtagctacttactccctgcgctgcgcacctatttgaactagcagagctaaaattactaaggaagacatatcaactagtaatgctatgggctaaattgctccaacctgtttgaactcagcctaaactaagatgggcactacatgtaaatagtactccatctgtttcgtttcaaaatagtagtcgttttagctctagatttttatttttatattcatatggatgataacgaatctagacacatatatagaacacatatattaattattgtatgaatctactacaagagtaatgaattttaatttgagacggagagagtaatgtactagaaaccataggcacggcgttgccgcaccagcttgggctctcccatcggagaacctgtaggagtgtaggtacagatgtacagtattttctattggtcaatttgttcttgtcattaatttttaaagtcgtatctgtaatggttgacgactgataagcagaaaagtgccaaaagtaaatggattgcacagcatacaactaatcatgcatgcatcgctctaaatctataatatagaatagggagagtgacgcatggaaatctcaaccatgcacctgatgataattacagttagtccttgcttatattatagaaatttgcctactgtcctcttaaagcaacacaaaagaagaataacgtttagctattgaatttaatagaccaaagggagaactgagcaaacaacttttttttgaaatttaaacatacaactacaatgtttccaatatgcttagtacaaatatatgcagctcacctgcttgttcttgagaaaaaacttcaaataaatgtagactattgtgttacatatgaacacactgctcagagtggacgaaaagttacagtgctaattcttgtggttgtagcttcacctgcagcaaagtgttattgtcttatagtagaagtggaatgtgaatgtgaaaattcaaaaacaaaaatgggttgatcttaagaactctggaaagagacatcatggtaagcaggcagctcaagccaaagaatagtatattctagtccatctcaggaaaaacctacattactactataaaaatattcacaagacaaggtcaacacatcagtgacggcttcagctgcctaggtaaaaaaagacaacagcattaagattttgtggcaaagtagacgataatctcaaattgtcaccggacaccttttttggatagaacgagagaaaaaataaaagaaatccttactgagaattcacaccattgtgccttattctgtctaaggtcaagaactggttgtgatgatcatctggtatatattgttaagccatgagatctgactctacatctcaagggtcatagcctagaattgcttccaatacgtgcacaaaataacaatgtagtgatgggaagtatcacaaaaaaaagcaatctgattttcgcactatacaagattagaagaaaaaacacgaagtgttagtgaaatttgcattagcatctggttatggtaagctaaaaataaggaatcaatcaatggacagtaccaatgaggtcttaattatgacaaacggccaagctattagcacatccgcacatgttgtgtgaagttctagaagaaagtgcttaatcaccaagctgttcccttcttgtagaacttgtaacaatgtcaatatatcagatgtaggagtagccgaatgtatctcttatggattagctaaaacttcatagcatctataatttagagaaattaggaattgtgcaataaaataagattccttcattttagatgcgattttcggaacaaaaatattgagatatcataaacttaccaacagaagttgttagcctacaaaaaagtctgcagtagttagcacatggacatttatttgttcaaacagctaggagcgggggaggccaaggcaggcataggagaggaaggagactggacaagtaccatccagcttcctggttcctgagcttgcctcccattacgtacattgtggagcctcttaggctgtctgcaccagatcgtgtaaaataagggatttgtactgtagattatattgtttgcagagtaaaatttaaaataggggataagataggggatggaataggataactgctggagacagccttaggtattttgtcgtcgtcggatgaagactggtgattttgaataaatactccctctattccaaaataaaattcgttttaaccttttaatgagttcatacaatacttggtgtatgtgttctatatatgtgtctacattcattatcatctagttgaatatagacatataaatcaagagctaaaacaaatattatttgggatggagagagtaaatggtaagcaagaattctgaagtcgaattttggagccagtaatattgcaactcgtggaatgcctttgtgaaaacattataacacttaattcacatggacaatcccatatgtttcagataatctgcaacaccaaaataagtttacgaccttcaaagaaaagtacggttggttgtattgtatatacaactatgcattcaatgagttaagttgattaataaattgtatagaatatagccacgaaaggacatccaggtaacaggaacacaatcatttgcttgagcaacagtcaatcaatattatgaatgtaaaacttcgtattcagaagcaatgaccctcagcaagcttgcatcatgctcccttgaatcaaaaataacattctgtgtttcacacaaaattattagctccgtaagtgctgttcagctccaactcctagaaagtagagacgataactattcagagagcaccttaccttgctggcatttcctcgagccgctgttgggcgtcgtccagtccatctgcaagggcgcgcttaccggcacgctctgtggcacgggaagccgcacaggggcgcgcgaggatgcagcgtgtgtgtcactggtgtcctccctggcctttttttcatcgtgtgcatcttacgcggcggtgacgcggacctggggttctccgcgggcgacaggtagcggtagacaggccggaggcaggagccgagggacgccggtgcctttggcttggggacggggtggaggagtggagcatggccgccgaggaagcagcgaatatggagacgatcggcacgaccgcacgtggaggggcaagcgggttcccagcacggtggacgcggcgcgggacgccgggacctcagcgcgcggcgattagcgcgtgcggcctgccgagtttttt

SEQ ID NO: 11399 - DNA, 1999 bp, Zea Mays
gacagacctaccattatttgtgctcgctgccagtagtatttatcctgtgtggttagttcaggtatcaggtttctagttacaagggagtactcactaattttttttagagatatctagttgttcttctaattgctttgaatggttgatcagtgttacaaatgagaatatgagatctcttaaagtgcattagtttcagtttccacattacttagatgttctagataagctacatgctgtatcatggagccaatgcattgatgggatgggtcttctctgacaaagggaacttctggtgaaggtggtagggactagagaatctgtaacctatatgcttacatgtgggcttgaaaagtggggactctgtgcgcctgctgtctattagaataactctatgttggtgggttctctcatcctatgataactagttgtctatcagcccctcccaaaggtgcagctgtgcaagtatattaatatcgtcctttttctggcggctcttctatgcccaagtaattcataaatagtaaacatatcttttccagattgtttagttttttttaataaaatgtgcctgcctgtttgcttttacttagacttttactccctgcatttgaccaagtttgcttctgaaaagtacccatgtttaattgtccttatttaaattttcaggggctataaaaggttctttcggcgtaatgctcttgagcaatcagattttcttaaagatgattgcttgaagataaactgtactgtgggtgttgtagtatcaactatggattattccaggccacattcaatagaggttccagagtctgacataggctatcattttggaactcttttggacactctggaaggtgtagatgtcatttttagtgtagcaggagagaagtttcatgcccataagttggtattggctgcccgatcttccttttttagatctgaatttttcgaccatgaatctgatgaagagaagaacgaaactggtacaggggatgaaatcaaggagatcgttattgatgatatggatcctgtagtgttcaaggcggtgcttcactttatgtacagggacaatcttgttaatgatgatgagttgatggcatcaagctctgactgctctatatttgatagtttagctgggaagttaatggctgctgcagacaaatatgagttgccaaggctaagattgttgtgtgaatcttacttgtgcaagcatgtttctgtaaactccgtggcaactactctagcattggctgatcgataccatgctatcgagcttaaatctgtttgcctaaaatttgctgctgaaaacctttcggatgcccttatgtatctgcagctgtgatccggaccgaggggttcgactatctcaaagacaactgcccatccctgcagtcagagatactgcggacagttgccggatgtgaggaacaatgtagcagcggcgtgaaaagccagagcgtatgggcgcagctctctgacggcggcgacaccagcggtcgcagggatgttttttcttaaccaagcaaaaactactagtcgttcacaacttctgatcgtgtcgtcatcaacgaccacgtgcaggcggacgcgatgaactcacagaagggcgacccgagttgacggtggtttaaacagacacaatgaagctaatcgttcacaacttcagtacaaaactacacaggcaagacactgcctgatacagtgcgatagccgctgccatcctctcttcgcttcgcgggtggcaacccaatgccttgaggttttgctcaaccaaatgtcgccaccaggaactccttgtaaacgctcatgaacttggccacgaaagctgtagagtggaatgggggaataagttaagtatatatggcttctgtattaataatcattatgcaaatctaagacacgcagatactaaaagcaaataagaacaatcgtgggcattcatatacatgtaccaactgattttgttccagattaatgataagaccaactcatataaacg

SEQ ID NO: 11400 - DNA, 1916 bp, Zea Mays
agctggcattgtcccgtcccctgtcgacttcctctccatttcatttccgttccaggtctcctgtttccatcctcttccacggttccacttccacccccatctcctcgccctcggcaagcccagcaaccccaatccccaatcccgtccgcttctttccccgtccccgaccttgccgaggaacctcccgctcccaaatcctagcctctcctccctcgccgctcccctccccatggaggacgaggacgccggcctcggcgacgggggcgaggcctcccctccgcaccatgccgcggcgtcgggcgaccgggcgcgggacttggcggcgtccccgaccagctcgcgctccgtgacgcagacggtgaacgggtcccaccgcttcgtgatccagggctactcgctcgccaagggcatgggcgtggggaagcacatcgccagcgacaccttcaccgtcggcggctaccagtgggcgatctacttttacccagacgggaagaaccccgaggacaactccggctacgtctcggtcttcatcgcgctcgcgtccgacggcaccgacgtgcgcgcgctcttcgagctcacgcttctagaccagagtggcaagggcaagcacaaggtgcactcgcactttgaccgctccctagagtccggaccgtacactctcaagtaccgcggatccatgtggggctataaaaggttctttcggcgtaatgctcttgagcaatcagattttcttaaagatgattgcttgaagataaactgtactgtgggtgttgtagtatcaactatggattattccaggccacattcaatagaggttccagagtctgacataggctatcattttggaactcttttggacactctggaaggtgtagatgtcatttttagtgtagcaggagagaagtttcatgcccataagttggtattggctgcccgatcttccttttttagatctgaatttttcgaccatgaatctgatgaagagaagaacgaaactggtacaggggatgaaatcaaggagatcgttattgatgatatggatcctgtagtgttcaaggcggtgcttcactttatgtacagggacaatcttgttaatgatgatgagttgatggcatcaagctctgactgctctatatttgatagtttagctgggaagttaatggctgctgcagacaaatatgagttgccaaggctaagattgttgtgtgaatcttacttgtgcaagcatgtttctgtaaactccgtggcaactactctagcattggctgatcgataccatgctatcgagcttaaatctgtttgcctaaaatttgctgctgaaaacctttcggctgtgatccggaccgaggggttcgactatctcaaagacaactgcccatccctgcagtcagagatactgcggacagttgccggatgtgaggaacaatgtagcagcggcgtgaaaagccagagcgtatgggcgcagctctctgacggcggcgacaccagcggtcgcagggcggacgcgatgaactcacagaagggcgacccgagttgacggtggtttaaacagacacaatgaagctaatcgttcacaacttcagtacaaaactacacaggcaagacactgcctgatacagtgcgatagccgctgccatcctctcttcgcttcgcgggtggcaacccaatgccttgaggttttgctcaaccaaatgtcgccaccaggaactccttgtaaacgctcatgaacttggccacgaaagctgtagagtggaatgggggaataagttaagtatatatggcttctgtattaataatcattatgcaaatctaagacacgcagatactaaaagcaaataagaacaatcgtgggcattcatatacatgtaccaactgattttgttccagattaatgataagaccaactcatataaacg

SEQ ID NO: 11401 - DNA, 2014 bp, Zea Mays
agctggcattgtcccgtcccctgtcgacttcctctccatttcatttccgttccaggtctcctgtttccatcctcttccacggttccacttccacccccatctcctcgccctcggcaagcccagcaaccccaatccccaatcccgtccgcttctttccccgtccccgaccttgccgaggaacctcccgctcccaaatcctagcctctcctccctcgccgctcccctccccatggaggacgaggacgccggcctcggcgacgggggcgaggcctcccctccgcaccatgccgcggcgtcgggcgaccgggcgcgggacttggcggcgtccccgaccagctcgcgctccgtgacgcagacggtgaacgggtcccaccgcttcgtgatccagggctactcgctcgccaagggcatgggcgtggggaagcacatcgccagcgacaccttcaccgtcggcggctaccagtgggcgatctacttttacccagacgggaagaaccccgaggacaactccggctacgtctcggtcttcatcgcgctcgcgtccgacggcaccgacgtgcgcgcgctcttcgagctcacgcttctagaccagagtggcaagggcaagcacaaggtgcactcgcactttgaccgctccctagagtccggaccgtacactctcaagtaccgcggatccatgtggggctataaaaggttctttcggcgtaatgctcttgagcaatcagattttcttaaagatgattgcttgaagataaactgtactgtgggtgttgtagtatcaactatggattattccaggccacattcaatagaggttccagagtctgacataggctatcattttggaactcttttggacactctggaaggtgtagatgtcatttttagtgtagcaggagagaagtttcatgcccataagttggtattggctgcccgatcttccttttttagatctgaatttttcgaccatgaatctgatgaagagaagaacgaaactggtacaggggatgaaatcaaggagatcgttattgatgatatggatcctgtagtgttcaaggcggtgcttcactttatgtacagggacaatcttgttaatgatgatgagttgatggcatcaagctctgactgctctatatttgatagtttagctgggaagttaatggctgctgcagacaaatatgagttgccaaggctaagattgttgtgtgaatcttacttgtgcaagcatgtttctgtaaactccgtggcaactactctagcattggctgatcgataccatgctatcgagcttaaatctgtttgcctaaaatttgctgctgaaaacctttcggatgcccttatgtatctgcagctgtgatccggaccgaggggttcgactatctcaaagacaactgcccatccctgcagtcagagatactgcggacagttgccggatgtgaggaacaatgtagcagcggcgtgaaaagccagagcgtatgggcgcagctctctgacggcggcgacaccagcggtcgcagggatgttttttcttaaccaagcaaaaactactagtcgttcacaacttctgatcgtgtcgtcatcaacgaccacgtgcaggcggacgcgatgaactcacagaagggcgacccgagttgacggtggtttaaacagacacaatgaagctaatcgttcacaacttcagtacaaaactacacaggcaagacactgcctgatacagtgcgatagccgctgccatcctctcttcgcttcgcgggtggcaacccaatgccttgaggttttgctcaaccaaatgtcgccaccaggaactccttgtaaacgctcatgaacttggccacgaaagctgtagagtggaatgggggaataagttaagtatatatggcttctgtattaataatcattatgcaaatctaagacacgcagatactaaaagcaaataagaacaatcgtgggcattcatatacatgtaccaactgattttgttccagattaatgataagaccaactcatataaacg

SEQ ID NO: 11402 - DNA, 2228 bp, Zea Mays
gaaccaaatccagcacctctctcccctcccccttcctcccgtcccccgtcgacagtcgcatcgcaccctatcctccccagtccccaccagtccaccaccctctccccgcctcccgctgcgaccaccgcaccggcgaacttggagggccgctcggcgctgcacaccaagccggggatggccgccgcgcttgcgagctcgccgcttgttcacctaactacctcccgcctccgcctccccaggccccaggcctccgcttctagttcgggtccagtctgctcgatcggcgtgtgcttgggatggaggctgaaggtcgggtggagggccctgaggcggcgcgaccggcttcgatgcttctccaccgacgggggcggcggggaggagggggaaaagcgtggcgaggaggagacatcggcaacggcggcggcatccccggcctcggttccagcggagacacaggtgggcgctggggaggagctggcgtccgagcggagtcggtcagggagcttttcttcctcatcctcgtcgtccgggactcctggtgtatcaagcgagccaccgctgttgagttttagtgttgataatatcgatacagttaaactgttggaacttctaggcccagaaaaggttgatccagttgatgtcaaggcaattaaggaaaaactctttggttatacgacattctggttgacaaaagaagaaccttttggtgatcttggtgaaggagttcttttcattgggaacctccgtgggaagagagaggaaatctttgcaaaacttcaacggcaagtacgtgaacttaccggtgataaatacaatctttttatggtggaggaacccaattcagaaggggatgacccacgtgggggaccacgtgttagttttggtttgcttaggaaggaagttttctgagccaggacctactacgctatggcagtatgtcatttctctgttacttttccttctcactatgttctcctgcattgagctaggaattgcatcaaagattagcagtcttccaccagaaattgtttcatatttcactgatccaaatgctaccggaccccctcctgacatgcaacttctgctcccatttgtggagtcggctttgccagtggcttacggaaattgggcactttttggcagcatttccaaaaaatgttaaactgggaattcctttctttattccgaacttcacccttggaacttttggtgcaattactcagttcaagtccattcttccggatcgaaagacaatgtttgacatatcaatggctggtcctgtggctggagctgcactttccttttcaatgttctttgttggcttattactctcttcaaatcctgttggggcaagtgatttagtggaagtacctagtcagctgttccagggttcattgttgcttggacttattagtagagcaacgcttggatacagagctatgcatgctgctacagtttcgatccaccctcttgtgattgcaggctggtgcggtttaactactagtgcatttaatatgcttcctgttggttgtcttgatggtggaagagcattacagggtgcttttggcaaggatgctttgtttggatttggcctcacaacatattcgttgcttggactaggagtgcttggagggccactgtctcttccttggggtttgtacgtgctaatatgtcagagaacacccgagaaaccatgcttgaacgacgtgagcgatgttggaagttggaggagggcggccttgatagcttcagtatttcttgttgttttgacgctcattccgttgtgggatgaacttgcggaggaactaggtgtagggcttgtttcttcgttctgagatgcggtgcttaccgatagaattaggccgtgatgtagttcagttttgtgttgaaatgtagcttcccacggtggaattgttgtaaaggtatgtggaatttccggattaggtgagcaatgatatcgcttatgcgagtgtaatgaaattgtgccaagtatagacgctaacgattaccaattacatacatgtatgctcacttaaccatacagttttgtgttgtaaactagaatgtatggatttataaaaatgagaataggcatgtcaagtccaggacttgaaatctggctaggcaggttatgctgaatcagacgcggcacttgataaagaaatattttcacagtttactctaggacgctgagatatgcttaagtctatgtataatatgggtttcag

SEQ ID NO: 11403 - DNA, 2773 bp, Zea Mays
gaaccaaatccagcacctctctcccctcccccttcctcccgtcccccgtcgacagtcgcatcgcaccctatcctccccagtccccaccagtccaccaccctctccccgcctcccgctgcgaccaccgcaccggcgaacttggagggccgctcggcgctgcacaccaagccggggatggccgccgcgcttgcgagctcgccgcttgttcacctaactacctcccgcctccgcctccccaggccccaggcctccgcttctagttcgggtccagtctgctcgatcggcgtgtgcttgggatggaggctgaaggtcgggtggagggccctgaggcggcgcgaccggcttcgatgcttctccaccgacgggggcggcggggaggagggggaaaagcgtggcgaggaggagacatcggcaacggcggcggcatccccggcctcggttccagcggagacacaggtgggcgctggggaggagctggcgtccgagcggagtcggtcagggagcttttcttcctcatcctcgtcgtccgggactcctggtgtatcaagcgagccaccgctgttgagttttagtgttgataatatcgatacagttaaactgttggaacttctaggcccagaaaaggttgatccagttgatgtcaaggcaattaaggaaaaactctttggttatacgacattctggttgacaaaagaagaaccttttggtgatcttggtgaaggagttcttttcattgggaacctccgtgggaagagagaggaaatctttgcaaaacttcaacggcaagtacgtgaacttaccggtgataaatacaatctttttatggtggaggaacccaattcagaaggggatgacccacgtgggggaccacgtgttagttttggtttgcttaggaaggaagttttctgagccaggacctactacgctatggcagtatgtcatttctctgttacttttccttctcactatgttctcctgcattgagctaggaattgcatcaaagattagcagtcttccaccagaaattgtttcatatttcactgatccaaatgctaccggaccccctcctgacatgcaacttctgctcccatttgtggagtcggctttgccagtggcttacggtgtcttgtctatccaactatttcatgtaatttgtaccctaaatatgttgagcatctttttgtccattaatttatatttgcttattagttccttttaacctgtaaagaagctacgtgaacagcatatgatcttttcgatcaattcaatgttaccatgtttgcttcaatgtgccaccaatagcgtatttttggtgaaatcgactttacaggttttatttgtcttggattagtgaattcccttattcagaattattttccaactggttccaatgttgaaagcattctttcttagaggtctttatatcaaactcaaatttgataagagtttttcttcagaaaggactttgtattgtttatagtctcacaaaggattaatttgaagcacactataaaaagcaataaccctacatgtaaatgaattgtactttggccaaggatcctttaaccttatgaaagttaacatggctgtagaaccgttttttttacgtggcctcttcttttggcacattttaattctacctaatatgccaacgttctgcatgcaggaaattgggcactttttggcagcatttccaaaaaatgttaaactgggaattcctttctttattccgaacttcacccttggaacttttggtgcaattactcagttcaagtccattcttccggatcgaaagacaatgtttgacatatcaatggctggtcctgtggctggagctgcactttccttttcaatgttctttgttggcttattactctcttcaaatcctgttggggcaagtgatttagtggaagtacctagtcagctgttccagggttcattgttgcttggacttattagtagagcaacgcttggatacagagctatgcatgctgctacagtttcgatccaccctcttgtgattgcaggctggtgcggtttaactactagtgcatttaatatgcttcctgttggttgtcttgatggtggaagagcattacagggtgcttttggcaaggatgctttgtttggatttggcctcacaacatattcgttgcttggactaggagtgcttggagggccactgtctcttccttggggtttgtacgtgctaatatgtcagagaacacccgagaaaccatgcttgaacgacgtgagcgatgttggaagttggaggagggcggccttgatagcttcagtatttcttgttgttttgacgctcattccgttgtgggatgaacttgcggaggaactaggtgtagggcttgtttcttcgttctgagatgcggtgcttaccgatagaattaggccgtgatgtagttcagttttgtgttgaaatgtagcttcccacggtggaattgttgtaaaggtatgtggaatttccggattaggtgagcaatgatatcgcttatgcgagtgtaatgaaattgtgccaagtatagacgctaacgattaccaattacatacatgtatgctcacttaaccatacagttttgtgttgtaaactagaatgtatggatttataaaaatgagaataggcatgtcaagtccaggacttgaaatctggctaggcaggttatgctgaatcagacgcggcacttgataaagaaatattttcacagtttactctaggacgctgagatatgcttaagtctatgtataatatgggtttcag

SEQ ID NO: 11404 - DNA, 2255 bp, Zea Mays
cttcgactttggacgctggaaagtggaaagcatcgccggctcgccgccaaactcgctgccacgtcggtccgaaccaaatccagcacctctctcccctcccccttcctcccgtcccccgtcgacagtcgcatcgcaccctatcctccccagtccccaccagtccaccaccctctccccgcctcccgctgcgaccaccgcaccggcgaacttggagggccgctcggcgctgcacaccaagccggggatggccgccgcgcttgcgagctcgccgcttgttcacctaactacctcccgcctccgcctccccaggccccaggcctccgcttctagttcgggtccagtctgctcgatcggcgtgtgcttgggatggaggctgaaggtcgggtggagggccctgaggcggcgcgaccggcttcgatgcttctccaccgacgggggcggcggggaggagggggaaaagcgtggcgaggaggagacatcggcaacggcggcggcatccccggcctcggttccagcggagacacaggtgggcgctggggaggagctggcgtccgagcggagtcggtcagggagcttttcttcctcatcctcgtcgtccgggactcctggtgtatcaagcgagccaccgctgttgagttttagtgttgataatatcgatacagttaaactgttggaacttctaggcccagaaaaggttgatccagttgatgtcaaggcaattaaggaaaaactctttggttatacgacattctggttgacaaaagaagaaccttttggtgatcttggtgaaggagttcttttcattgggaacctccgtgggaagagagaggaaatctttgcaaaacttcaacggcaagtacgtgaacttaccggtgataaatacaatctttttatggtggaggaacccaattcagaaggggatgacccacgtgggggaccacgtgttagttttggtttgcttaggaaggaagttttctgagccaggacctactacgctatggcagtatgtcatttctctgttacttttccttctcactatgttctcctgcattgagctaggaattgcatcaaagattagcagtcttccaccagaaattgtttcatatttcactgatccaaatgctaccggaccccctcctgacatgcaacttctgctcccatttgtggagtcggctttgccagtggcttacggtgtcttgtctatccaactatttcatgaaattgggcactttttggcagcatttccaaaaaatgttaaactgggaattcctttctttattccgaacttcacccttggaacttttggtgcaattactcagttcaagtccattcttccggatcgaaagacaatgtttgacatatcaatggctggtcctgtggctggagctgcactttccttttcaatgttctttgttggcttattactctcttcaaatcctgttggggcaagtgatttagtggaagtacctagtcagctgttccagggttcattgttgcttggacttattagtagagcaacgcttggatacagagctatgcatgctgctacagtttcgatccaccctcttgtgattgcaggctggtgcggtttaactactagtgcatttaatatgcttcctgttggttgtcttgatggtggaagagcattacagcttggagggccactgtctcttccttggggtttgtacgtgctaatatgtcagagaacacccgagaaaccatgcttgaacgacgtgagcgatgttggaagttggaggagggcggccttgatagcttcagtatttcttgttgttttgacgctcattccgttgtgggatgaacttgcggaggaactaggtgtagggcttgtttcttcgttctgagatgcggtgcttaccgatagaattaggccgtgatgtagttcagttttgtgttgaaatgtagcttcccacggtggaattgttgtaaaggtatgtggaatttccggattaggtgagcaatgatatcgcttatgcgagtgtaatgaaattgtgccaagtatagacgctaacgattaccaattacatacatgtatgctcacttaaccatacagttttgtgttgtaaactagaatgtatggatttataaaaatgagaataggcatgtcaagtccaggacttgaaatctggctaggcaggttatgctgaatcagacgcggcacttgataaagaaatattttcacagtttactctaggacgctgagatatgcttaagtctatgtataatatgggtttcag

SEQ ID NO: 11405 - DNA, 2281 bp, Zea Mays
gttggacacttcgactttggacgctggaaagtggaaagcatcgccggctcgccgccaaactcgctgccacgtcggtccgaaccaaatccagcacctctctcccctcccccttcctcccgtcccccgtcgacagtcgcatcgcaccctatcctccccagtccccaccagtccaccaccctctccccgcctcccgctgcgaccaccgcaccggcgaacttggagggccgctcggcgctgcacaccaagccggggatggccgccgcgcttgcgagctcgccgcttgttcacctaactacctcccgcctccgcctccccaggccccaggcctccgcttctagttcgggtccagtctgctcgatcggcgtgtgcttgggatggaggctgaaggtcgggtggagggccctgaggcggcgcgaccggcttcgatgcttctccaccgacgggggcggcggggaggagggggaaaagcgtggcgaggaggagacatcggcaacggcggcggcatccccggcctcggttccagcggagacacaggtgggcgctggggaggagctggcgtccgagcggagtcggtcagggagcttttcttcctcatcctcgtcgtccgggactcctggtgtatcaagcgagccaccgctgttgagttttagtgttgataatatcgatacagttaaactgttggaacttctaggcccagaaaaggttgatccagttgatgtcaaggcaattaaggaaaaactctttggttatacgacattctggttgacaaaagaagaaccttttggtgatcttggtgaaggagttcttttcattgggaacctccgtgggaagagagaggaaatctttgcaaaacttcaacggcaagtacgtgaacttaccggtgataaatacaatctttttatggtggaggaacccaattcagaaggggatgacccacgtgggggaccacgtgttagttttggtttgcttaggaaggaagttttctgagccaggacctactacgctatggcagtatgtcatttctctgttacttttccttctcactatgttctcctgcattgagctaggaattgcatcaaagattagcagtcttccaccagaaattgtttcatatttcactgatccaaatgctaccggaccccctcctgacatgcaacttctgctcccatttgtggagtcggctttgccagtggcttacggtgtcttgtctatccaactatttcatgaaattgggcactttttggcagcatttccaaaaaatgttaaactgggaattcctttctttattccgaacttcacccttggaacttttggtgcaattactcagttcaagtccattcttccggatcgaaagacaatgtttgacatatcaatggctggtcctgtggctggagctgcactttccttttcaatgttctttgttggcttattactctcttcaaatcctgttggggcaagtgatttagtggaagtacctagtcagctgttccagggttcattgttgcttggacttattagtagagcaacgcttggatacagagctatgcatgctgctacagtttcgatccaccctcttgtgattgcaggctggtgcggtttaactactagtgcatttaatatgcttcctgttggttgtcttgatggtggaagagcattacagggtgcttttggcaaggatgctttgtttggatttggcctcacaacatattcgttgcttggactaggagtgagaacacccgagaaaccatgcttgaacgacgtgagcgatgttggaagttggaggagggcggccttgatagcttcagtatttcttgttgttttgacgctcattccgttgtgggatgaacttgcggaggaactaggtgtagggcttgtttcttcgttctgagatgcggtgcttaccgatagaattaggccgtgatgtagttcagttttgtgttgaaatgtagcttcccacggtggaattgttgtaaaggtatgtggaatttccggattaggtgagcaatgatatcgcttatgcgagtgtaatgaaattgtgccaagtatagacgctaacgattaccaattacatacatgtatgctcacttaaccatacagttttgtgttgtaaactagaatgtatggatttataaaaatgagaataggcatgtcaagtccaggacttgaaatctggctaggcaggttatgctgaatcagacgcggcacttgataaagaaatattttcacagtttactctaggacgctgagatatgcttaagtctatgtataatatgggtttcag

SEQ ID NO: 11406 - DNA, 5634 bp, Zea Mays
gcgcctgcagcacaactaggcgacactctcagacacagagtgagctctccactccgagtgagtgagcgagcgagcgcgcgctccgacatcacatataacaccggcagggcaagcgagcatggacagcaaaggaggaacacggaatccgttcttcctaccgttcgtctatcatccatccgttgctgtcctgatgcctttaccgcttcaccattgatctgagttctgaagaaggtcgtttccctggccgactccttcgccgctgcttcggcgactgcactctcactgcaagaaggaggaaaccaatccaagatcaggcaaagacaggcctaactccaccgataagcttcttgtgctccattgcatagcagtgtcgttccacacggtgtctctcctctcatcgagaaatcgtctccaacgacgacaatggctacgccgagccacctcctgctcgtcgtcttcacggcgcttcttgcgttgctcccggggacgacgcagctccagccttcgcaggtgtggactctgatcaagatccagcagctcctgaacgcccccccgatgctcagccactggcgccgcagcaccgacttctgcggcggcggcggcggcgccatgggcccggcgggctcggccgccgtcctgtgctacggggacaccgtgacgcagctccacatcgcgggcgcgggcgcgccgcctctgcccaggaacttctccatcggggccgtggtcacgacgctgtccaggctccccgacctcaaggtgctcacgctgtccgggctcggcctctggggccccctgccgggcaagctcggccgcctcgcgtcgctggagatcgtcaacatgagcggcaactacctcttcggcgaggtcccgcggggcgtgtcgcgcctcgccggcctccagacgctggtcctcgacgacaacatgctgggcggcgaggtgccggcctggatcggcgccctgccgtcgctggccgtcctgagcctgcggaacaacacgttccagggagccgtgccggagtccctgggaagcgcaccctcgctgcggtcgctcgtgctcgcgtccaacaacctgtccgggaacctgccggacatgagccggcaggccaacctccaggtgctcgacgtcggcggcaactcgctcggcccggcgttccccaagctcgggaggaaggtggtcaccgtggtcctcggcaggaaccggttcggcggcggcctccccgcggagctgagctccttttacctgctggagcggctcgacgtgtcgtggaaccgcttcgtcgggccgttcgcgcccgcgctgctctccctgccgtccatccggtacctgaacatcgccgggaacaggttcaccgggaccctatccgacaaggcgccgtgcggcgacaacctccggttcgtcgacctgtcgctgaacctcctcatggggagcgtgccgacctgcctgaggtcgccgggcaggaagccggacacggtggtgctcgtgtccaccaactgcctggacgacagcgacggctcgcagcacccgtcgccgttctgccagaaccaggccctggccgtggggatagtgcccggcaaggagaggaagagcgtcgcaggccaggcaggcttcgtggccggcgttgtggtggcgatccttgtcgccatctcggctgtgggcctcatcgccttcttcgccgtgaggaaggcggccatgaaacgttgggaggcgagggcgcccacggtttcggaggaggagagttcttcgactgggtacccttccaagatgctcgctgatgcacgatacatatcgcagacgctgaagctgggcgccctggggatcccgtcatacagagcattttctctggtcgagcttgaagctgcaactaataacttcgagaactctcacctgctggggcaggactctcacggcgagatgtaccgaggaaggttaggcaatggcaccccagtgacgatcaggactctgaagatgaagaggagccagaccgcccagagcttcaaccgtcacatcgagacgatctccaggctgaggcaccagaacctggtcagcgctctgggacactgctttgagtacaatctcgacgagtccacagtcacccagctgtacatcgtgttcgagtacgtgcagaatgggaacctgaggagcaggatctcgcaagggaccgaagggtgcaggctgacgtggtcgcagaggatctcggccgccatcggcgtcgccaagggcatccagttcctgcacggggggatcatacctggcctggtcggaaacgatctgcggatcacgaacgtccttgtggaccagaaccatgtcgccaagatcggcagctacaacatcccgatcctggcggaggccatgaggtccgagcagggaggagctgggaacaagttccaggctgacagtcgggtgaagagcgataagacggacatcttcgacttcggggtgatcctgcttgaggttgtgtccgggaagaccatcacgtccatgtatgaagtggagatactgaaagaattgcttgcatgggcgattgccgacgaggaccgggtgaggaggaggagcttcgcagaccccgcggtgagcaaagggtgctcggacgagtcgctgaggacggtcatggagatctgtcagaggtgcctggcgaaggaggcgtcgcagcggccctcggtggaggacgtgctgtggaacctgcagttcgccgcccaggtgcaggacgactgggagacggatgcctggagcagcggcggaggaagcccagtgtcgtcgtcgtccagagccaccaggccgtctcggctacacttgagcagatagatgatcaggtgcttcaccaatctccagtaaagcggtcacatgatctacccatagtctaccggggacaaggacaaggatctaaagatgggaaatgctggtcagcctacagtacagcatctgcctctgatgggatgctgaaaaccacagcagtatcagctcgctgaaaactgtcctccctgtggtgcagactaatgtgctttgcgccactgtagagttcttttttggtttctctttatcatcacgtccctatctacgagtacaataatggtgtgccttttgtccattttcccccattggtattggtagcacaataatgatgtaacaggcattgccttctacgtcctgagttttgtgatcatcgtattactgctggagcatataggatgggcagcctccactggcacctcgtgaaaggccgttcgtgcagcgagaaagaagcacacgacacgacacgaagcttatgcaaaccaagcaacaacttgacttagctatatctgttacatatgcaccaatatccgagtttatgaaaccgttcagcactacattaggaaaacccgcaggcatcactacaacaagggactgaaccacaagaacacaacgatagctgaggatttctaacggtaaaacagaccggccaagtaggaaagacagatgctttatttacaccgcctggcggagcggataaagtttcagtcggctgtccagctctgctccacaacctcacgaactttgcggttgtactcacgcttgttctcgctgaacattctagctgcttcagagttagcaggagaatttgggtttgggtcacacagcagggactgcaaaggaaagacaacaagaaatcatttgatacgttgagagtaccgatggccccaaaaccaccttttggaactggtgtggccaatacaacagcaacaacaaagccttcactcccaagcaagttttagttggctagagttgaaacccaacatgagcctcacatattcacggttcaagcaccggtgtgaccaatataaatacaaattcacaaaacagccatagaatggacaggatgtcctacttccatactgagaccgaacaatgtaaaagcatttgcgttgccgggtactctttttttttggaaaaaattaagaaagcgttgcattaagaggaaatgatgtagtttgttacaaacagtgtctagaaccgccaaggactgcaaggggcgatcctaaacctccaacacaggccatgattcggcacatcacatagctgggtacttattggaggcatgttaccacatgtgggaatatagtagtggtttggtcaataatttcaactacagcaacagtagaatatactccctccgatccaaaattgtaagttattctagcttttctagatacatcacttttactatatatctagacatgacgtgtatctaggtgcgtagcaaaaggtatgtgcatagaaaattccaaacgactaaaaaactcggccagtaggggaaagaccgcccccacagtattatattaagaagcagctcaatcggagccccgaccgagaaaggtcacgaaagctgatcccccgtgcaacatgagggtccgcccccctataggtcggatctttactcgtgctttgagccctcagcccctacaaggatccggtccccataggtcagtccatctcatatgcacacaaccaggggaaccaacgattgaccttttttaacattagcctgaaattcgctcccactaggattcgaactcaggacctaaggagtgttactcagaccacctaaccaactcagctagagaccctttcgcaaaagtccaaacgacttacaatttgaattgaaatggagggagtaaatggcttgtgaccaaccttctagtgaaatcaggtaatggggaaaccgttttcattctttcactgttcatatagaactggagtatttatccaaaaccatatggcaattcaattataaaaatgtcaattcagttaggttggaccaattgcatgggctttctactggatacaataatccattagagcagtataatagacaggcagtgttagaacaaaacgaagttatttcaacatgataggttgagtgacaaaatgagtgatacctgaatagaggtcaatattgccgcaacatcatatatagggctccactggttttgtaggatgtccaaacagatgcttccatccgcatagactgaaaaaaatggtattaaaccacttattgtaaatctattcaggtgtcaatacatgaggataatttagttccttaacatctaaagagaacatactgtttggatgaaacatcctcgaaacaaaccgaacagttggaggtttgttggggtaatcttctgtacattgcagagtcagcttgaacgtgcctacaagtaaataggcgggctgatacccgaatatgacggcgttccagagcatgatattgttgtcgtacggcgcgccgctgatgccggcgggcgggtcctgctgcaggcgcttgaagtcccgcatcaggcgcttcctcgccggcgtcgacatctccgccaccagaccctagctcaggccccgatctctcgccccgcaggccgcagcgcgtggtgcgaggcgagcttcgcacacctccgctccctgggtctcccaccctcctggtaggatacgcgagaggagaagcttcggagcgagaggcgagcaggtggggagccggccagccgggtgcgaaaaggagtcgtgcataaaaccgacgcgaagcgcgagcggcgtgtgtggaccgacccttccccgagcggccgaggtcgcgttgcccccacgcgcccctcgcccaacgagtgatcgtgc

SEQ ID NO: 11407 - DNA, 7785 bp, Zea Mays
gcgcctgcagcacaactaggcgacactctcagacacagagtgagctctccactccgagtgagtgagcgagcgagcgcgcgctccgacatcacatataacaccggcagggcaagcgagcatggacagcaaaggaggaacacggaatccgttcttcctaccgttcgtctatcatccatccgttgctgtcctgatgcctttaccgcttcaccattgatctgagttctgaagaaggtcgtttccctggccgactccttcgccgctgcttcggcgactgcactctcactgcaagaaggaggaaaccaatccaagatcaggcaaagacaggcctaactccaccgataagcttcttgtgctccattgcatagcagtgtcgttccacacggtgtctctcctctcatcgagaaatcgtctccaacgacgacaatggctacgccgagccacctcctgctcgtcgtcttcacggcgcttcttgcgttgctcccggggacgacgcagctccagccttcgcaggtgtggactctgatcaagatccagcagctcctgaacgcccccccgatgctcagccactggcgccgcagcaccgacttctgcggcggcggcggcggcgccatgggcccggcgggctcggccgccgtcctgtgctacggggacaccgtgacgcagctccacatcgcgggcgcgggcgcgccgcctctgcccaggaacttctccatcggggccgtggtcacgacgctgtccaggctccccgacctcaaggtgctcacgctgtccgggctcggcctctggggccccctgccgggcaagctcggccgcctcgcgtcgctggagatcgtcaacatgagcggcaactacctcttcggcgaggtcccgcggggcgtgtcgcgcctcgccggcctccagacgctggtcctcgacgacaacatgctgggcggcgaggtgccggcctggatcggcgccctgccgtcgctggccgtcctgagcctgcggaacaacacgttccagggagccgtgccggagtccctgggaagcgcaccctcgctgcggtcgctcgtgctcgcgtccaacaacctgtccgggaacctgccggacatgagccggcaggccaacctccaggtgctcgacgtcggcggcaactcgctcggcccggcgttccccaagctcgggaggaaggtggtcaccgtggtcctcggcaggaaccggttcggcggcggcctccccgcggagctgagctccttttacctgctggagcggctcgacgtgtcgtggaaccgcttcgtcgggccgttcgcgcccgcgctgctctccctgccgtccatccggtacctgaacatcgccgggaacaggttcaccgggaccctatccgacaaggcgccgtgcggcgacaacctccggttcgtcgacctgtcgctgaacctcctcatggggagcgtgccgacctgcctgaggtcgccgggcaggaagccggacacggtggtgctcgtgtccaccaactgcctggacgacagcgacggctcgcagcacccgtcgccgttctgccagaaccaggccctggccgtggggatagtgcccggcaaggagaggaagagcgtcgcaggccaggcaggcttcgtggccggcgttgtggtggcgatccttgtcgccatctcggctgtgggcctcatcgccttcttcgccgtgaggaaggcggccatgaaacgttgggaggcgagggcgcccacggtttcggaggaggagagttcttcgactgggtacccttccaagatgctcgctgatgcacgatacatatcgcagacgctgaagctgggcgccctggggatcccgtcatacagagcattttctctggtcgagcttgaagctgcaactaataacttcgagaactctcacctgctggggcaggactctcacggcgagatgtaccgaggaaggttaggcaatggcaccccagtgacgatcaggactctgaagatgaagaggagccagaccgcccagagcttcaaccgtcacatcgagacgatctccaggctgaggcaccagaacctggtcagcgctctgggacactgctttgagtacaatctcgacgagtccacagtcacccagctgtacatcgtgttcgagtacgtgcagaatgggaacctgaggagcaggatctcgcgtagggcttccggtccatctcgctttcgtttcgctgaacgctactgctgtgtcgctctctgaaccgagtttctttcgacagaagggaccgaagggtgcaggctgacgtggtcgcagaggatctcggccgccatcggcgtcgccaagggcatccagttcctgcacggggggatcatacctggcctggtcggaaacgatctgcggatcacgaacgtccttgtggaccagaaccatgtcgccaagatcggcagctacaacatcccgatcctggcggaggccatgaggtccgagcagggaggagctgggaacaagttccaggctgacagtcgggtgaagagcgataagacggacatcttcgacttcggggtgatcctgcttgaggttgtgtccgggaagaccatcacgtccatgtatgaagtggagatactgaaagaattgcttgcatgggcgattgccgacgaggaccgggtgaggaggaggagcttcgcagaccccgcggtgagcaaagggtgctcggacgagtcgctgaggacggtcatggagatctgtcagaggtgcctggcgaaggaggcgtcgcagcggccctcggtggaggacgtgctgtggaacctgcagttcgccgcccaggtgcaggacgactgggagacggatgcctggagcagcggcggaggaagcccagtgtcgtcgtcgtccagagccaccaggccgtctcggctacacttgagcagatagatgatcaggtgcttcaccaatctccagtaaagcggtcacatgatctacccatagtctaccggggacaaggacaaggatctaaagatgggaaatgctggtcagcctacagtacagcatctgcctctgatgggatgctgaaaaccacagcagtatcagctcgctgaaaactgtcctccctgtggtgcagactaatgtgctttgcgccactgtagagttcttttttggtttctctttatcatcacgtccctatctacgagtacaataatggtgtgccttttgtccattttcccccattggtattggtagcacaataatgatgtaacaggcattgccttctacgtcctgagttttgtgatcatcgtattactgctggagcatataggatgggcagcctccactggcacctcgtgaaaggccgttcgtgcagcgagaaagaagcacacgacacgacacgaagcttatgcaaaccaagcaacaacttgacttagctatatctgttacatatgcaccaatatccgagtttatgaaaccgttcagcactacattaggaaaacccgcaggcatcactacaacaagggactgaaccacaagaacacaacgatagctgaggatttctaacggtaaaacagaccggccaagtaggaaagacagatgctttatttacaccgcctggcggagcggataaagtttcagtcggctgtccagctctgctccacaacctcacgaactttgcggttgtactcacgcttgttctcgctgaacattctagctgcttcagagttagcaggagaatttgggtttgggtcacacagcagggactgcaaaggaaagacaacaagaaatcatttgatacgttgagagtaccgatggccccaaaaccaccttttggaactggtgtggccaatacaacagcaacaacaaagccttcactcccaagcaagttttagttggctagagttgaaacccaacatgagcctcacatattcacggttcaagcaccggtgtgaccaatataaatacaaattcacaaaacagccatagaatggacaggatgtcctacttccatactgagaccgaacaatgtaaaagcatttgcgttgccgggtactctttttttttggaaaaaattaagaaagcgttgcattaagaggaaatgatgtagtttgttacaaacagtgtctagaaccgccaaggactgcaaggggcgatcctaaacctccaacacaggccatgattcggcacatcacatagctgggtacttattggaggcatgttaccacatgtgggaatatagtagtggtttggtcaataatttcaactacagcaacagtagaatatactccctccgatccaaaattgtaagttattctagcttttctagatacatcacttttactatatatctagacatgacgtgtatctaggtgcgtagcaaaaggtatgtgcatagaaaattccaaacgactaaaaaactcggccagtaggggaaagaccgcccccacagtattatattaagaagcagctcaatcggagccccgaccgagaaaggtcacgaaagctgatcccccgtgcaacatgagggtccgcccccctataggtcggatctttactcgtgctttgagccctcagcccctacaaggatccggtccccataggtcagtccatctcatatgcacacaaccaggggaaccaacgattgaccttttttaacattagcctgaaattcgctcccactaggattcgaactcaggacctaaggagtgttactcagaccacctaaccaactcagctagagaccctttcgcaaaagtccaaacgacttacaatttgaattgaaatggagggagtaaatggcttgtgaccaaccttctagtgaaatcaggtaatggggaaaccgttttcattctttcactgttcatatagaactggagtatttatccaaaaccatatggcaattcaattataaaaatgtcaattcagttaggttggaccaattgcatgggctttctactggatacaataatccattagagcagtataatagacaggcagtgttagaacaaaacgaagttatttcaacatgataggttgagtgacaaaatgagtgatacctgaatagaggtcaatattgccgcaacatcatatatagggctccactggttttgtaggatgtccaaacagatgcttccatccgcatagactgaaaaaaatggtattaaaccacttattgtaaatctattcaggtgtcaatacatgaggataatttagttccttaacatctaaagagaacatactgtttggatgaaacatcctcgaaacaaaccgaacagttggaggtttgttggggtaatcttctgtacattgcagagtcagcttgaacgtgcctacaagtgtaaacttgacatacgttagcaaactgacagttaaaatcagaaagcagccagtttgttctgctgccaataaaagacactgatgaaccatgtctactgttacagcacactactacaaactacattatgattgatattcactgatatcatagagaggtcccaaataagtgattgaactaagctagccgattgtggcattaacaaaccaaaatcgaagtacatgtacaatgaatagaatatgctgaaagatgtagtaaaaaaacaacaatctgaatcacataagagaaaaactgagttttagtccttcaggcaacagatggttgatattttttctgtcaacagatgttttttcagtaaccatacacttccaatggggaagggtcccatgctctcctgaatcacacaggtccttctattttcctgacaaatgatagttgtgtatttaactatttatcaataacaaatgctttctctggcttctatactgatggtgcttgcattgtgatatcatataattctaatgagttgaatccaacaaataaaggttaacacttccatgccaatacatactgatgtggaacatcctgctacagtgttactgaatattgaagcaatggctcatgattattgactagctagtaatgatttacaataggcacagggctgcagggtgtaggtcgtgctcatttagctattgtggaagtcaatatctcagagattcaatttacaatcccaagttctaagatgcttgctctgttattgaataatggaggacaagcgtacatagtcccaagtgctatgatgcctgctcttttattggctctataatgcttggccaaaatgtaccaatatgcttggctaaattatgaaattaagtggagctcagtgacttaattaaggacagagatgaacagatatgcttggctaaaatgcacatacccagaattgactaaataatatgtcaaacaaacatgtttccctttggtagcttctgacaatcgttagcatctaaagaacaaaaaataaaggcatcacagctttacttattcggtaagacctttctctttcttaatataaattatacgcagctctgctgcgtgtttcgagaaaaaaaaacttattcggtaaacaatataaaagggatgacacaactgcaaggctcctatatcaggaaaacatgcaatgatgcaaataaatgcaaggttcctaagtaggcagcttgttcctaagctcgtaggggtaaatattcatagttcgtatccattgatttgcatcttcacttcgaggttccaaatcaaacgagaaatatggcgcctattgtaaacaattattgaagaccatgttgatgtcaaaaacaacaagacaatttacaattccaacttcccaatgctatgatgtttgccttttattagctgtataagaaagataataaaagctagatgtagtagtatgcttggcaaaacacacatattcagagtttaactattaatatctttcatgtcaatcagacatgccttccctttggtaacttgtgacaaccgttagcattaataaagaacaaaaaaggcattacagaccaggctctttttttttggaaaacggtgcataaggaacgaaacaactggaagataccttcatcatgaaagcatgcaagtgaagcacggattctatgcaggcagcttgttcttaagctcgtagaggttaatatttgcagttcgttaacatttgtttgcatatatgcttcgagatgcaaatcagacgagaaatttgggacctatcgtgcacaactatagaacagtcggcatataaggtagaattcagtatttcagtcaaccaatcatcaactaacgacattggcagtacccaaaaaatgcagacgccagctattgaacaattacagatcgagccaaactaaatcggatgggtctcacctccatcccacggcgtgtcatccggcctgcagaatcgcaacaaacaccaagagaaaaagcacagtcagcattaaaacccaccaaaagtatcgcggcctcacgcctcactagatccttaggctagctaacctaacatcacagaaataggcgggctgatacccgaatatgacggcgttccagagcatgatattgttgtcgtacggcgcgccgctgatgccggcgggcgggtcctgctgcaggcgcttgaagtcccgcatcaggcgcttcctcgccggcgtcgacatctccgccaccagaccctagctcaggccccgatctctcgccccgcaggccgcagcgcgtggtgcgaggcgagcttcgcacacctccgctccctgggtctcccaccctcctggtaggatacgcgagaggagaagcttcggagcgagaggcgagcaggtggggagccggccagccgggtgcgaaaaggagtcgtgcataaaaccgacgcgaagcgcgagcggcgtgtgtggaccgacccttccccgagcggccgaggtcgcgttgcccccacgcgcccctcgcccaacgagtgatcgtgc

SEQ ID NO: 11408 - DNA, 572 bp, Zea Mays
aaacccaacaactccaaacccgaagcccccacggcgcaggcctaggtgtaggcggcgcggaccagggccgggccgccggaggcgcgctacttggcggcggcgcaggggagatgtgcgaggggaggcggccggtggacgcgagccgggcggggtgggcggcggcggcggagctgcggcggagagaggcggcggcgcgggcgcgcctggcggaggcgctggcggagctggagcgcgcgcgggcgcgcgccgccgagctgcagcggcgcatcgagcagacatacggcaagcgccggcgcctcctcgaggagacccgcggccggatccacgagatccacgcgcgcctccaccaggaccaggaccgggatcaggagcaggagcaggagccctccgccagcggcacttcctctccgtcctcgtcgtcgtagggaacaagcgagttggcgctggatcatcgatggtttctactgctacgccgcgcgcttctttcccgtttcctcttgtcttatcgttagcttgcaagcttgactttggccatgtaccgtagctgtagtatacacgactctctctgacct

SEQ ID NO: 11409 - DNA, 2404 bp, Zea Mays
ctccagagcttgggcagactctcctcagtaactatagttttttttgttccttgggaggatagaaaaaatatatccttggttttcttgaacagataacatttcaggtgtgcttctgaagggagatttcgttgaacaggatgaatgcattggcagcaaccagcaggaacttcaagcaggcagctaagctgctgggcctcgactccaagctggagaagagcttgctcattccattcagggagatcaaggttgaatgcacaatcccaaaagatgatggaactttggcatcctatgttggatttagggttcaacatgataatgctaggggacctatgaagggtggaatcagataccaccatgagcagtagctaacataccatatggaggagccaaaggtggaattggatgtagccctggagacctgagcatctctgagcttgagaggcttacccgagtttttactcagaaaatccatgacttgattggcatccatactgacgttccagctccagatatgggcaccaactcacagacaatggcatggatacttgacgaatactcaaagttccatggttactcacctgctgttgtgacaggaaagcctgtggacctcggaggatcattgggaagagacgccgctactggaaggggagttctgtttgctactgaagctttgcttgcagagcatggcaaaggcattgcaggccagcgtttcgtcatacagggattcggtaacgttggttcctgggcagctcagctgataagtgaagccggtggcaaggtgattgctatcagtgacgtcacaggcgccgtcaaaaacgtcgatggcctcgacatcgtgcagctagtgaagcactcggcggagaacaaggggatcaagggcttcaaggggggagacgccatcgctccagactcgttgctcactgaagagtgcgacgtcctcatcccagcagcgcttgggggagtcataaacaaggataatgctaacgacataaaggcaaagtacatcatcgaggctgccaatcaccccacagatccagaggcagacgagatcctgtcaaagaaaggcgtcctcatcctccccgacatactggccaactctggtggcgtcacagtgagctacttcgagtgggtacaaaacatccaggggttcatgtgggacgaagagaaggtaaacgcggagctgcggacgtacatgacgcgcgccttcggggacgtgaagcagatgtgccggagccacagctgcgacctccgcatgggcgccttcacgcttggcgtcaaccgcgtcgcgcgcgccaccgtcctcaggggatgggaagcatgacctccctccgtgtcgtccgtgtgcccctccctgttgtatcctcttggtcttgggcccttgtttttctttggttaattattgtcgagatcaacggagatccgagaaaaacgggctcagttaataattccaagaagtgcgtcttcttggagataaaatagcggaaggagagttataataagtctgtaactgtaacccatagctgagatgctgtctgcaagcagcaatgccaatgccaatgccatctggttttcgtgcacgactttgggtcattttcgaatcctgatcactcaacgacagggtcggtagagatgaagctgtagacagccacgtccctgagcctccccttcaccacgcggtagctccgcagcacggcctcgcgctggaacccggccttctcgagcacccgccgcgccgccgcgttgtggtcgacgtccacgagcgcctcgacgcgctccacgcccgggaggtcgccgaacgccgcggagaccgcgcgcctcgccgccgctgtggccacacccttcccccggtgcgcgcgcgccagcacgacgcggagctcggcgcggcaggcgtcgtcggtgggcgtcacggacaccgcgcccacggggcggcagtgtccgccgccgccgaggcagacggcgcggaaccacgggtgcggcagcaccgcgtcgcgcaggaacgccaggagggcgtcccgggacgtgcaggcgtcccacgccatgaacgccgtcacctcggggtccgacgcccactccagcatcgcgtcgacgtcgccgagctcgaaacgacggagcgtgaccgcgggaacggaccccggtcgggcaggcgcttcttgctccatctctgagcctccctcccatccgacgcgttgcttttgccttttcttttgcttggtggtgtcgtggtggtgcgcagtcaccagtggaagctttgcgtcctgtccctgctttgacgctgtcagccacactaatcaaattaaagtggcagtggggcacacaatcacgcaacgcaagtgtgtaataagacccacaccagcactacacaccgtccaccagactaatttgataggtgaatatagaacatagt

SEQ ID NO: 11410 - DNA, 2447 bp, Zea Mays
cctccagagcttgggcagactctcctcagtaactatagttttttttgttccttgggaggatagaaaaaatatatccttggttttcttgaacagataacatttcaggtgtgcttctgaagggagatttcgttgaacaggatgaatgcattggcagcaaccagcaggaacttcaagcaggcagctaagctgctgggcctcgactccaagctggagaagagcttgctcattccattcagggagatcaaggttgaatgcacaatcccaaaagatgatggaactttggcatcctatgttggatttagggttcaacatgataatgctaggggacctatgaagggtggaatcagataccaccatgaggttgatcctgatgaagttaatgccttggcacaattgatgacttggaaaacagcagtagctaacataccatatggaggagccaaaggtggaattggatgtagccctggagacctgagcatctctgagcttgagaggcttacccgagtttttactcagaaaatccatgacttgattggcatccatactgacgttccagctccagatatgggcaccaactcacagacaatggcatggatacttgacgaatactcaaagttccatggttactcacctgctgttgtgacaggaaagcctgtggacctcggaggatcattgggaagagacgccgctactggaaggggagttctgtttgctactgaagctttgcttgcagagcatggcaaaggcattgcaggccagcgtttcgtcatacagggattcggtaacgttggttcctgggcagctcagctgataagtgaagccggtggcaaggtgattgctatcagtgacgtcacaggcgccgtcaaaaacgtcgatggcctcgacatcgtgcagctagtgaagcactcggcggagaacaaggggatcaagggcttcaaggggggagacgccatcgctccagactcgttgctcactgaagagtgcgacgtcctcatcccagcagcgcttgggggagtcataaacaaggataatgctaacgacataaaggcaaagtacatcatcgaggctgccaatcaccccacagatccagaggcagacgagatcctgtcaaagaaaggcgtcctcatcctccccgacatactggccaactctggtggcgtcacagtgagctacttcgaaacatccaggggttcatgtgggacgaagagaaggtaaacgcggagctgcggacgtacatgacgcgcgccttcggggacgtgaagcagatgtgccggagccacagctgcgacctccgcatgggcgccttcacgcttggcgtcaaccgcgtcgcgcgcgccaccgtcctcaggggatgggaagcatgacctccctccgtgtcgtccgtgtgcccctccctgttgtatcctcttggtcttgggcccttgtttttctttggttaattattgtcgagatcaacggagatccgagaaaaacgggctcagttaataattccaagaagtgcgtcttcttggagataaaatagcggaaggagagttataataagtctgtaactgtaacccatagctgagatgctgtctgcaagcagcaatgccaatgccaatgccatctggttttcgtgcacgactttgggtcattttcgaatcctgatcactcaacgacagggtcggtagagatgaagctgtagacagccacgtccctgagcctccccttcaccacgcggtagctccgcagcacggcctcgcgctggaacccggccttctcgagcacccgccgcgccgccgcgttgtggtcgacgtccacgagcgcctcgacgcgctccacgcccgggaggtcgccgaacgccgcggagaccgcgcgcctcgccgccgctgtggccacacccttcccccggtgcgcgcgcgccagcacgacgcggagctcggcgcggcaggcgtcgtcggtgggcgtcacggacaccgcgcccacggggcggcagtgtccgccgccgccgaggcagacggcgcggaaccacgggtgcggcagcaccgcgtcgcgcaggaacgccaggagggcgtcccgggacgtgcaggcgtcccacgccatgaacgccgtcacctcggggtccgacgcccactccagcatcgcgtcgacgtcgccgagctcgaaacgacggagcgtgaccgcgggaacggaccccggtcgggcaggcgcttcttgctccatctctgagcctccctcccatccgacgcgttgcttttgccttttcttttgcttggtggtgtcgtggtggtgcgcagtcaccagtggaagctttgcgtcctgtccctgctttgacgctgtcagccacactaatcaaattaaagtggcagtggggcacacaatcacgcaacgcaagtgtgtaataagacccacaccagcactacacaccgtccaccagactaatttgataggtgaatatagaacatagt

SEQ ID NO: 11411 - DNA, 1725 bp, Zea Mays
ggggaagcaagcgagctctgtcggtgggggagctgctggtggttgtaagtgtagagcgcgcgattggctgccaggatggatcacgtagtcgggggcaagttcaagctcgggaagaagatcaggagtggatcattcgggaaactttacctcgccgtgaacgtgcagaatggcgaggaggtggctgtcaaactgggtggaagctgccggcgtgaagcactggccaccgggtgctgcacgtcaacggccaacagggggcaccgtgcaggtgggcagaagcagccagcgacaacagtagggcacagacgcctggaagagggagaagaaaagggtgaattggggttcatccttgatggctttcctcgaaccatgagacaagcggtagaaaatggccgatgccgaggatatccagcccctcgtctgcgacaacggaactggcatggtcaaggctgggttcgctggcgacgacgccccgagggccgtcttccccagcatcgtggggcgcccgcgccacactggtgtcatggtcgggatggggcagaaggacgcctacgtcggtgacgaggcgcagtccaagaggggtatcctgaccctcaagtaccccatcgagcacgggatcgtcagcaactgggacgacatggagaagatctggcatcacaccttctacaacgagctccgcgtggctcccgaggagcaccccgtcctcctcaccgaggcgcccctgaaccccaaggctaacagggagaagatgacccagatcatgttcgagaccttcaacacccccgctatgtacgtcgccatccagaccgtgctctctctgtatgccagtggccgtaccacagattttagagattacctgtatcgcaattttagatattccgtggaaaagacggaaggcctgggtgtgttcagaacacatgtgctcacagggcttgcccgctgcatcttggttcagtgaacgagggtaggatccagtgcccttaccatggttgggagtactctactgatgggaaatgtgaaaaaatgccatcaacaaatatgctcaacgtgcacatccagtcattgccatgctttgagcaggaaggaatggtctggatttggcctagggatgacccaccaaaggctacaatcccttctcttctgcctccttcaggatttacatgctcactgttgatgcagggggtgcatggcctagggggaggatggcgactaggttcatcgatggcggcaagcagctcgtgttcgaccacgcgacacagttcttcactgcgagcatccgcaccgctgcaggtgctgcatatcatcggcagagaggatcgagttcagatcgatgatgcaaggcggctgcatcgtcgagctgtaacacctgcagcgatgatgcctccttatgggacaccaccaccatatgcagcaatgtatgcacaaggtacaccataacagcaggcaccaatgccaccgggttcacacccatacagttcttatcctatgcagtcaccaaacggacagttcaaactccaataagaatctcttggctgctcacctgtcgcatcttccccgattcaaaatcgtcctggtcgcatcttccccgattcaaaatcgcccagttgagttttccaatcctatatttttttctcgaaagttttccaatcctatattcagtttgcagtaacacgatttttgcatttagccattttttattttgttgtatactttcgtactgcttcgtag

SEQ ID NO: 11412 - DNA, 1033 bp, Zea Mays
tttggggataaaccggcggtaaactgataccgccaaggagcagttttggtgatccttggtctggacttgcttgagcccgttctgtccattgcagttccagatcaacacactggagattaccacacgctgcacacagatctgacaaactgatactacaaatctacggctaggctacgaagcatctgtagcggcatgtactgctgatgagactggtttacacccagcaagtgattccggtggatctcatggaggataataaacaagaagacaccctggccctccacgggaaagaacacaccatggtcgagaatgagcggggtccttcttgactcattggatagcgcaaacacatgtcgagatgccgtctccgtcgtcaagcaagtctccgccttcgctgtcttggctcgtactccttaatctctgccagatctttcccgatcaaatccagccactttacattgcctttgtcggcgcactcgtcatcgccgcagctggttttcttcaggcaactcttacccagcgccggcgccttctccacatcctcgcgcttctcagcgtcgtcgtcccttccggcggctaccggcgcctctaccttctgaaccggaggcggctcctcctcggcgacagcggctgggcgcggagccggcggagaggcggcggcagcgtcgcggctcgcatctttggattgggggaggcaggggatgaggcggaagggaccggcgcagtggctctcgcaatgggagagcctcatcaaggtcgggggtggaagcacggaaagctagtgccaaatagcccctggctccaagagcacaccacatcaatcgaatctctcgactggcactggcagaggagcagatcgaggtgctgctgcggaatgcaaccaggaatcgagcctgccgacaagaggagcagcaaatctctgtgcaggagaggtgcggaagcggggagagctgcagctggttgtaagcttgacagggaggcaggggagcaggagagaagacaaaagagtgcgttgtgtgcgagtgcgagagag

SEQ ID NO: 11413 - DNA, 753 bp, Zea Mays
ctctccattattgtgatgataactgcatgtgtttgtggcttaatctccaaactttaggtgtaagcatctctgtaatctgctcatccaacaaagagacatttggaaaaatcattttggaggctgccattcttacagcagtggtggtgatcagcttaactgcgtacactttctgggctgcaaagaggggtcatgatttcaacttcctcggtcccttcctatttgctgctatcatggtgctcatggtgttttcactaatccagatctttttcccgctgggtaagatatctgtgatgatatacggtgggttggcatcgcttatcttctgtggatacatcatctatgacacggacaatgtcatcaagcgctacacctacgatgaatacatatgggctgctgtttcactctaccttgacgtcatcaacctgttcctgtctctgctgcagctgctgagggcagccgatagctgagctcgtcaagctttcacttcgatcttgttctcacatacatctgtgtatatcacaaactctgtaatggtcatggatactccaatttataactatactctgtcggtgttaccttggttcaaatggtatgtctggctttaacggatacccatgagagttttaagagcgcggtcaatagctcagctgcttacaaacgagcttggataaaaatcataagctgtgcagtaacagtacatctgtacttgtcttgatcaattatttgcaataattatttatgattttgcaccat

SEQ ID NO: 11414 - DNA, 1451 bp, Zea Mays
gccgttcgaaattttggtgcgccccttccatctggcgcccggggcagcggctcggcggcggaggcggcggcgatctcgctgctgcacctgcacggctgcacgctactacccgacgatcaatacagctggtttcctatatatccaactatgatgagggatgattcaatgctaatgttaaacaaagatgtactagagaagtagagatcagatcatctgagggatgattcaattctgatatttctgggcgctgtggctgttaccagcccgcgagcaaaggtatgaggatgcgagatatccaggtaactgtttcctcaatgttgacctataaacctgattctataacatagtttcaaggattcatctttaaagctctttttttttcactcaactttcagaaattgaatatatcaattttagtgttcactatcgacttctgtttggaagtttgttttggtttaggtctaaggttagttatgtgatttgacgtgtttgttgttgttgtcgacgcctttgttagtcggcagttagggatgaaaatagatcacgatccaaatatttatttacaatttatttgaacggtggcgaacctaaccgagaatatttttcatgaacttagatgcaagttaaaatagtttgatttgaactagattaaaatttaatccttttttatacgaggaagttcataaagatacccaaatttgcaactggattgaaagcttgatgacaccagtacaggaacacattcttaagcactgttgctgttaaaaaagctgcatcacataaagcaacccattaaacggccgaggccgcatgtggtacggccgggtttgtcttgattccccatgcccgagtcatgcatccatcaaaccgacgcagtgcaagtgtgcaaccagttttttttttcatctctttttcgagcctcctgctgcctgcactgcgctgccccctgccctgacacccctactcacagcttcagctcgctgtctaggtcccctaggcctctagaaccctaggacctacacctagctcctagctctagccccttggcttcttctgcacacctctctctctaatctctttctcgctgccctttactcccactcaaccactattcttgagagtttgcaatattgttacatctcccccaccacaacggcacggctggctctataaatcacgcgctttgtcttgcttccccttgtacccaaactcaacatctcctccacacgcatccaccccactctcttcgtaggtctagtgaatcgcgatgttctttctatctatctgttctcttcgttctacaaactgttggttcttgtcttcttgagtagccattccttgcggatgcagatcccaggtagaatcagttcggtagcttcttctgttcactggccatcatttcctttgatttcttctgtttcttagagtctgtcccatcttctggatctgag

SEQ ID NO: 11415 - DNA, 2978 bp, Zea Mays
ctagagacttcatcaccgcaggcagtcgcgcggcggctctcctccccgcaggcagtcgcgcggcggcctcatccccgctggcgagcctccactcccctccgccggtacgcctctatcgtcggtggactccccctcggcagacagcctcgcctcgcgtcttctcaccagtcgcgcggccactatcccgctgctctgcgcaccgcgcaacagtaaccgctcttcccacgacctattccatcccgagttcacttgtgtccgctctgaaatggtgcaacgctgcggcgttccatgcccatgcttgtttacttgtgtccgtcggcagaacaattgctggttgcgggtgtttgcatcttttcgcgcacaaatagatagtgtgtggcattgcctatttcattcagttctgcaaagataacagaaggttgggtatgggcaaatgtcgggtcagtcaagcaagcatcgcactgctctaaaagatcacagaagattgggtatggaattgcttgttccatggagattttgaaggaattctaccaacaagagctgacctcatgaaaacctccctcatcgaattcttgtgtttttcctgcacctcatccaaacattcggtcttggagttttctttatttgttcgatctatagagctacaggattcaaggtactacggtaatgaattcctatgtctcgggatttttgtgccagggaggccataatctgtcagagacgaaaacaagaaagaacccaactcagtttctttgaagcacatatcacctccttcctattcacctcttcagatgaatgcaagctcccaatgcacatatcgcctgacgtgaacctcgatcggcatcaggaggccaacggaggatcagagcaggaaggcgtggagcttgagctgcagcgagagcttgggcgtgagctgcaagaccaatgcaggcgtctcagtcagcaatacaaccgcacaactctcctactgtctatgaggtgtcagatgttcatgcatattccagtaaagttgaacagagccatcaggagtgcgtacatacagggcatggaaattatctccaaaggccgagccatcttgtagctctgctatggattcgagtcaccgtgggttgccgtgagaagcatgagagccacacagcctgcagatgcgagcagcagtcttcttaatgataaatatgtctacagcttcagtcataactatactgatgcattttaactgcaacgtcactcatcacaataaacatgaaggacataagctttatctcagacactcaatgttgtgcgataacctaatcaggtcacatatgttgtctggatcgtattaccagatgtcatctgataatgtgcaattttagagagtgttgaaggcttctttataacgttctcgagttgtagggttctaaggtccgactggcacgaggctcgttcagtcgtctcgaggagtagcaccccaagatgagtcagggttctctcaattgcgaatgctcactcttgagtaaagggataggctaaagagcagctccatccagttcgacgaccatagtttttgcgagtgggtgcacaacctcaaattagcaagtacatgcctacatcgtcgacaactaaaggcaattactgagggagctcggtggggaagacctaaaggtgaagacgcggaaaaactcagggagaagctgaggcaggagtgcctgtggaaggggacggaactggcacatggggtggctgacgccctcttcgctgtatcacccaccgaggacctcgacggccctattgtacacctcccaccgcccgctgttcgactcccgcgcgagaagcatcttggtgctgggacctcactgccaggattagtagctgcaaaggttggggcagatgtaacactaacagacatcgcgcagacattattgtttctttaattgcaggccactggtgctgtactacgtggtcctgacgttgcgggacagcgtgcacaaggtcttctacgccgtcgtcgaggccgctgcagttcgcgcagacaacagccatcttggagatacttgtgttgccaccttatcagggtgaaggctatggtcttggtcttcttgaagcaatcaattatattgcacagtctaagaacatttacgatgttacaatagaaagcccttctgattccttgcagtatgtgagatcatccattgactgcctctgtttgctcatgtttgatccgatcaaacctgcactcggtgctattgtctcgtctctgaaggagaccaacctgtcaaaaagggcccaaagtttgagaatggttccaccagctgacctgatggagactatatgtcagaagctgaagataaagaagaaacagttccttcggtgctgggaaattctgatcttcctaagcctcgactctcaggatcataagagcgtggacaactttagggcctgcatatatgacttcatgaagggggagatccttggcagtgcctctagaactaacaggaagcgtctgttgtagatgccaaccagtttcaataaggaggcatcttttgctgtgtattggacacatgagattggggatgaggatgaacaaactgttgagcagcagccagaggatctgaggacgcaggagcaacagctcaatgagctcgtggacatccaaatcgaggatattgctggggtcgccaagaacgtcacttcacgtggcaaggataagatggcagagctggcggttcaatgaatttgggtgaggttcctacttcaaacgacgttaaaatgttgtcgtagcttatctggtgaggtctcttttacgggttggcttcttggtagaaagggaatgtcacagcataggcactgagtagattgtcacggcagattattatgtacttcaattctggaatatttgatgggaatgctattttagattgcttggtaagtgggaaccgcctcaaatcacagaagtagaagcagcttccgattcagccggaaccatttctccaaaaatg

SEQ ID NO: 11416 - DNA, 1946 bp, Zea Mays
ctagagacttcatcaccgcaggcagtcgcgcggcggctctcctccccgcaggcagtcgcgcggcggcctcatccccgctggcgagcctccactcccctccgccggtacgcctctatcgtcggtggactccccctcggcagacagcctcgcctcgcgtcttctcaccagtcgcgcggccactatcccgctgctctgcgcaccgcgcaacaaacaattgctggttgcgggtgtttgcatcttttcgcgcacaaatagatagtgtgtggcattgcctatttcattcagttctgcaaagataacagaaggttgggtatgggcaaatgtcgggtcagtcaagcaagcatcgcactgctctaaaagatcacagaagattgggtatggaattgcttgttccatggagattttgaaggaattctaccaacaagagctgacctcatgaaaacctccctcatcgaattcttgtgtttttcctgcacctcatccaaacattcggtcttggagttttctttatttgttcgatctatagagctacaggattcaagatgaatgcaagctcccaatgcacatatcgcctgacgtgaacctcgatcggcatcaggaggccaacggaggatcagagcaggaaggcgtggagcttgagctgcagcgagagcttgggccggaaaaactcagggagaagctgaggcaggagtgcctgtggaaggggacggaactggcacatggggtggctgacgccctcttcgctgtatcacccaccgaggacctcgacggccctattgtacacctcccaccgcccgctgttcgactcccgcgcgagaagcatgtgtccgaggaggccggaaatcatctctttgtggaatcctgcattcctctgcacgacttcacgtacattattatttcacatgacaatgctacagttacactcttatctaattcacacgtatcatttttgcagcttggtgctgggacctcactgccaggattagtagctgcaaagatacttgtgttgccaccttatcagggtgaaggctatggtcttggtcttcttgaagcaatcaattatattgcacagtctaagaacatttacgatgttacaatagaaagcccttctgattccttgcagtatgtgagatcatccattgactgcctctgtttgctcatgtttgatccgatcaaacctgcactcggtgctattgtctcgtctctgaaggagaccaacctgtcaaaaagggcccaaagtttgagaatggttccaccagctgacctgatggagactatatgtcagaagctgaagataaagaagaaacagttccttcggtgctgggaaattctgatcttcctaagcctcgactctcaggatcataagagcgtggacaactttagggcctgcatatatgacttcatgaagggggagatccttggcagtgcctctagaactaacaggaagcgtctgttgtagatgccaaccagtttcaataaggaggcatcttttgctgtgtattggacacatgagattggggatgaggatgaacaaactgttgagcagcagccagaggatctgaggacgcaggagcaacagctcaatgagctcgtggacatccaaatcgaggatattgctggggtcgccaagaacgtcacttcacgtggcaaggataagatggcagagctggcggttcaatgaatttgggtgaggttcctacttcaaacgacgttaaaatgttgtcgtagcttatctggtgaggtctcttttacgggttggcttcttggtagaaagggaatgtcacagcataggcactgagtagattgtcacggcagattattatgtacttcaattctggaatatttgatgggaatgctattttagattgcttggtaagtgggaaccgcctcaaatcacagaagtagaagcagcttccgattcagccggaaccatttctccaaaaatg

SEQ ID NO: 11417 - DNA, 1587 bp, Zea Mays
ctagagacttcatcaccgcaggcagtcgcgcggcggctctcctccccgcaggcagtcgcgcggcggcctcatccccgctggcgagcctccactcccctccgccggagtcagggttctctcaattgcgaatgctcactcttgagtaaagggataggctaaagagcagctccatccagttcgacgaccatagtttttgcgagtgggtgcacaacctcaaattagcaagtacatgcctacatcgtcgacaactaaaggcaattactgagggagctcggtggggaagacctaaaggtgaagacgcggaaaaactcagggagaagctgaggcaggagtgcctgtggaaggggacggaactggcacatggggtggctgacgccctcttcgctgtatcacccaccgaggacctcgacggccctattgtacacctcccaccgcccgctgttcgactcccgcgcgagaagcatgtgtccgaggaggccggaaatcatctctttgtggaatcctgcattcctctgcacgacttcacgtacattattatttcacatgacaatgctacagttacactcttatctaattcacacgtatcatttttgcagcttggtgctgggacctcactgccaggattagtagctgcaaagatacttgtgttgccaccttatcagggtgaaggctatggtcttggtcttcttgaagcaatcaattatattgcacagtctaagaacatttacgatgttacaatagaaagcccttctgattccttgcagtatgtgagatcatccattgactgcctctgtttgctcatgtttgatccgatcaaacctgcactcggtgctattgtctcgtctctgaaggagaccaacctgtcaaaaagggcccaaagtttgagaatggttccaccagctgacctgatggagactatatgtcagaagctgaagataaagaagaaacagttccttcggtgctgggaaattctgatcttcctaagcctcgactctcaggatcataagagcgtggacaactttagggcctgcatatatgacttcatgaagggggagatccttggcagtgcctctagaactaacaggaagcgtctgttgtagatgccaaccagtttcaataaggaggcatcttttgctgtgtattggacacatgagattggggatgaggatgaacaaactgttgagcagcagccagaggatctgaggacgcaggagcaacagctcaatgagctcgtggacatccaaatcgaggatattgctggggtcgccaagaacgtcacttcacgtggcaaggataagatggcagagctggcggttcaatgaatttgggtgaggttcctacttcaaacgacgttaaaatgttgtcgtagcttatctggtgaggtctcttttacgggttggcttcttggtagaaagggaatgtcacagcataggcactgagtagattgtcacggcagattattatgtacttcaattctggaatatttgatgggaatgctattttagattgcttggtaagtgggaaccgcctcaaatcacagaagtagaagcagcttccgattcagccggaaccatttctccaaaaatg

SEQ ID NO: 11418 - DNA, 2365 bp, Zea Mays
ctagagacttcatcaccgcaggcagtcgcgcggcggctctcctccccgcaggcagtcgcgcggcggcctcatccccgctggcgagcctccactcccctccgccggtacgcctctatcgtcggtggactccccctcggcagacagcctcgcctcgcgtcttctcaccagtcgcgcggccactatcccgctgctctgcgcaccgcgcaacagtaaccgctcttcccacgacctattccatcccgagttcacttgtgtccgctctgaaatggtgcaacgctgcggcgttccatgcccatgcttgtttacttgtgtccgtcggcagaacaattgctggttgcgggtgtttgcatcttttcgcgcacaaatagatagtgtgtggcattgcctatttcattcagttctgcaaagataacagaaggttgggtatgggcaaatgtcgggtcagtcaagcaagcatcgcactgctctaaaagatcacagaagattgggtatggaattgcttgttccatggagattttgaaggaattctaccaacaagagctgacctcatgaaaacctccctcatcgaattcttgtgtttttcctgcacctcatccaaacattcggtcttggagttttctttatttgttcgatctatagagctacaggattcaaggtactacggtaatgaattcctatgtctcgggatttttgtgccagggaggccataatctgtcagagacgaaaacaagaaagaacccaactcagtttctttgaagcacatatcacctccttcctattcacctcttcagatgaatgcaagctcccaatgcacatatcgcctgacgtgaacctcgatcggcatcaggaggccaacggaggatcagagcaggaaggcgtggagcttgagctgcagcgagagcttgggccggaaaaactcagggagaagctgaggcaggagtgcctgtggaaggggacggaactggcacatggggtggctgacgccctcttcgctgtatcacccaccgaggacctcgacggccctattgtacacctcccaccgcccgctgttcgactcccgcgcgagaagcatgtgtccgaggaggccggaaatcatctctttgtggaatcctgcattcctctgcacgacttcacgtacattattatttcacatgacaatgctacagttacactcttatctaattcacacgtatcatttttgcagcttggtgctgggacctcactgccaggattagtagctgcaaaggttggggcagatgtaacactaacagacatcgcgcagacattattgtttctttaattgcaggccactggtgctgtactacgtggtcctgacgttgcgggacagcgtgcacaaggtcttctacgccgtcgtcgaggccgctgcagttcgcgcagacaacagccatcttggagatacttgtgttgccaccttatcagggtgaaggctatggtcttggtcttcttgaagcaatcaattatattgcacagtctaagaacatttacgatgttacaatagaaagcccttctgattccttgcagtatgtgagatcatccattgactgcctctgtttgctcatgtttgatccgatcaaacctgcactcggtgctattgtctcgtctctgaaggagaccaacctgtcaaaaagggcccaaagtttgagaatggttccaccagctgacctgatggagactatatgtcagaagctgaagataaagaagaaacagttccttcggtgctgggaaattctgatcttcctaagcctcgactctcaggatcataagagcgtggacaactttagggcctgcatatatgacttcatgaagggggagatccttggcagtgcctctagaactaacaggaagcgtctgttgtagatgccaaccagtttcaataaggaggcatcttttgctgtgtattggacacatgagattggggatgaggatgaacaaactgttgagcagcagccagaggatctgaggacgcaggagcaacagctcaatgagctcgtggacatccaaatcgaggatattgctggggtcgccaagaacgtcacttcacgtggcaaggataagatggcagagctggcggttcaatgaatttgggtgaggttcctacttcaaacgacgttaaaatgttgtcgtagcttatctggtgaggtctcttttacgggttggcttcttggtagaaagggaatgtcacagcataggcactgagtagattgtcacggcagattattatgtacttcaattctggaatatttgatgggaatgctattttagattgcttggtaagtgggaaccgcctcaaatcacagaagtagaagcagcttccgattcagccggaaccatttctccaaaaatg

SEQ ID NO: 11419 - DNA, 1689 bp, Zea Mays
ctagagacttcatcaccgcaggcagtcgcgcggcggctctcctccccgcaggcagtcgcgcggcggcctcatccccgctggcgagcctccactcccctccgccgggttctaaggtccgactggcacgaggctcgttcagtcgtctcgaggagtagcaccccaagatgtgagtcagggttctctcaattgcgaatgctcactcttgagtaaagggataggctaaagagcagctccatccagttcgacgaccatagtttttgcgagtgggtgcacaacctcaaattagcaagtacatgcctacatcgtcgacaactaaaggcaattactgagggagctcggtggggaagacctaaaggtgaagacgcggaaaaactcagggagaagctgaggcaggagtgcctgtggaaggggacggaactggcacatggggtggctgacgccctcttcgctgtatcacccaccgaggacctcgacggccctattgtacacctcccaccgcccgctgttcgactcccgcgcgagaagcatcttggtgctgggacctcactgccaggattagtagctgcaaaggttggggcagatgtaacactaacagacatcgcgcagacattattgtttctttaattgcaggccactggtgctgtactacgtggtcctgacgttgcgggacagcgtgcacaaggtcttctacgccgtcgtcgaggccgctgcagttcgcgcagacaacagccatcttggagatacttgtgttgccaccttatcagggtgaaggctatggtcttggtcttcttgaagcaatcaattatattgcacagtctaagaacatttacgatgttacaatagaaagcccttctgattccttgcagtatgtgagatcatccattgactgcctctgtttgctcatgtttgatccgatcaaacctgcactcggtgctattgtctcgtctctgaaggagaccaacctgtcaaaaagggcccaaagtttgagaatggttccaccagctgacctgatggagactatatgtcagaagctgaagataaagaagaaacagttccttcggtgctgggaaattctgatcttcctaagcctcgactctcaggatcataagagcgtggacaactttagggcctgcatatatgacttcatgaagggggagatccttggcagtgcctctagaactaacaggaagcgtctgttgtagatgccaaccagtttcaataaggaggcatcttttgctgtgtattggacacatgagattggggatgaggatgaacaaactgttgagcagcagccagaggatctgaggacgcaggagcaacagctcaatgagctcgtggacatccaaatcgaggatattgctggggtcgccaagaacgtcacttcacgtggcaaggataagatggcagagctggcggttcaatgaatttgggtgaggttcctacttcaaacgacgttaaaatgttgtcgtagcttatctggtgaggtctcttttacgggttggcttcttggtagaaagggaatgtcacagcataggcactgagtagattgtcacggcagattattatgtacttcaattctggaatatttgatgggaatgctattttagattgcttggtaagtgggaaccgcctcaaatcacagaagtagaagcagcttccgattcagccggaaccatttctccaaaaatg

SEQ ID NO: 11420 - DNA, 1730 bp, Zea Mays
ctagagacttcatcaccgcaggcagtcgcgcggcggctctcctccccgcaggcagtcgcgcggcggcctcatccccgctggcgagcctccactcccctccgccggtacgcctctatcgtcggtggactccccctcggcagacagcctcgcctcgcgtcttctcaccagtcgcgcggccactatcccgctgctctgcgcaccgcgcaacagagtcagggttctctcaattgcgaatgctcactcttgagtaaagggataggctaaagagcagctccatccagttcgacgaccatagtttttgcgagtgggtgcacaacctcaaattagcaagtacatgcctacatcgtcgacaactaaaggcaattactgagggagctcggtggggaagacctaaaggtgaagacgcggaaaaactcagggagaagctgaggcaggagtgcctgtggaaggggacggaactggcacatggggtggctgacgccctcttcgctgtatcacccaccgaggacctcgacggccctattgtacacctcccaccgcccgctgttcgactcccgcgcgagaagcatcttggtgctgggacctcactgccaggattagtagctgcaaaggttggggcagatgtaacactaacagacatcgcgcagacattattgtttctttaattgcaggccactggtgctgtactacgtggtcctgacgttgcgggacagcgtgcacaaggtcttctacgccgtcgtcgaggccgctgcagttcgcgcagacaacagccatcttggagatacttgtgttgccaccttatcagggtgaaggctatggtcttggtcttcttgaagcaatcaattatattgcacagtctaagaacatttacgatgttacaatagaaagcccttctgattccttgcagtatgtgagatcatccattgactgcctctgtttgctcatgtttgatccgatcaaacctgcactcggtgctattgtctcgtctctgaaggagaccaacctgtcaaaaagggcccaaagtttgagaatggttccaccagctgacctgatggagactatatgtcagaagctgaagataaagaagaaacagttccttcggtgctgggaaattctgatcttcctaagcctcgactctcaggatcataagagcgtggacaactttagggcctgcatatatgacttcatgaagggggagatccttggcagtgcctctagaactaacaggaagcgtctgttgtagatgccaaccagtttcaataaggaggcatcttttgctgtgtattggacacatgagattggggatgaggatgaacaaactgttgagcagcagccagaggatctgaggacgcaggagcaacagctcaatgagctcgtggacatccaaatcgaggatattgctggggtcgccaagaacgtcacttcacgtggcaaggataagatggcagagctggcggttcaatgaatttgggtgaggttcctacttcaaacgacgttaaaatgttgtcgtagcttatctggtgaggtctcttttacgggttggcttcttggtagaaagggaatgtcacagcataggcactgagtagattgtcacggcagattattatgtacttcaattctggaatatttgatgggaatgctattttagattgcttggtaagtgggaaccgcctcaaatcacagaagtagaagcagcttccgattcagccggaaccatttctccaaaaatg

SEQ ID NO: 11421 - DNA, 1625 bp, Zea Mays
ctagagacttcatcaccgcaggcagtcgcgcggcggctctcctccccgcaggcagtcgcgcggcggcctcatccccgctggcgagcctccactcccctccgccggagtcagggttctctcaattgcgaatgctcactcttgagtaaagggataggctaaagagcagctccatccagttcgacgaccatagtttttgcgagtgggtgcacaacctcaaattagcaagtacatgcctacatcgtcgacaactaaaggcaattactgagggagctcggtggggaagacctaaaggtgaagacgcggaaaaactcagggagaagctgaggcaggagtgcctgtggaaggggacggaactggcacatggggtggctgacgccctcttcgctgtatcacccaccgaggacctcgacggccctattgtacacctcccaccgcccgctgttcgactcccgcgcgagaagcatcttggtgctgggacctcactgccaggattagtagctgcaaaggttggggcagatgtaacactaacagacatcgcgcagacattattgtttctttaattgcaggccactggtgctgtactacgtggtcctgacgttgcgggacagcgtgcacaaggtcttctacgccgtcgtcgaggccgctgcagttcgcgcagacaacagccatcttggagatacttgtgttgccaccttatcagggtgaaggctatggtcttggtcttcttgaagcaatcaattatattgcacagtctaagaacatttacgatgttacaatagaaagcccttctgattccttgcagtatgtgagatcatccattgactgcctctgtttgctcatgtttgatccgatcaaacctgcactcggtgctattgtctcgtctctgaaggagaccaacctgtcaaaaagggcccaaagtttgagaatggttccaccagctgacctgatggagactatatgtcagaagctgaagataaagaagaaacagttccttcggtgctgggaaattctgatcttcctaagcctcgactctcaggatcataagagcgtggacaactttagggcctgcatatatgacttcatgaagggggagatccttggcagtgcctctagaactaacaggaagcgtctgttgtagatgccaaccagtttcaataaggaggcatcttttgctgtgtattggacacatgagattggggatgaggatgaacaaactgttgagcagcagccagaggatctgaggacgcaggagcaacagctcaatgagctcgtggacatccaaatcgaggatattgctggggtcgccaagaacgtcacttcacgtggcaaggataagatggcagagctggcggttcaatgaatttgggtgaggttcctacttcaaacgacgttaaaatgttgtcgtagcttatctggtgaggtctcttttacgggttggcttcttggtagaaagggaatgtcacagcataggcactgagtagattgtcacggcagattattatgtacttcaattctggaatatttgatgggaatgctattttagattgcttggtaagtgggaaccgcctcaaatcacagaagtagaagcagcttccgattcagccggaaccatttctccaaaaatg

SEQ ID NO: 11422 - DNA, 2224 bp, Zea Mays
ctagagacttcatcaccgcaggcagtcgcgcggcggctctcctccccgcaggcagtcgcgcggcggcctcatccccgctggcgagcctccactcccctccgccggagtcagggttctctcaattgcgaatgctcactcttgagtaaagggataggctaaagagcagctccatccagttcgacgaccatagtttttgcgagtgggtgcacaacctcaaattagcaagtacatgcctacatcgtcgacaactaaaggcaattactgagggagctcggtggggaagacctaaaggtgaagacggtaagtttgtcattaagtcattttgactttttattgaatgataacatggatctgattgtccttttctgagtgtttaattccttcttatttagtgccattggacatgtggtagctggctgtcacattgatttgaattcctatatatattctttagatggcataatcattttatcgttgcaaaagttgtttcagataaaattatgtctgcataggttcccttgccccaaagaaactccatgttcagttcaagaccaaattacaaaaagaaatcttcaacctacaatactactactccatttcattccttacaaagtttgtctttccttgatacaaattgcagaatgcactgaatagccttgaaatctttaaaaaagttgtactcacaccagcgcactaatgtcagttaggccatcaatgaagttatagaagtcactgatgtcataagttaggccattgggttgatatccctattttttctttcataaagcccacaaatccctaccatttctatttactgtaaaaagtaacttgtgtactttagaagggaaataaatcaagaagcacgactaactagaagttctgtttaattttttctgaagcggaaaaactcagggagaagctgaggcaggagtgcctgtggaaggggacggaactggcacatggggtggctgacgccctcttcgctgtatcacccaccgaggacctcgacggccctattgtacacctcccaccgcccgctgttcgactcccgcgcgagaagcatcttggtgctgggacctcactgccaggattagtagctgcaaaggttggggcagatgtaacactaacagacatcgcgcagacattattgtttctttaattgcaggccactggtgctgtactacgtggtcctgacgttgcgggacagcgtgcacaaggtcttctacgccgtcgtcgaggccgctgcagttcgcgcagacaacagccatcttggagatacttgtgttgccaccttatcagggtgaaggctatggtcttggtcttcttgaagcaatcaattatattgcacagtctaagaacatttacgatgttacaatagaaagcccttctgattccttgcagtatgtgagatcatccattgactgcctctgtttgctcatgtttgatccgatcaaacctgcactcggtgctattgtctcgtctctgaaggagaccaacctgtcaaaaagggcccaaagtttgagaatggttccaccagctgacctgatggagactatatgtcagaagctgaagataaagaagaaacagttccttcggtgctgggaaattctgatcttcctaagcctcgactctcaggatcataagagcgtggacaactttagggcctgcatatatgacttcatgaagggggagatccttggcagtgcctctagaactaacaggaagcgtctgttgtagatgccaaccagtttcaataaggaggcatcttttgctgtgtattggacacatgagattggggatgaggatgaacaaactgttgagcagcagccagaggatctgaggacgcaggagcaacagctcaatgagctcgtggacatccaaatcgaggatattgctggggtcgccaagaacgtcacttcacgtggcaaggataagatggcagagctggcggttcaatgaatttgggtgaggttcctacttcaaacgacgttaaaatgttgtcgtagcttatctggtgaggtctcttttacgggttggcttcttggtagaaagggaatgtcacagcataggcactgagtagattgtcacggcagattattatgtacttcaattctggaatatttgatgggaatgctattttagattgcttggtaagtgggaaccgcctcaaatcacagaagtagaagcagcttccgattcagccggaaccatttctccaaaaatg

SEQ ID NO: 11423 - DNA, 3403 bp, Zea Mays
aaatatataagagattagtgtagcacggttctgccagtgccatccgcgccctcagccgaggatctccattctcctccccacgcagaatccaccgcgaggttgcagtggtgtcgtgctccccagatctaccacgggcgcgtgcccggatctggcccgacgaacagcggtggagctcgcgcggtgttccattcatggattgggatctcaagatgtcggtctcctaggacctccgcgacttcccccgcgacagcgtcgggcattgccgccgcagctgccgcgccttccctcgcgacggcgccgagccgagcggagtgctccgtcgacctcaagctcggcaggacgacaccaccacgaaggagccggtggctgcaaccgcagcgccgtccgccagcccgatgggcggcgtcgggcattgccgccgcagctgccgagccttcccccgcgacggtgctgagccgggcggagtgctccgtcgacctcaagctcggcgggctaggcccaggagcagcccccggccccggggacctgcgacctgtacaagggccgctgggtgtacgacgagtcccgcgcgccgctgtacaaggagtccgactgcagcttcctcacggagcaggtcacctgtatgcgcaacggccgacgcgacgacgactaccagaagtggcgctggcagcccgacggctgcgatctccccagttcggctgcttcaaggtgctcggaaaggggatgctgttgtccaaccccatcattgttagggccaagctcatctccaagatcatcgagaagaggatcaatgttactggaggcactgtcttgctgaccgccacatagatgctgtcgacggatatgcatagaagagaacatatatgcataaaagggagtaaaactaagatttggatattttcatccggacacagagtaaagaattctccactctcttgacttgacgaggctatataaccagaggccatcagaggagaactgaagactgagagcattctctgcttataatctttattcctctatattctaaattatttttttcaatccccttccacctggattcgattcgaatcccacaccaccacgtggtgttcttcctatatcgaataaacgttgtttcgcttgtctaatgatcgatagggcactgaaagagtcattcctagagactctacggaaggacacaacggagatggagcagcctgcttgagaagaggcggcggaggagaaggaagcgctcaacctagactcgtggtcgtcgaccagcatgcgccttgacgtcctcttttttgattcatttatttgattttttgaacaaaattgcccttgtctttgtccttcctcccttttttcattttcttaatgccctcatgtaaaatataaggcatgtgttgttcaaatctttcttttaaaactacatgtatttcgtgtgttctatgatgatatatacagaaactggtcttcttgatatgttgatagtggtctgtttgctcttgaaccatggccattcagtgtaatccgtgaatgtcatatattatactccctctattttgaaatatagaacattgaggacatgctacaactaattagcctttttattttgaatcaagttttctctttctgccaaatcttgctattaagcaatagtgcatgcatattttttttctaaatcagaccattttctataggacaaaggagggcatatggaaggacataaaggaaggagggatactggatgaacatatcgtgcatgagaaagaaattgctatttctgatattcaacaaactgttgaatctgttcagcttgacatcaagcaccttcttgaggcagcagcagcaaaagtggcagaagttcagctagaggtgaatcaactttatggttttgctgaaactctgaattcacttaacatcatccaagagcatgatattgttttcaaggatatgcttcattcagagctgactggactaaccaataccatcggggagagctacaggattcaagatgaatgcaagctcccaatgcacatatcgcctgacgtgaacctcgatcggcatcaggaggccaacggaggatcagagcaggaaggcgtggagcttgagctgcagcgagagcttgggccggaaaaactcagggagaagctgaggcaggagtgcctgtggaaggggacggaactggcacatggggtggctgacgccctcttcgctgtatcacccaccgaggacctcgacggccctattgtacacctcccaccgcccgctgttcgactcccgcgcgagaagcatgtgtccgaggaggccggaaatcatctctttgtggaatcctgcattcctctgcacgacttcacgtacattattatttcacatgacaatgctacagttacactcttatctaattcacacgtatcatttttgcagcttggtgctgggacctcactgccaggattagtagctgcaaagatacttgtgttgccaccttatcagggtgaaggctatggtcttggtcttcttgaagcaatcaattatattgcacagtctaagaacatttacgatgttacaatagaaagcccttctgattccttgcagtatgtgagatcatccattgactgcctctgtttgctcatgtttgatccgatcaaacctgcactcggtgctattgtctcgtctctgaaggagaccaacctgtcaaaaagggcccaaagtttgagaatggttccaccagctgacctgatggagactatatgtcagaagctgaagataaagaagaaacagttccttcggtgctgggaaattctgatcttcctaagcctcgactctcaggatcataagagcgtggacaactttagggcctgcatatatgacttcatgaagggggagatccttggcagtgcctctagaactaacaggaagcgtctgttgtagatgccaaccagtttcaataaggaggcatcttttgctgtgtattggacacatgagattggggatgaggatgaacaaactgttgagcagcagccagaggatctgaggacgcaggagcaacagctcaatgagctcgtggacatccaaatcgaggatattgctggggtcgccaagaacgtcacttcacgtggcaaggataagatggcagagctggcggttcaatgaatttgggtgaggttcctacttcaaacgacgttaaaatgttgtcgtagcttatctggtgaggtctcttttacgggttggcttcttggtagaaagggaatgtcacagcataggcactgagtagattgtcacggcagattattatgtacttcaattctggaatatttgatgggaatgctattttagattgcttggtaagtgggaaccgcctcaaatcacagaagtagaagcagcttccgattcagccggaaccatttctccaaaaatg

SEQ ID NO: 11424 - DNA, 3828 bp, Zea Mays
aaatatataagagattagtgtagcacggttctgccagtgccatccgcgccctcagccgaggatctccattctcctccccacgcagaatccaccgcgaggttgcagtggtgtcgtgctccccagatctaccacgggcgcgtgcccggatctggcccgacgaacagcggtggagctcgcgcggtgttccattcatggattgggatctcaagatgtcggtctcctaggacctccgcgacttcccccgcgacagcgtcgggcattgccgccgcagctgccgcgccttccctcgcgacggcgccgagccgagcggagtgctccgtcgacctcaagctcggcaggacgacaccaccacgaaggagccggtggctgcaaccgcagcgccgtccgccagcccgatgggcggcgtcgggcattgccgccgcagctgccgagccttcccccgcgacggtgctgagccgggcggagtgctccgtcgacctcaagctcggcgggctaggcccaggagcagcccccggccccggggacctgcgacctgtacaagggccgctgggtgtacgacgagtcccgcgcgccgctgtacaaggagtccgactgcagcttcctcacggagcaggtcacctgtatgcgcaacggccgacgcgacgacgactaccagaagtggcgctggcagcccgacggctgcgatctccccaggtaccaccgccttgcttcctcgcttgcctgccactgattctacagaaacggtgcctatacgtatacgtgtacggtttacgcggcccggcgcgcgtcgtagggtaggtgcgcgttttcgtttgcgggctggatactgtgaattctagcaaaattaccttaattattagctgagcacacctctgtacaccataattatccgagactgagttgaatctgtatgtagaacctgctatgggatggcacttcttgtgactatgttagcagtagattcgtgtttgactgtagtagtaaaataaattgttgatcccaatggattgttctacaacctgtatctattttatgagtcggatccaatgccatctgccgccatgtcaaagcgaggtaagcagcctcttttaccaactggattcggccatttctcgtcgctcgatctggctataaatctcgcctgctcgtgcatgtgacatagttcggctgcttcaaggtgctcggaaaggggatgctgttgtccaaccccatcattgttagggccaagctcatctccaagatcatcgagaagaggatcaatgttactggaggcactgtcttgctgaccgccacataggtctttatgcatcttgttttatctatctgtgataagaaagctttccatttctttttgtggatcatgcgttgtgagataatattctctgatgctgtcgacggatatgcatagaagagaacatatatgcataaaagggagtaaaactaagatttggatattttcatccggacacagagtaaagaattctccactctcttgacttgacgaggctatataaccagaggccatcagaggagaactgaagactgagagcattctctgcttataatctttattcctctatattctaaattatttttttcaatccccttccacctggattcgattcgaatcccacaccaccacgtggtgttcttcctatatcgaataaacgttgtttcgcttgtctaatgatcgatagggcactgaaagagtcattcctagagactctacggaaggacacaacggagatggagcagcctgcttgagaagaggcggcggaggagaaggaagcgctcaacctagactcgtggtcgtcgaccagcatgcgccttgacgtcctcttttttgattcatttatttgattttttgaacaaaattgcccttgtctttgtccttcctcccttttttcattttcttaatgccctcatgtaaaatataaggcatgtgttgttcaaatctttcttttaaaactacatgtatttcgtgtgttctatgatgatatatacagaaactggtcttcttgatatgttgatagtggtctgtttgctcttgaaccatggccattcagtgtaatccgtgaatgtcatatattatactccctctattttgaaatatagaacattgaggacatgctacaactaattagcctttttattttgaatcaagttttctctttctgccaaatcttgctattaagcaatagtgcatgcatattttttttctaaatcagaccattttctataggacaaaggagggcatatggaaggacataaaggaaggagggatactggatgaacatatcgtgcatgagaaagaaattgctatttctgatattcaacaaactgttgaatctgttcagcttgacatcaagcaccttcttgaggcagcagcagcaaaagtggcagaagttcagctagaggtgaatcaactttatggttttgctgaaactctgaattcacttaacatcatccaagagcatgatattgttttcaaggatatgcttcattcagagctgactggactaaccaataccatcggggagagctacaggattcaagatgaatgcaagctcccaatgcacatatcgcctgacgtgaacctcgatcggcatcaggaggccaacggaggatcagagcaggaaggcgtggagcttgagctgcagcgagagcttgggccggaaaaactcagggagaagctgaggcaggagtgcctgtggaaggggacggaactggcacatggggtggctgacgccctcttcgctgtatcacccaccgaggacctcgacggccctattgtacacctcccaccgcccgctgttcgactcccgcgcgagaagcatcttggtgctgggacctcactgccaggattagtagctgcaaagatacttgtgttgccaccttatcagggtgaaggctatggtcttggtcttcttgaagcaatcaattatattgcacagtctaagaacatttacgatgttacaatagaaagcccttctgattccttgcagtatgtgagatcatccattgactgcctctgtttgctcatgtttgatccgatcaaacctgcactcggtgctattgtctcgtctctgaaggagaccaacctgtcaaaaagggcccaaagtttgagaatggttccaccagctgacctgatggagactatatgtcagaagctgaagataaagaagaaacagttccttcggtgctgggaaattctgatcttcctaagcctcgactctcaggatcataagagcgtggacaactttagggcctgcatatatgacttcatgaagggggagatccttggcagtgcctctagaactaacaggaagcgtctgttgtagatgccaaccagtttcaataaggaggcatcttttgctgtgtattggacacatgagattggggatgaggatgaacaaactgttgagcagcagccagaggatctgaggacgcaggagcaacagctcaatgagctcgtggacatccaaatcgaggatattgctggggtcgccaagaacgtcacttcacgtggcaaggataagatggcagagctggcggttcaatgaatttgggtgaggttcctacttcaaacgacgttaaaatgttgtcgtagcttatctggtgaggtctcttttacgggttggcttcttggtagaaagggaatgtcacagcataggcactgagtagattgtcacggcagattattatgtacttcaattctggaatatttgatgggaatgctattttagattgcttggtaagtgggaaccgcctcaaatcacagaagtagaagcagcttccgattcagccggaaccatttctccaaaaatg

SEQ ID NO: 11425 - DNA, 4956 bp, Zea Mays
aaatatataagagattagtgtagcacggttctgccagtgccatccgcgccctcagccgaggatctccattctcctccccacgcagaatccaccgcgaggttgcagtggtgtcgtgctccccagatctaccacgggcgcgtgcccggatctggcccgacgaacagcggtggagctcgcgcggtgttccattcatggattgggatctcaagatgtcggtctcctaggacctccgcgacttcccccgcgacagcgtcgggcattgccgccgcagctgccgcgccttccctcgcgacggcgccgagccgagcggagtgctccgtcgacctcaagctcggcaggacgacaccaccacgaaggagccggtggctgcaaccgcagcgccgtccgccagcccgatgggcggcgtcgggcattgccgccgcagctgccgagccttcccccgcgacggtgctgagccgggcggagtgctccgtcgacctcaagctcggcgggctaggcccaggagcagcccccggccccggggacctgcgacctgtacaagggccgctgggtgtacgacgagtcccgcgcgccgctgtacaaggagtccgactgcagcttcctcacggagcaggtcacctgtatgcgcaacggccgacgcgacgacgactaccagaagtggcgctggcagcccgacggctgcgatctccccaggtaccaccgccttgcttcctcgcttgcctgccactgattctacagaaacggtgcctatacgtatacgtgtacggtttacgcggcccggcgcgcgtcgtagggtaggtgcgcgttttcgtttgcgggctggatactgtgaattctagcaaaattaccttaattattagctgagcacacctctgtacaccataattatccgagactgagttgaatctgtatgtagaacctgctatgggatggcacttcttgtgactatgttagcagtagattcgtgtttgactgtagtagtaaaataaattgttgatcccaatggattgttctacaacctgtatctattttatgagtcggatccaatgccatctgccgccatgtcaaagcgaggtaagcagcctcttttaccaactggattcggccatttctcgtcgctcgatctggctataaatctcgcctgctcgtgcatgtgacatagttcggctgcttcaaggtgctcggaaaggggatgctgttgtccaaccccatcattgttagggccaagctcatctccaagatcatcgagaagaggatcaatgttactggaggcactgtcttgctgaccgccacataggtctttatgcatcttgttttatctatctgtgataagaaagctttccatttctttttgtggatcatgcgttgtgagataatattctctggtacgtctaattgtgggcatgtattgtccttttctggtgtatggttggaaacgacaaaatcaattgatttcagtctttatcactaatctgagatgcagatgctgtcgacggatatgcatagaagagaacatatatgcataaaagggagtaaaactaagatttggatattttcatccggacacagagtaaagaattctccactctcttgacttgacgaggctatataaccagaggccatcagaggagaactgaagactgagagcattctctgcttataatctttattcctctatattctaaattatttttttcaatccccttccacctggattcgattcgaatcccacaccaccacgtggtgttcttcctatatcgaataaacgttgtttcgcttgtctaatgatcgatagggcactgaaagagtcattcctagagactctacggaaggacacaacggagatggagcagcctgcttgagaagaggcggcggaggagaaggaagcgctcaacctagactcgtggtcgtcgaccagcatgcgccttgacgtcctcttttttgattcatttatttgattttttgaacaaaattgcccttgtctttgtccttcctcccttttttcattttcttaatgccctcatgtaaaatataaggcatgtgttgttcaaatctttcttttaaaactacatgtatttcgtgtgttctatgatgatatatacagaaactggtcttcttgatatgttgatagtggtctgtttgctcttgaaccatggccattcagtgtaatccgtgaatgtcatatattatactccctctattttgaaatatagaacattgaggacatgctacaactaattagcctttttattttgaatcaagttttctctttctgccaaatcttgctattaagcaatagtgcatgcatattttttttctaaatcagaccattttctataggacaaaggagggcatatggaaggacataaaggaaggagggatactggatgaacatatcgtgcatgagaaagaaattgctatttctgatattcaacaaactgttgaatctgttcagcttgacatcaagcaccttcttgaggcagcagcagcaaaagtggcagaagttcagctagaggtgaatcaactttatggttttgctgaaactctgaattcacttaacatcatccaagagcatgatattgttttcaaggatatgcttcattcagagctgactggactaaccaataccatcggggagagctacaggattcaagatgaatgcaagctcccaatgcacatatcgcctgacgtgaacctcgatcggcatcaggaggccaacggaggatcagagcaggaaggcgtggagcttgagctgcagcgagagcttgggcgtgagctgcaagaccaatgcaggcgtctcagtcagcaatacaaccgcacaactctcctactgtctatgaggtgtcagatgttcatgcatattccagtaaagttgaacagagccatcaggagtgcgtacatacagggcatggaaattatctccaaaggccgagccatcttgtagctctgctatggattcgagtcaccgtgggttgccgtgagaagcatgagagccacacagcctgcagatgcgagcagcagtcttcttaatgataaatatgtctacagcttcagtcataactatactgatgcattttaactgcaacgtcactcatcacaataaacatgaaggacataagctttatctcagacactcaatgttgtgcgataacctaatcaggtcacatatgttgtctggatcgtattaccagatgtcatctgataatgtgcaattttagagagtgttgaaggcttctttataacgttctcgagttgtagggttctaaggtccgactggcacgaggctcgttcagtcgtctcgaggagtagcaccccaagatgtaagaatggcattaagggcctgttcgtttcgcatggaatgaaggggtgaaataaatctgccttggattcctttaataattactataagtttgttaattgaaatacaatgagcaggagtcagggttctctcaattgcgaatgctcactcttgagtaaagggataggctaaagagcagctccatccagttcgacgaccatagtttttgcgagtgggtgcacaacctcaaattagcaagtacatgcctacatcgtcgacaactaaaggcaattactgagggagctcggtggggaagacctaaaggtgaagacgcggaaaaactcagggagaagctgaggcaggagtgcctgtggaaggggacggaactggcacatggggtggctgacgccctcttcgctgtatcacccaccgaggacctcgacggccctattgtacacctcccaccgcccgctgttcgactcccgcgcgagaagcatcttggtgctgggacctcactgccaggattagtagctgcaaaggttggggcagatgtaacactaacagacatcgcgcagacattattgtttctttaattgcaggccactggtgctgtactacgtggtcctgacgttgcgggacagcgtgcacaaggtcttctacgccgtcgtcgaggccgctgcagttcgcgcagacaacagccatcttggagatacttgtgttgccaccttatcagggtgaaggctatggtcttggtcttcttgaagcaatcaattatattgcacagtctaagaacatttacgatgttacaatagaaagcccttctgattccttgcagtatgtgagatcatccattgactgcctctgtttgctcatgtttgatccgatcaaacctgcactcggtgctattgtctcgtctctgaaggagaccaacctgtcaaaaagggcccaaagtttgagaatggttccaccagctgacctgatggagactatatgtcagaagctgaagataaagaagaaacagttccttcggtgctgggaaattctgatcttcctaagcctcgactctcaggatcataagagcgtggacaactttagggcctgcatatatgacttcatgaagggggagatccttggcagtgcctctagaactaacaggaagcgtctgttgtagatgccaaccagtttcaataaggaggcatcttttgctgtgtattggacacatgagattggggatgaggatgaacaaactgttgagcagcagccagaggatctgaggacgcaggagcaacagctcaatgagctcgtggacatccaaatcgaggatattgctggggtcgccaagaacgtcacttcacgtggcaaggataagatggcagagctggcggttcaatgaatttgggtgaggttcctacttcaaacgacgttaaaatgttgtcgtagcttatctggtgaggtctcttttacgggttggcttcttggtagaaagggaatgtcacagcataggcactgagtagattgtcacggcagattattatgtacttcaattctggaatatttgatgggaatgctattttagattgcttggtaagtgggaaccgcctcaaatcacagaagtagaagcagcttccgattcagccggaaccatttctccaaaaatg

SEQ ID NO: 11426 - DNA, 5555 bp, Zea Mays
aaatatataagagattagtgtagcacggttctgccagtgccatccgcgccctcagccgaggatctccattctcctccccacgcagaatccaccgcgaggttgcagtggtgtcgtgctccccagatctaccacgggcgcgtgcccggatctggcccgacgaacagcggtggagctcgcgcggtgttccattcatggattgggatctcaagatgtcggtctcctaggacctccgcgacttcccccgcgacagcgtcgggcattgccgccgcagctgccgcgccttccctcgcgacggcgccgagccgagcggagtgctccgtcgacctcaagctcggcaggacgacaccaccacgaaggagccggtggctgcaaccgcagcgccgtccgccagcccgatgggcggcgtcgggcattgccgccgcagctgccgagccttcccccgcgacggtgctgagccgggcggagtgctccgtcgacctcaagctcggcgggctaggcccaggagcagcccccggccccggggacctgcgacctgtacaagggccgctgggtgtacgacgagtcccgcgcgccgctgtacaaggagtccgactgcagcttcctcacggagcaggtcacctgtatgcgcaacggccgacgcgacgacgactaccagaagtggcgctggcagcccgacggctgcgatctccccaggtaccaccgccttgcttcctcgcttgcctgccactgattctacagaaacggtgcctatacgtatacgtgtacggtttacgcggcccggcgcgcgtcgtagggtaggtgcgcgttttcgtttgcgggctggatactgtgaattctagcaaaattaccttaattattagctgagcacacctctgtacaccataattatccgagactgagttgaatctgtatgtagaacctgctatgggatggcacttcttgtgactatgttagcagtagattcgtgtttgactgtagtagtaaaataaattgttgatcccaatggattgttctacaacctgtatctattttatgagtcggatccaatgccatctgccgccatgtcaaagcgaggtaagcagcctcttttaccaactggattcggccatttctcgtcgctcgatctggctataaatctcgcctgctcgtgcatgtgacatagttcggctgcttcaaggtgctcggaaaggggatgctgttgtccaaccccatcattgttagggccaagctcatctccaagatcatcgagaagaggatcaatgttactggaggcactgtcttgctgaccgccacataggtctttatgcatcttgttttatctatctgtgataagaaagctttccatttctttttgtggatcatgcgttgtgagataatattctctggtacgtctaattgtgggcatgtattgtccttttctggtgtatggttggaaacgacaaaatcaattgatttcagtctttatcactaatctgagatgcagatgctgtcgacggatatgcatagaagagaacatatatgcataaaagggagtaaaactaagatttggatattttcatccggacacagagtaaagaattctccactctcttgacttgacgaggctatataaccagaggccatcagaggagaactgaagactgagagcattctctgcttataatctttattcctctatattctaaattatttttttcaatccccttccacctggattcgattcgaatcccacaccaccacgtggtgttcttcctatatcgaataaacgttgtttcgcttgtctaatgatcgatagggcactgaaagagtcattcctagagactctacggaaggacacaacggagatggagcagcctgcttgagaagaggcggcggaggagaaggaagcgctcaacctagactcgtggtcgtcgaccagcatgcgccttgacgtcctcttttttgattcatttatttgattttttgaacaaaattgcccttgtctttgtccttcctcccttttttcattttcttaatgccctcatgtaaaatataaggcatgtgttgttcaaatctttcttttaaaactacatgtatttcgtgtgttctatgatgatatatacagaaactggtcttcttgatatgttgatagtggtctgtttgctcttgaaccatggccattcagtgtaatccgtgaatgtcatatattatactccctctattttgaaatatagaacattgaggacatgctacaactaattagcctttttattttgaatcaagttttctctttctgccaaatcttgctattaagcaatagtgcatgcatattttttttctaaatcagaccattttctataggacaaaggagggcatatggaaggacataaaggaaggagggatactggatgaacatatcgtgcatgagaaagaaattgctatttctgatattcaacaaactgttgaatctgttcagcttgacatcaagcaccttcttgaggcagcagcagcaaaagtggcagaagttcagctagaggtgaatcaactttatggttttgctgaaactctgaattcacttaacatcatccaagagcatgatattgttttcaaggatatgcttcattcagagctgactggactaaccaataccatcggggagagctacaggattcaagatgaatgcaagctcccaatgcacatatcgcctgacgtgaacctcgatcggcatcaggaggccaacggaggatcagagcaggaaggcgtggagcttgagctgcagcgagagcttgggcgtgagctgcaagaccaatgcaggcgtctcagtcagcaatacaaccgcacaactctcctactgtctatgaggtgtcagatgttcatgcatattccagtaaagttgaacagagccatcaggagtgcgtacatacagggcatggaaattatctccaaaggccgagccatcttgtagctctgctatggattcgagtcaccgtgggttgccgtgagaagcatgagagccacacagcctgcagatgcgagcagcagtcttcttaatgataaatatgtctacagcttcagtcataactatactgatgcattttaactgcaacgtcactcatcacaataaacatgaaggacataagctttatctcagacactcaatgttgtgcgataacctaatcaggtcacatatgttgtctggatcgtattaccagatgtcatctgataatgtgcaattttagagagtgttgaaggcttctttataacgttctcgagttgtagggttctaaggtccgactggcacgaggctcgttcagtcgtctcgaggagtagcaccccaagatgtaagaatggcattaagggcctgttcgtttcgcatggaatgaaggggtgaaataaatctgccttggattcctttaataattactataagtttgttaattgaaatacaatgagcaggagtcagggttctctcaattgcgaatgctcactcttgagtaaagggataggctaaagagcagctccatccagttcgacgaccatagtttttgcgagtgggtgcacaacctcaaattagcaagtacatgcctacatcgtcgacaactaaaggcaattactgagggagctcggtggggaagacctaaaggtgaagacggtaagtttgtcattaagtcattttgactttttattgaatgataacatggatctgattgtccttttctgagtgtttaattccttcttatttagtgccattggacatgtggtagctggctgtcacattgatttgaattcctatatatattctttagatggcataatcattttatcgttgcaaaagttgtttcagataaaattatgtctgcataggttcccttgccccaaagaaactccatgttcagttcaagaccaaattacaaaaagaaatcttcaacctacaatactactactccatttcattccttacaaagtttgtctttccttgatacaaattgcagaatgcactgaatagccttgaaatctttaaaaaagttgtactcacaccagcgcactaatgtcagttaggccatcaatgaagttatagaagtcactgatgtcataagttaggccattgggttgatatccctattttttctttcataaagcccacaaatccctaccatttctatttactgtaaaaagtaacttgtgtactttagaagggaaataaatcaagaagcacgactaactagaagttctgtttaattttttctgaagcggaaaaactcagggagaagctgaggcaggagtgcctgtggaaggggacggaactggcacatggggtggctgacgccctcttcgctgtatcacccaccgaggacctcgacggccctattgtacacctcccaccgcccgctgttcgactcccgcgcgagaagcatcttggtgctgggacctcactgccaggattagtagctgcaaaggttggggcagatgtaacactaacagacatcgcgcagacattattgtttctttaattgcaggccactggtgctgtactacgtggtcctgacgttgcgggacagcgtgcacaaggtcttctacgccgtcgtcgaggccgctgcagttcgcgcagacaacagccatcttggagatacttgtgttgccaccttatcagggtgaaggctatggtcttggtcttcttgaagcaatcaattatattgcacagtctaagaacatttacgatgttacaatagaaagcccttctgattccttgcagtatgtgagatcatccattgactgcctctgtttgctcatgtttgatccgatcaaacctgcactcggtgctattgtctcgtctctgaaggagaccaacctgtcaaaaagggcccaaagtttgagaatggttccaccagctgacctgatggagactatatgtcagaagctgaagataaagaagaaacagttccttcggtgctgggaaattctgatcttcctaagcctcgactctcaggatcataagagcgtggacaactttagggcctgcatatatgacttcatgaagggggagatccttggcagtgcctctagaactaacaggaagcgtctgttgtagatgccaaccagtttcaataaggaggcatcttttgctgtgtattggacacatgagattggggatgaggatgaacaaactgttgagcagcagccagaggatctgaggacgcaggagcaacagctcaatgagctcgtggacatccaaatcgaggatattgctggggtcgccaagaacgtcacttcacgtggcaaggataagatggcagagctggcggttcaatgaatttgggtgaggttcctacttcaaacgacgttaaaatgttgtcgtagcttatctggtgaggtctcttttacgggttggcttcttggtagaaagggaatgtcacagcataggcactgagtagattgtcacggcagattattatgtacttcaattctggaatatttgatgggaatgctattttagattgcttggtaagtgggaaccgcctcaaatcacagaagtagaagcagcttccgattcagccggaaccatttctccaaaaatg

SEQ ID NO: 11427 - DNA, 4826 bp, Zea Mays
aaatatataagagattagtgtagcacggttctgccagtgccatccgcgccctcagccgaggatctccattctcctccccacgcagaatccaccgcgaggtctccgccgccctaaccgcgcccttccatccatggttgcagtggtgtcgtgctccccagatctaccacgggcgcgtgcccggatctggcccgacgaacagcggtggagctcgcgcggtgttccattcatggattgggatctcaagatgtcggtctcctaggacctccgcgacttcccccgcgacagcgtcgggcattgccgccgcagctgccgcgccttccctcgcgacggcgccgagccgagcggagtgctccgtcgacctcaagctcggcaggacgacaccaccacgaaggagccggtggctgcaaccgcagcgccgtccgccagcccgatgggcggcgtcgggcattgccgccgcagctgccgagccttcccccgcgacggtgctgagccgggcggagtgctccgtcgacctcaagctcggcgggctaggcccaggagcagcccccggccccggggacctgcgacctgtacaagggccgctgggtgtacgacgagtcccgcgcgccgctgtacaaggagtccgactgcagcttcctcacggagcaggtcacctgtatgcgcaacggccgacgcgacgacgactaccagaagtggcgctggcagcccgacggctgcgatctccccaggtaccaccgccttgcttcctcgcttgcctgccactgattctacagaaacggtgcctatacgtatacgtgtacggtttacgcggcccggcgcgcgtcgtagggtaggtgcgcgttttcgtttgcgggctggatactgtgaattctagcaaaattaccttaattattagctgagcacacctctgtacaccataattatccgagactgagttgaatctgtatgtagaacctgctatgggatggcacttcttgtgactatgttagcagtagattcgtgtttgactgtagtagtaaaataaattgttgatcccaatggattgttctacaacctgtatctattttatgagtcggatccaatgccatctgccgccatgtcaaagcgaggtaagcagcctcttttaccaactggattcggccatttctcgtcgctcgatctggctataaatctcgcctgctcgtgcatgtgacatagttcggctgcttcaaggtgctcggaaaggggatgctgttgtccaaccccatcattgttagggccaagctcatctccaagatcatcgagaagaggatcaatgttactggaggcactgtcttgctgaccgccacatagatgctgtcgacggatatgcatagaagagaacatatatgcataaaagggagtaaaactaagatttggatattttcatccggacacagagtaaagaattctccactctcttgacttgacgaggctatataaccagaggccatcagaggagaactgaagactgagagcattctctgcttataatctttattcctctatattctaaattatttttttcaatccccttccacctggattcgattcgaatcccacaccaccacgtggtgttcttcctatatcgaataaacgttgtttcgcttgtctaatgatcgatagggcactgaaagagtcattcctagagactctacggaaggacacaacggagatggagcagcctgcttgagaagaggcggcggaggagaaggaagcgctcaacctagactcgtggtcgtcgaccagcatgcgccttgacgtcctcttttttgattcatttatttgattttttgaacaaaattgcccttgtctttgtccttcctcccttttttcattttcttaatgccctcatgtaaaatataaggcatgtgttgttcaaatctttcttttaaaactacatgtatttcgtgtgttctatgatgatatatacagaaactggtcttcttgatatgttgatagtggtctgtttgctcttgaaccatggccattcagtgtaatccgtgaatgtcatatattatactccctctattttgaaatatagaacattgaggacatgctacaactaattagcctttttattttgaatcaagttttctctttctgccaaatcttgctattaagcaatagtgcatgcatattttttttctaaatcagaccattttctataggacaaaggagggcatatggaaggacataaaggaaggagggatactggatgaacatatcgtgcatgagaaagaaattgctatttctgatattcaacaaactgttgaatctgttcagcttgacatcaagcaccttcttgaggcagcagcagcaaaagtggcagaagttcagctagaggtgaatcaactttatggttttgctgaaactctgaattcacttaacatcatccaagagcatgatattgttttcaaggatatgcttcattcagagctgactggactaaccaataccatcggggagagctacaggattcaaggtactacggtaatgaattcctatgtctcgggatttttgtgccagggaggccataatctgtcagagacgaaaacaagaaagaacccaactcagtttctttgaagcacatatcacctccttcctattcacctcttcagatgaatgcaagctcccaatgcacatatcgcctgacgtgaacctcgatcggcatcaggaggccaacggaggatcagagcaggaaggcgtggagcttgagctgcagcgagagcttgggcgtgagctgcaagaccaatgcaggcgtctcagtcagcaatacaaccgcacaactctcctactgtctatgaggtgtcagatgttcatgcatattccagtaaagttgaacagagccatcaggagtgcgtacatacagggcatggaaattatctccaaaggccgagccatcttgtagctctgctatggattcgagtcaccgtgggttgccgtgagaagcatgagagccacacagcctgcagatgcgagcagcagtcttcttaatgataaatatgtctacagcttcagtcataactatactgatgcattttaactgcaacgtcactcatcacaataaacatgaaggacataagctttatctcagacactcaatgttgtgcgataacctaatcaggtcacatatgttgtctggatcgtattaccagatgtcatctgataatgtgcaattttagagagtgttgaaggcttctttataacgttctcgagttgtagggttctaaggtccgactggcacgaggctcgttcagtcgtctcgaggagtagcaccccaagatgagtcagggttctctcaattgcgaatgctcactcttgagtaaagggataggctaaagagcagctccatccagttcgacgaccatagtttttgcgagtgggtgcacaacctcaaattagcaagtacatgcctacatcgtcgacaactaaaggcaattactgagggagctcggtggggaagacctaaaggtgaagacgcggaaaaactcagggagaagctgaggcaggagtgcctgtggaaggggacggaactggcacatggggtggctgacgccctcttcgctgtatcacccaccgaggacctcgacggccctattgtacacctcccaccgcccgctgttcgactcccgcgcgagaagcatcttggtgctgggacctcactgccaggattagtagctgcaaaggttggggcagatgtaacactaacagacatcgcgcagacattattgtttctttaattgcaggccactggtgctgtactacgtggtcctgacgttgcgggacagcgtgcacaaggtcttctacgccgtcgtcgaggccgctgcagttcgcgcagacaacagccatcttggagatacttgtgttgccaccttatcagggtgaaggctatggtcttggtcttcttgaagcaatcaattatattgcacagtctaagaacatttacgatgttacaatagaaagcccttctgattccttgcagtatgtgagatcatccattgactgcctctgtttgctcatgtttgatccgatcaaacctgcactcggtgctattgtctcgtctctgaaggagaccaacctgtcaaaaagggcccaaagtttgagaatggttccaccagctgacctgatggagactatatgtcagaagctgaagataaagaagaaacagttccttcggtgctgggaaattctgatcttcctaagcctcgactctcaggatcataagagcgtggacaactttagggcctgcatatatgacttcatgaagggggagatccttggcagtgcctctagaactaacaggaagcgtctgttgtagatgccaaccagtttcaataaggaggcatcttttgctgtgtattggacacatgagattggggatgaggatgaacaaactgttgagcagcagccagaggatctgaggacgcaggagcaacagctcaatgagctcgtggacatccaaatcgaggatattgctggggtcgccaagaacgtcacttcacgtggcaaggataagatggcagagctggcggttcaatgaatttgggtgaggttcctacttcaaacgacgttaaaatgttgtcgtagcttatctggtgaggtctcttttacgggttggcttcttggtagaaagggaatgtcacagcataggcactgagtagattgtcacggcagattattatgtacttcaattctggaatatttgatgggaatgctattttagattgcttggtaagtgggaaccgcctcaaatcacagaagtagaagcagcttccgattcagccggaaccatttctccaaaaatg

SEQ ID NO: 11428 - DNA, 1938 bp, Zea Mays
gtggttaaaattctaaactgtagcttttaatataaaactacaatttatttaatttaattaaataaaatagggtcaaattcttattaaatataatagttaagttagctctgaccaattgagaatctatcttggttttgccaatccaactaattaatatctgcaggatggcgacattggatgaactcatgaggcaactaattaggttccatcaggtcataagttaagttaaactaattttaaggtagcagcattttaaaaataaaaaaaaagaaaaataaaagtaaggaggagccaagaactgaacgtaaagaacacctctgcgcatgaaacagttgcaaggccccgctctggatcgattcttaaccgcctgattaatctatctcttcgttagtctccgactccgaggctttcacctcgcggcttaatcccaattgggttggctggagcgcaacccaattgggggttaattgggattgctacttcgcgggtgctcgtccgtcgtggtcttggattggcgaggcgaatcgactggtttcctgcagcctccttggtaggatcatgaagctgaaaaatagtgcactggagacttttaaggagaacaatacgattttcactcctgaaggaaatttccactctacaaagatgcgagaagagtatgttgctggtccgaaccaaccagccgttgttgagacaagatgcaaatggatgattggagatgtaactgaggtcctggatcgcaacacgtggaagcttggaaagatcttaaagatgctgaagaacgattacttcgttatcaggcttgctgattgcatccgactgaaggagttccacatatctagcttgagaattccacgcggtctggaagctcctgaaagcaagccctttcatgcagcagcggacaaggccaccggacgcgataaacgccgaccagctgatggcgcctcgcccggcacaagagctgtgcagcagacgtgtcaccgaacaacctacgatctagggagcagtggcaagaagcggaaaccagacgcagatgcctctcgccatccgggcatagcatcagcacacatccggaaggtcgccgcagcctccaacctgaacggcggcatcgccgacagctacctgcacaacgatccgcaggccataggagacgcccaatgctcggtggccagctgcagcgtcaacgacctgtaccgcctcggcaatggcggcaacgcagagcggcgccccgccgccgcagtgtgcctccctgacgacgccatgtccgcgtgcccgtgcacgcccggtgccagggacggggagggggaggaggaggccgcggcggccttgcacgggctgcagctggaggcttaccggtcgacgatgcgagcgctgtacgcgtcggggccgctgacgtgggcgcaggaggcgctgctgacgaacctgcgcctgtcactcaacatctccaacgaggagcatctgctccagctcaagcgcctactgtcctcctgatcggccatccttctggccggccgagcgccgtcctgttccggcgagcctcttcctttttactgttcttgttatacatggtttattacattgtctagttcaggtagaaagaatcctatgtttataccagtgtcgagacatggatgcatacacagagacgcttgcatctttttgatgccttcggtatcctggatatatctcttgcttgtaaatgcaaacatatttacaagtttttctttgaggggccgtatttacaagttttttacactcagtttattttttttttcttatgaaaaatctaaatgactagctcactagctgagtagtttgaaggctttggtcactctattttttttgctatgctgctgcgctgtgctgttcatgacatcacttttggtcacttgcttttaatttatgagagaaatcaagaacaacacaacacaaataaattaa

SEQ ID NO: 11429 - DNA, 1141 bp, Zea Mays
ccgatgaccaccatgaccaaagagaaggtcaccaaccaattgaaaagcttgttattgtactccttgatgaaaagagcacgagacttggcaagcatctaaacacagcatcaaactggagcttagtccatggctccatgcaaatcacaacaagttttaaagagtaaaagcaaccaaacagagcacatacttgagtagaaatcgcaataccatagaagatatcaatgcacaggataactacagcacgggttccctccttccacactaaagtctaaacgtggttcttattatgttactgcttgcgcatcttttactagcttatatgtttattttgaaaattacaggtaaaaatatatcttagtgtgttatgggccttaagcccattagggttatgttagccgcggcactgttcacgcgtggttactgtagtattatgttgcttagcacgtgaacattgcggttactgtagctgtgtgaaactaggccattggcgcgtgaacagtgctgtcagatagggtttgttatgttgcttagctattaagttagggttacctctctacataaggagggacagggagttagtagggataggcaagaagaatagatctggtttactcttagggcctcctacgggagggctgagtaccatgactatcttgcgagtgcatcgcagttcacaacatagtgtcatcaggtaccaaaacaaatctatcaatctacaggggaaaatttgctaccaatatagaagtaactgaatttcatcatgtggagttgtagacagatgaaatgaaacgaaatttaagatgacagcaaccaaaaataagaataaaagtaggctggtttgtcgttggaaactaggctgcaaatgcataataacaggcaaacctttggtaactgacatgacaactgtattcagaattaacaggcaaacctttgacattctacgttcatagctttcttttgcaggtccaacgcattcctttacgaaactttggttgcagtgagtaaagcctgcattgaattttgccatcgaaggaagtttcaagacttgaaggtataagttgagttgaaggcatgtaagagatgacagagtttcaatggcgttccaaaaccaacggaaagaaagacaggagctacagcaagg

SEQ ID NO: 11430 - DNA, 2988 bp, Zea Mays
gagagatttgccgtgttttttgagctcttgcgcttggatcgcattctttctttctcttttgctcttgtgatcaacactcaattgtaaccgaggcaagaggcaccgattgtgtggtggcccttgcggggaggttttgttcccggttgattgagaagaaggaaagctcactcggtccgagggaccgtttgagagagggaagggttgaaagagacccggcctttgtggcctcctcaacggggagtaggtttgcaagaaccgaacctcggtaaaacaaatccacgtgtcactctctttatttgcttgcgatttgttttgcgtcctctcttgcggactcatttattattactaacgctaaccccggcttgtagttgtgtttatatttgtaaatttcagtttcgccctattcaccccccctctaggcgactatcaccaagatttatagattcatcattccatccctcattagtgatatcatcaattttaaagtatatgtcatagaggaagggtttaacacctacctctataattggtggaatcatagcaacacttttgacatgcactttgaatctcacaatatctttagtgtctaaagataagatatccacctcttcaacagacccaattgttgaccccaactcacaaatagcttggtaattttggagttcctcagggacattttccgccacaatccacacaaaatgaagcttggatttaggtttagcctgtgagctccaataagagactgaaatttttgccccggacattttcattttaagtccaggaaaattaatcatctcatctaacttctcctgagaaggaaactgcatcaagaacccggcgtgacacttggttgctttccaagttttgccccacgggaaatgaaaaccaaaatccttctcaagatcttctgcagaaatcaacccctcaacaactttccccaaaccgatgaagctccttttcggttttctagataaggatttcgcaaaatgggaagaataaaaccttaacccgtcagccgccataccaacaataggcatgcatggcttgttttgtttgggaaggacacaacgagcattcacatgagtttctttgcgacaaatatcgcaccacagagacttgaaacaatctctagcatgatgaccctccaccccgcatttttgacagaaagggcgacgaacattatcaatctcttttttcaaagcaggggaggggttttgagaatacctgattggccccatcgccagaaaagtcacaatgtcttccttgatgtcagatttgccaagatttggcttcaatctccaactgagatttcgattcttgttccaagattgagatccttgaggcacctctttcggtccccaccgatcccaattagggtttcgaccttttggatccatcttcaacacggacgccaagcgaggcagaggcggccactcctcttccaccagcggaggacggatcggggactcgaaccagccaccgtggaaactggagcgaaccgacgacgggagagaccagagccgagagagcgaagaggcgagatgcggaaaggaatacgatccgacgaagtcagaaggaaaccctaacgcggtacctgtagaagtcactgtatcgcgcgacgagggacaggaatccttctgggccgcgccagagaccttctcacccggagacccgcctgcctatgaaacgcgagagagggatagcacgaggagcgtgcggagcgtgggaaatcggcccaagagaactccggtccactacggcgaaggaggaagacgacaagggcgcgcccgaccgcctttttttcctacgtcccatctcccatccccggtctaatcgatttagtaaaccatggggaacttgatgttctgttgttgagttttcaaaacaaaacaccttgtgattatgaagcctttatggttgtatctttatggtgtgtcgtccattactatgcaaggtactggaagtctagttcaaaacaagctagttggtgctccaggcgggggatcaagtccacatgtagtacaaaatgccgatatccctgttaagcaaaccactagctcttcctcacgtgagcagtcagacgatgatgacatggaaggagatgctgagactactggaaatggaaaccctgttcaacacagattacagagaaggaagcaatccaaccgagaatcagccaggcgttcgagaagcagaaaggcagctcacttgaatgaactggaggcacaggtatcacagttaagagttgagaactcttcgctcctaaggcgacttgctgacgttaatcagaagttcaatgaggctgctgttgacaatagggtgcttaaggcagatgttgaaaccttaagagcaaaggtgaagatggcagaggactcagtgaagcgggtaactggcatgaacacattgttccctgccgtgtctgatatgtcgtccctcagcatgccattcaatggctccccatctgactccgcctctgatgccgccgtacccatccaagatgacctgaacagttacttcgccaatccaagcgagatcggaggcagcaacggttacatgccagatatagcttcctcggttcaagaggacgacgatttcgtcaacggggctcaggtcgccggcaagatgggcagcactgactcgctgcagcgggtggcgagcctggagcacctccagaagaggatgtgcggaggcccggcttcatcggggtcgacctcctaggttcctactccatcggatatgataaaggccctgatgcccacggcaagaatatgataaattaacagtttcacatactttgtagtggacattgctaatgctgcgatgcgcattcgttcgttgtggacttacgggtctactgctattgatttattgttcgttcttcatgtggatctcgtgtgtccatttgacgtgtactacgccacctgatgtctgctacacattgctgtggacagagcaagttcggtttccatcgaagagcacgctctgcca

SEQ ID NO: 11431 - DNA, 1086 bp, Zea Mays
caacgagctatcacattcggggatggaaatcaaggtttggtcaaatgcttgggtactggaagtctagttcaaaacaagctagttggtgctccaggcgggggatcaagtccacatgtagtacaaaatgccgatatccctgttaagcaaaccactagctcttcctcacgtgagcagtcagacgatgatgacatggaaggagatgctgagactactggaaatggaaaccctgttcaacacagattacagagaaggaagcaatccaaccgagaatcagccaggcgttcgagaagcagaaaggcagctcacttgaatgaactggaggcacaggtatcacagttaagagttgagaactcttcgctcctaaggcgacttgctgacgttaatcagaagttcaatgaggctgctgttgacaatagggtgcttaaggcagatgttgaaaccttaagagcaaaggtgaagatggcagaggactcagtgaagcgggtaactggcatgaacacattgttccctgccgtgtctgatatgtcgtccctcagcatgccattcaatggctccccatctgactccgcctctgatgccgccgtacccatccaagatgacctgaacagttacttcgccaatccaagcgagatcggaggcagcaacggttacatgccagatatagcttcctcggttcaagaggacgacgatttcgtcaacggggctcaggtcgccggcaagatgggcagcactgactcgctgcagcgggtggcgagcctggagcacctccagaagaggatgtgcggaggcccggcttcatcggggtcgacctcctaggttcctactccatcggatatgataaaggccctgatgcccacggcaagaatatgataaattaacagtttcacatactttgtagtggacattgctaatgctgcgatgcgcattcgttcgttgtggacttacgggtctactgctattgatttattgttcgttcttcatgtggatctcgtgtgtccatttgacgtgtactacgccacctgatgtctgctacacattgctgtggacagagcaagttcggtttccatcgaagagcacgctctgcca

SEQ ID NO: 11432 - DNA, 1154 bp, Zea Mays
ataacatcatccaagtcagtcaactcattgttgccatcctcattttggatagatttatccatttcagagtcagaaccagcttggagattatgctctacagattttttgacagattgaatggtactggaagtctagttcaaaacaagctagttggtgctccaggcgggggatcaagtccacatgtagtacaaaatgccgatatccctgttaagcaaaccactagctcttcctcacgtgagcagtcagacgatgatgacatggaaggagatgctgagactactggaaatggaaaccctgttcaacacagattacagagaaggaagcaatccaaccgagaatcagccaggcgttcgagaagcagaaaggcagctcacttgaatgaactggaggcacaggtatcacagttaagagttgagaactcttcgctcctaaggcgacttgctgacgttaatcagaagttcaatgaggctgctgttgacaatagggtgcttaaggcagatgttgaaaccttaagagcaaaggtgaagatggcagaggactcagtgaagcgggtaactggcatgaacacattgttccctgccgtgtctgatatgtcgtccctcagcatgccattcaatggctccccatctgactccgcctctgatgccgccgtacccatccaagatgacctgaacagttacttcgccaatccaagcgagatcggaggcagcaacggttacatgccagatatagcttcctcggttcaagaggacgacgatttcgtcaacggggctcaggtcgccggcaagatgggcagcactgactcgctgcagcgggtggcgagcctggagcacctccagaagaggatgtgcggaggcccggcttcatcggggtcgacctcctaggttcctactccatcggatatgataaaggccctgatgcccacggcaagaatatgataaattaacagtttcacatactttgtagtggacattgctaatgctgcgatgcgcattcgttcgttgtggacttacgggtctactgctattgatttattgttcgttcttcatgtggatctcgtgtgtccatttgacgtgtactacgccacctgatgtctgctacacattgctgtggacagagcaagttcggtttccatcgaagagcacgctctgcca

SEQ ID NO: 11433 - DNA, 1165 bp, Zea Mays
gtactacagtaatatgagtgggagcccaatatgcatggcttctggtgcagcacctccagatcattctccagctggttcttccttgccaagtgtggatgttccacacgcaggccctcttaaacccatcggaggtactggaagtctagttcaaaacaagctagttggtgctccaggcgggggatcaagtccacatgtagtacaaaatgccgatatccctgttaagcaaaccactagctcttcctcacgtgagcagtcagacgatgatgacatggaaggagatgctgagactactggaaatggaaaccctgttcaacacagattacagagaaggaagcaatccaaccgagaatcagccaggcgttcgagaagcagaaaggcagctcacttgaatgaactggaggcacaggtatcacagttaagagttgagaactcttcgctcctaaggcgacttgctgacgttaatcagaagttcaatgaggctgctgttgacaatagggtgcttaaggcagatgttgaaaccttaagagcaaaggtgaagatggcagaggactcagtgaagcgggtaactggcatgaacacattgttccctgccgtgtctgatatgtcgtccctcagcatgccattcaatggctccccatctgactccgcctctgatgccgccgtacccatccaagatgacctgaacagttacttcgccaatccaagcgagatcggaggcagcaacggttacatgccagatatagcttcctcggttcaagaggacgacgatttcgtcaacggggctcaggtcgccggcaagatgggcagcactgactcgctgcagcgggtggcgagcctggagcacctccagaagaggatgtgcggaggcccggcttcatcggggtcgacctcctaggttcctactccatcggatatgataaaggccctgatgcccacggcaagaatatgataaattaacagtttcacatactttgtagtggacattgctaatgctgcgatgcgcattcgttcgttgtggacttacgggtctactgctattgatttattgttcgttcttcatgtggatctcgtgtgtccatttgacgtgtactacgccacctgatgtctgctacacattgctgtggacagagcaagttcggtttccatcgaagagcacgctctgcca

SEQ ID NO: 11434 - DNA, 1579 bp, Zea Mays
atcttctcttcttcctctcttcccttccattttttctcttctcttccaccaaaccaagtgcggccagagaaatttctcccaaatttcagatcaaatcctcgaaatctccgacacctagccccccggagacttctcctcaacagtgtcgcgatccgtctcgatccggcatggagcgcgtcttctccgtggaggagatccccaacccctactgggttccgccgcaccctcaatcggcggccgccggcgctgttgctgcaccagcgggggaggcggcggggctgatgaaccggtgcccgtcggaatggtacttccagaagttcctggaggaggccgtgctcgacagcccggttcccgtagccggcgccagtaggggcagcgttggagctggagttgaggctgcggagagcaagacaccgggggccgcggcgccggcggctgcctcgagctcggttgttgaccccgtggagtacaacgcgatgctcaagcagaagctggagaaggacctcgctgccgttgccttgtggagggcttctggtgcagcacctccagatcattctccagctggttcttccttgccaagtgtggatgttccacacgcaggccctcttaaacccatcggaggtactggaagtctagttcaaaacaagctagttggtgctccaggcgggggatcaagtccacatgtagtacaaaatgccgatatccctgttaagcaaaccactagctcttcctcacgtgagcagtcagacgatgatgacatggaaggagatgctgagactactggaaatggaaaccctgttcaacacagattacagagaaggtatcacagttaagagttgagaactcttcgctcctaaggcgacttgctgacgttaatcagaagttcaatgaggctgctgttgacaatagggtgcttaaggcagatgttgaaaccttaagagcaaaggtgaagatggcagaggactcagtgaagcgggtaactggcatgaacacattgttccctgccgtgtctgatatgtcgtccctcagcatgccattcaatggctccccatctgactccgcctctgatgccgccgtacccatccaagatgacctgaacagttacttcgccaatccaagcgagatcggaggcagcaacggttacatgccagatatagcttcctcggttcaagaggacgacgatttcgtcaacggggctcaggtcgccggcaagatgggcagcactgactcgctgcagcgggtggcgagcctggagcacctccagaagaggatgtgcggaggcccggcttcatcggggtcgacctcctaggttcctactccatcggatatgataaaggccctgatgcccacggcaagaatatgataaattaacagtttcacatactttgtagtggacattgctaatgctgcgatgcgcattcgttcgttgtggacttacgggtctactgctattgatttattgttcgttcttcatgtggatctcgtgtgtccatttgacgtgtactacgccacctgatgtctgctacacattgctgtggacagagcaagttcggtttccatcgaagagcacgctctgcca

SEQ ID NO: 11435 - DNA, 861 bp, Zea Mays
atcttctcttcttcctctcttcccttccattttttctcttctcttccaccaaaccaagtgcggccagagaaatttctcccaaatttcagatcaaatcctcgaaatctccgacacctagccccccggagacttctcctcaacagtgtcgcgatccgtctcgatccggcatggagcgcgtcttctccgtggaggagatccccaacccctactgggttccgccgcaccctcaatcggcggctgcctcgagctcggttgttgaccccgtggagtacaacgcgatgctcaagcagaagctggagaaggacctcgctgccgttgccttgtggagggcttctggtgcagcacctccagatcattctccagctggttcttccttgccaagtgtggatgttccacacgcaggccctcttaaacccatcggaggtactggaagtctagttcaaaacaagctagttggtgctccaggcgggggatcaagtccacatgtagtacaaaatgccgatatccctgttaagcaaaccactagctcttcctcacgtgagcagtcagacgatgatgacatggaaggagatgctgagactactggaaatggaaaccctgttcaacacagattacagagaaggaagcaatccaaccgagaatcagccaggcgttcgagaagcagaaaggcagctcacttgaatgaactggaggcacaggtatcacagttaagagttgagaactcttcgctcctaaggcgacttgctgacgttaatcagaagttcaatgaggctgctgttgacaatagggtgcttaaggcagatgttgaaaccttaagagcaaaggattaaccgaacaaggcctaattgggtgttcttggcc

SEQ ID NO: 11436 - DNA, 252 bp, Zea Mays
caaatgcttgggtactggaagtctagttcaaaacaagctagttggtgctccaggcgggggatcaagtccacatgtagtacaaaatgccgatatccctgttaagcaaaccactagctcttcctcacgtgagcagtcagacgatgatgacatggaaggagatgctgagactactggaaatggaaaccctgttcaacacagattacagagaagcccttcacaggcagcttgaggctgggacgggttcttgaagcg

SEQ ID NO: 11437 - DNA, 1960 bp, Zea Mays
cttgaatttaaattttgtcaggtttgagcctcagttactgcccacagtcgccacagatagacctccagtaccagtcacacacgcgaacgcgacactcgcaaagtcgcaagcgggtcgcaatcaaggctgctcccctctatctccgtgttcgcccctcggttcaccacccgccgccgccgagacctcctcctcgccggctactcctgaccccataaaggcagcgctcggaggtggccctctgtcgggtggagtggtggacacatccgcgcccatggccaaccgcggcgctgcggccggcaagctcaccgtcgccgagacattctccaacctcagggagcaaggcaagagtgcattcatcccgttcatcactgctggtgatcctgacctggcaaccacatcaaaagcattgaagattctcaattcctgcggttcggatgttatagaggttggcgtaccatactcggatccactggctgatggaccagttattcaggcttctgcaacacgggcgcttaagaaaggcactacactcgattctgtcatagaaatgctgaagggggttacacctgagctttcttgccccattgttcttttcacatactataatccaattctgaaacgtggtgtgggaaacttcatgtcttttatcaaacaagctggcatacatggacttgtagtgcctgatcttcccttggaggagacagcgttgctgaggagcgaggccattatgcacaacatagagctggtgctgcttacaacgccaaccacgccaacagatcggatgaagggaattgcacaagcttcagaaggatttctctatcttgtgagcgctgtaggggttacaggtgcacgctcaaatgtaaacttacgtgtagaacaccttcttagggagatcaagaaggttagtaaactataacctgtttgtcgtcagtaaagagtgaacgagttttaatgcaccagcatggctagagaaatttgcgttcaagaatggttatgagaaaattcctggttacagacaaaccggtagctgttggtttcggtgtatcgactccagagcatgtgaaacagatcgtgggctggggagcggacggtgtgattgttggcagtgcgattgtgaggcagttgtgtgaggctgctactcctgaagagggtctggaaaggctcgaggagtacgccaggagtatgaaggctgctatgccgtgagctgatctcactccccgtcacaggcaaggtaaatagaacatggttttagcaatattctgggcatgggtttggcatccagaactcatcttagtgctgtacgggtcgttctcgggtggtgagaacgaagtctggctttgcctataatagaaaagggttaaactgagttagtgcgacattttgatggaaaagcgagtgattgcgagatatcagttcatgcttattggcagatcctttttttttttttttgctgaaagatggaaatgttagggatgaggttgccctggcctcttgagaggataggaataagagaggataagttcgttatgatttatatggctttccgcttgaaccccaccagctggtgtccatggggatgcgggcagagcagtgtctgattggctgcactgaaaatgacattaccttcagacaattcgccttgctctcttctggttctggagtactactttcgaggtccgtcagactgggtcacaagatgatcccaaacggccccagatgctgggtttttggacaacggaaagtcgattctgacctctgttaatgtcggccactcatgggtcatgaccaagccatgtttatggtcaaatcagtcccggatgctaacacgcttctctaatctctatctacggggactttttccggtgcttatcgtatcattatcatgcatgttactggtagttacatgttgtctgaacagattctttagctctgccatggcagcatgaagtgtatctggatg

SEQ ID NO: 11438 - DNA, 1740 bp, Zea Mays
tgaaagccgtccgtgccgactttattattatttattgcagccaccgtgcacacctcatcttctcttcttcctctcttcccttccattttttctcttctcttccaccaaaccaagtgcggccagagaaatttctcccaaatttcagatcaaatcctcgaaatctccgacacctagcccaccggagacttctccccaacagtgtcgcgatccgtctcgatccggcatggagcgcgtcttctccgtggaggagatccccaacccctactgggttccgccgcaccctcaatcggcggccgccggcgctgttgctgcaccagcgggggaggcggcggggctgatgaaccggtgcccgtcggaatggtacttccagaagttcctggaggaggccgtgctcgacagcccggttcccgtagccggcgtcagtaggggcagcgttggagctggagttgaggctgcggagaggaagacaccggggaccgcggcggcggcggctgcctcgagctcggttgttgaccccgtggagtacaacgcgatgctcaagcagaagctggagaaggacctcgctgccgttgccttgtggagggcttctggtgcagcacctccagataattctccagctggttcatccttgccaagtgtggatgttccacatgcaggccctcttaaacccatgggagtatggtctggattggatattgggcacgtatcaggtactggaagtctagttcaaaacaagctagctggtgctccaggcgggggatcaagtccacatgtagtacaaaatgccgatattcctgttaagcaaaccactagctcttcctcacgtgagcagtcagacgatgatgatatggaaggagatgctgagactactggaaacggaaaccctgttcaacaaagattacagagaaggaagcaatccaaccgagaatcagccaggcgttcgagaagcagaaaggcagctcacttgaatgaactggaggcacaggtagcacagttaagagttgagaactcttcgctgctaaggcgacttgctgacgttaatcagaagttcaatgaggctgctgttgacaatagggtgctaaaggcagatgtcgaaaccttaagagcaaaggtgaagatggcagaggactcagtgaagcgggtaactggcatgaacacattgttccctgccgtgtctgatatgtcgtccctcagcatgccattcaatggctccccatccgactccgcctctgatgccgccgtacccatccaagatgacctgaacagttacttcgccaatccaagcgagatcggaggcagcaacggttacatgccagatatagcttcctcggctcaagaggacgacgatttcgtcaacggggctcaggtcgccggcaagatgggcagcactgactcgctgcagcgggtggcgagcctggagcacctccagaagaggatgtgcggaggcccggcttcatcggggtcgacctcctaggttcctactccatcggatatgataaaggccctgatgcagtgatgcccacggcaaagaatatgataaattaacagtttcacatactttgtagtggacattgctaatgctgcgatgcgcattcgttcgttgtggacttacgggtctactgctattgatttattgttcgttctccatgtggatctctggtgtccatgtgacgtgtactatgccaactgctgtctgctacacattgcagtggacacagcaagttcggtttccatcgaaga

SEQ ID NO: 11439 - DNA, 2293 bp, Zea Mays
ccaaaaaaatcaacacacgtgcatatggaatgtaattcttgaattaaaattttgtcaggtttgagcctcagttactgcccacagtcgccacagatagacctccagtaccagtcacacacgtgacactcgcaatcgcaaagtcgcaagcggatcgcaaactcgcaatcaaggctgctcccctccgtctccgtgttcgccactcggttcaccgcccgccgccgccgagacctcctcctcgccggctactcctgaccccacaaaggcagcgctcggaggtggccctctgtcgggtggagtggtggacacatccgcgcccatggccaacggcggcgctgcggccggcaagctcaccgtcgccgagaccttctccaacctcagggagcaaggcaagagtgcattcatcccgttcataactgctggtgatcctgacctggtaaccacatcgaaagcattgaagattctcaattcctgcggttcggatgttatagaggttggcgtaccatactcggatccactggctgatgggccagttattcaggcttctgcaacacgggcgcttaagaaaggcactacacttgattctgtcatagagatgctgaagggggttacacctgagctttcttgccccattgttcttttcacatactataatccaattctgaaacgtggtgtgggaaacttcatgtctactatcaaacaagctggcatacatggacttgtagtgcctgatcttcctttggaggagacagcgttgctgaggagcgaggccattatgcacaacatagagctggtgctgcttacaacgccaaccacgccgacagatcggatgaagggaattgcacaagcttcagaaggatttctctatcttgtgagcgctgtaggggttacaggtgcacgctcaaatgtaaacttacgtgtagaacaccttcttagggagatcaagaaggttacagacaaaccggtagctgttggtttcggtgtatcgactccagagcatgtgaaacagatcgtgggctggggagcggacggtgtgattgttggcagtgcgattgtgaagcagttgtgtgaggctgctactcctgaagagggtctggaaaggctcgaggagtacgccaggagtatgaaggctgctatgccgtgagctgatctcactccccgtcacaggcaaggcttctggtgcagcacctccagataattctccagctggttcatccttgccaagtgtggatgttccacatgcaggccctcttaaacccatgggaggtactggaagtctagttcaaaacaagctagctggtgctccaggcgggggatcaagtccacatgtagtacaaaatgccgatattcctgttaagcaaaccactagctcttcctcacgtgagcagtcagacgatgatgatatggaaggagatgctgagactactggaaacggaaaccctgttcaacaaagattacagagaaggaagcaatccaaccgagaatcagccaggcgttcgagaagcagaaaggcagctcacttgaatgaactggaggcacaggtagcacagttaagagttgagaactcttcgctgctaaggcgacttgctgacgttaatcagaagttcaatgaggctgctgttgacaatagggtgctaaaggcagatgtcgaaaccttaagagcaaaggtgaagatggcagaggactcagtgaagcgggtaactggcatgaacacattgttccctgccgtgtctgatatgtcgtccctcagcatgccattcaatggctccccatccgactccgcctctgatgccgccgtacccatccaagatgacctgaacagttacttcgccaatccaagcgagatcggaggcagcaacggttacatgccagatatagcttcctcggctcaagaggacgacgatttcgtcaacggggctcaggtcgccggcaagatgggcagcactgactcgctgcagcgggtggcgagcctggagcacctccagaagaggatgtgcggaggcccggcttcatcggggtcgacctcctaggttcctactccatcggatatgataaaggccctgatgcagtgatgcccacggcaaagaatatgataaattaacagtttcacatactttgtagtggacattgctaatgctgcgatgcgcattcgttcgttgtggacttacgggtctactgctattgatttattgttcgttctccatgtggatctctggtgtccatgtgacgtgtactatgccaactgctgtctgctacacattgcagtggacacagcaagttcggtttccatcgaaga

SEQ ID NO: 11440 - DNA, 3880 bp, Zea Mays
gtcggttaaatttgttgtcaaaaaacttaaacgacaatcttagggagtaccaaaaaaatcaacacacgtgcatatggaatgtaattcttgaattaaaattttgtcaggtttgagcctcagttactgcccacagtcgccacagatagacctccagtaccagtcacacacgtgacactcgcaatcgcaaagtcgcaagcggatcgcaaactcgcaatcaaggctgctcccctccgtctccgtgttcgccactcggttcaccgcccgccgccgccgagacctcctcctcgccggctactcctgaccccacaaaggcagcgctcggaggtggccctctgtcgggtggagtggtggacacatccgcgcccatggccaacggcggcgctgcggccggcaagctcaccgtcgccgagaccttctccaacctcagggagcaaggcaagggttggattgctggcgccgtggtggccgatacccaatgttggtcccggttggttgcagggaatacctaattttggtcccatttagttgcaaggaaatggattagggctttggaacaatctgtgtattccttgcatgaattgtccaaatctagtggttttatgtcgagtacacatcgtgctggtttaatttccgtaaaaatctagcctgatcttgcacaatagtggctgctggcttgatgtgcacattgatccgtctttgtctttaaaagcagtgtttatattttaggtgccacagtgttcattctcaacaaaggtaactgcattaagaaatttgtatccagagtagcgataacatgctaagcagagaccaatctttagttgcagggatcttgcattgtactccattccaaattctgtgttattttgtcttttctagatgcataccttattagcttttgttatgcactttgatatatggtatgtctagatatatagcaaaaactatgtacctaataaagcaaaaacgacttacaatttgcaattgaaagagtatggtgcagatctgccttaaatcgtatccagcagttcactcatatggttacccaaaatactgttttacactgttcgcagagtgaagttttaatatgggtgtgagcatgggtaaaagtcttagttggcaaatagtcttttggtgtaaggatttagaaaatactccagtgaacacgtgggaaaatcacttgtcagagagggagggtggagccacaaaccaaggagccgcacagatgccgacatcaatacacttatgttgtggagaggagccgcatctcgtaatgtctgattttgtttagatgccacacagtagtatcccagccatgggcgcatggatgggggatttggacccagggtcaatggaatttaattcccagatttagggggtgtatggtacggatccaggttccagctttaatttaaaggtgtagtttataatagaaatttaaatagttttaaaaatatttttaatctaaataataaataaaatgacttatctaaatgacttacgggggttcacaacttcaaaactatacgattttatggaacacctaatggcctgctctatcaattccactaagaccccgtttggttccaattagtcctaggactaaagtttagttctaggactaaactttagtcccttcctgtttaattctagggactaaacaaattctaaagtaattaaatatagtgtccaaagactcaaatacccctggaatctatagcaacatggacgtgggataagggcaatggaggaaaaaaatatggtttagtcccctttagccaccacttgagggactagggactaaactgatttagtctctcctttagtccttatgtatggcaaattagagactaaaagagactaaaacgaagagactaaaaattatcccttgcaaccaaacaccccctaaattttctggagctggatcaatcccagacagcaccttaatttaagttgacagtctaacctgggaaattttcagagtgcattcatcccgttcataactgctggtgatcctgacctggtaaccacatcgaaagcattgaagattctcaattcctgcggttcggatgttatagaggttggcgtaccatactcggatccactggctgatgggccagttattcaggcttctgcaacacgggcgcttaagaaaggcactacacttgattctgtcatagagatgctgaagggggttacacctgagctttcttgccccattgttcttttcacatactataatccaattctgaaacgtggtgtgggaaacttcatgtctactatcaaacaagctggcatacatggacttgtagtgcctgatcttcctttggaggagacagcgttgctgaggagcgaggccattatgcacaacatagagctggtgctgcttacaacgccaaccacgccgacagatcggatgaagggaattgcacaagcttcagaaggatttctctatcttgtgagcgctgtaggggttacaggtgcacgctcaaatgtaaacttacgtgtagaacaccttcttagggagatcaagaaggttacagacaaaccggtagctgttggtttcggtgtatcgactccagagcatgtgaaacagatcgtgggctggggagcggacggtgtgattgttggcagtgcgattgtgaagcagttgtgtgaggctgctactcctgaagagggtctggaaaggctcgaggagtacgccaggagtatgaaggctgctatgccgtgagctgatctcactccccgtcacaggcaaggcttctggtgcagcacctccagataattctccagctggttcatccttgccaagtgtggatgttccacatgcaggccctcttaaacccatgggaggtactggaagtctagttcaaaacaagctagctggtgctccaggcgggggatcaagtccacatgtagtacaaaatgccgatattcctgttaagcaaaccactagctcttcctcacgtgagcagtcagacgatgatgatatggaaggagatgctgagactactggaaacggaaaccctgttcaacaaagattacagagaaggaagcaatccaaccgagaatcagccaggcgttcgagaagcagaaaggcagctcacttgaatgaactggaggcacaggtagcacagttaagagttgagaactcttcgctgctaaggcgacttgctgacgttaatcagaagttcaatgaggctgctgttgacaatagggtgctaaaggcagatgtcgaaaccttaagagcaaaggtgaagatggcagaggactcagtgaagcgggtaactggcatgaacacattgttccctgccgtgtctgatatgtcgtccctcagcatgccattcaatggctccccatccgactccgcctctgatgccgccgtacccatccaagatgacctgaacagttacttcgccaatccaagcgagatcggaggcagcaacggttacatgccagatatagcttcctcggctcaagaggacgacgatttcgtcaacggggctcaggtcgccggcaagatgggcagcactgactcgctgcagcgggtggcgagcctggagcacctccagaagaggatgtgcggaggcccggcttcatcggggtcgacctcctaggttcctactccatcggatatgataaaggccctgatgcagtgatgcccacggcaaagaatatgataaattaacagtttcacatactttgtagtggacattgctaatgctgcgatgcgcattcgttcgttgtggacttacgggtctactgctattgatttattgttcgttctccatgtggatctctggtgtccatgtgacgtgtactatgccaactgctgtctgctacacattgcagtggacacagcaagttcggtttccatcgaaga

SEQ ID NO: 11441 - DNA, 3577 bp, Zea Mays
gtcggttaaatttgttgtcaaaaaacttaaacgacaatcttagggagtaccaaaaaaatcaacacacgtgcatatggaatgtaattcttgaattaaaattttgtcaggtttgagcctcagttactgcccacagtcgccacagatagacctccagtaccagtcacacacgtgacactcgcaatcgcaaagtcgcaagcggatcgcaaactcgcaatcaaggctgctcccctccgtctccgtgttcgccactcggttcaccgcccgccgccgccgagacctcctcctcgccggctactcctgaccccacaaaggcagcgctcggaggtggccctctgtcgggtggagtggtggacacatccgcgcccatggccaacggcggcgctgcggccggcaagctcaccgtcgccgagaccttctccaacctcagggagcaaggcaagggttggattgctggcgccgtggtggccgatacccaatgttggtcccggttggttgcagggaatacctaattttggtcccatttagttgcaaggaaatggattagggctttggaacaatctgtgtattccttgcatgaattgtccaaatctagtggttttatgtcgagtacacatcgtgctggtttaatttccgtaaaaatctagcctgatcttgcacaatagtggctgctggcttgatgtgcacattgatccgtctttgtctttaaaagcagtgtttatattttaggtgccacagtgttcattctcaacaaaggtaactgcattaagaaatttgtatccagagtagcgataacatgctaagcagagaccaatctttagttgcagggatcttgcattgtactccattccaaattctgtgttattttgtcttttctagatgcataccttattagcttttgttatgcactttgatatatggtatgtctagatatatagcaaaaactatgtacctaataaagcaaaaacgacttacaatttgcaattgaaagagtatggtgcagatctgccttaaatcgtatccagcagttcactcatatggttacccaaaatactgttttacactgttcgcagagtgaagttttaatatgggtgtgagcatgggtaaaagtcttagttggcaaatagtcttttggtgtaaggatttagaaaatactccagtgaacacgtgggaaaatcacttgtcagagagggagggtggagccacaaaccaaggagccgcacagatgccgacatcaatacacttatgttgtggagaggagccgcatctcgtaatgtctgattttgtttagatgccacacagtagtatcccagccatgggcgcatggatgggggatttggacccagggtcaatggaatttaattcccagatttagggggtgtatggtacggatccaggttccagctttaatttaaaggtgtagtttataatagaaatttaaatagttttaaaaatatttttaatctaaataataaataaaatgacttatctaaatgacttacgggggttcacaacttcaaaactatacgattttatggaacacctaatggcctgctctatcaattccactaagaccccgtttggttccaattagtcctaggactaaagtttagttctaggactaaactttagtcccttcctgtttaattctagggactaaacaaattctaaagtaattaaatatagtgtccaaagactcaaatacccctggaatctatagcaacatggacgtgggataagggcaatggaggaaaaaaatatggtttagtcccctttagccaccacttgagggactagggactaaactgatttagtctctcctttagtccttatgtatggcaaattagagactaaaagagactaaaacgaagagactaaaaattatcccttgcaaccaaacaccccctaaattttctggagctggatcaatcccagacagcaccttaatttaagttgacagtctaacctgggaaattttcagagtgcattcatcccgttcataactgctggtgatcctgacctggtaaccacatcgaaagcattgaagattctcaattcctgcggttcggatgttatagaggttggcgtaccatactcggatccactggctgatgggccagttattcaggcttctgcaacacgggcgcttaagaaaggcactacacttgattctgtcatagagatgctgaagggggttacacctgagctttcttgccccattgttcttttcacatactataatccaattctgaaacgtggtgtgggaaacttcatgtctactatcaaacaagctggcatacatggacttgtagtgcctgatcttcctttggaggagacagcgttgctgaggagcgaggccattatgcacaacatagagctggtgctgcttacaacgccaaccacgccgacagatcggatgaagggaattgcacaagcttcagaaggatttctctatcttgtgagcgctgtaggggttacaggtgcacgctcaaatgtaaacttacgtgtagaacaccttcttagggagatcaagaaggttacagacaaaccggtagctgttggtttcggtgtatcgactccagagcatgtgaaacagatcgtgggctggggagcggacggtgtgattgttggcagtgcgattgtgaagcagttgtgtgaggctgctactcctgaagagggtctggaaaggctcgaggagtacgccaggagtatgaaggctgctatgccgtgagctgatctcactccccgtcacaggcaaggtaattagaacatggttttagcaatattctgggcatggggttggcatccataactcatctagtgctgtacgggtcgttctccggtggtgagaacgaagtctggctttgcctataatagaaaagggttataaactgagttagtgcgacattttgatgaaaaagtgagcgattgcgagatatcagttcatgcttattggcagatcctttttttggctgaaagattgaaatgttagggatgaggttgccctggcctcttgagaggataggaataagagaggataagttcgttatgatttatatggcttttcgcttgaaccccaccagctggtgtccatggatgcgggcagagcagtgtctgattggctgcactgaaaatgacattaccttcagacaattcgccttgctctcttctggttctggagtactactttcgaggtccgtcagactgggtcacaagatgatcccaaacggccccagatgctggatttttggacaacggaaagtcgattctgacctctgttaatgtcggcactcatgggtcatgaccaagccatgtttatggtcaaatcagtcccggatgctaacacgcttctctaatctctacctacggagacgactttttccggtgcttatcgtatcattatcatgcatgttactggtagtaacatgttgtctgaacagattctttagctctgtcatggcagcatgaagtgtatctggatgcgaagaagcagtgttggtattgaactgtccatgtacgagttgtttgttgctgtgctttggcggggtgaacagctaggattggataggctctagtgcca

SEQ ID NO: 11442 - DNA, 3360 bp, Zea Mays
gtcggttaaatttgttgtcaaaaaacttaaacgacaatcttagggagtaccaaaaaaatcaacacacgtgcatatggaatgtaattcttgaattaaaattttgtcaggtttgagcctcagttactgcccacagtcgccacagatagacctccagtaccagtcacacacgtgacactcgcaatcgcaaagtcgcaagcggatcgcaaactcgcaatcaaggctgctcccctccgtctccgtgttcgccactcggttcaccgcccgccgccgccgagacctcctcctcgccggctactcctgaccccacaaaggcagcgctcggaggtggccctctgtcgggtggagtggtggacacatccgcgcccatggccaacggcggcgctgcggccggcaagctcaccgtcgccgagaccttctccaacctcagggagcaaggcaaggtgcgtgcgtttgagacctcacgttcgtgcttcgcttcgtcgcaacccttgcggggcaattcaccccagcacccacatttctcttgctgttcctgattgagtcgcagggttggattgctggcgccgtggtggccgatacccaatgttggtcccggttggttgcagggaatacctaattttggtcccatttagttgcaaggaaatggattagggctttggaacaatctgtgtattccttgcatgaattgtccaaatctagtggttttatgtcgagtacacatcgtgctggtttaatttccgtaaaaatctagcctgatcttgcacaatagtggctgctggcttgatgtgcacattgatccgtctttgtctttaaaagcagtgtttatattttaggtgccacagtgttcattctcaacaaaggtaactgcattaagaaatttgtatccagagtagcgataacatgctaagcagagaccaatctttagttgcagggatcttgcattgtactccattccaaattctgtgttattttgtcttttctagatgcataccttattagcttttgttatgcactttgatatatggtatgtctagatatatagcaaaaactatgtacctaataaagcaaaaacgacttacaatttgcaattgaaagagtatggtgcagatctgccttaaatcgtatccagcagttcactcatatggttacccaaaatactgttttacactgttcgcagagtgaagttttaatatgggtgtgagcatgggtaaaagtcttagttggcaaatagtcttttggtgtaaggatttagaaaatactccagtgaacacgtgggaaaatcacttgtcagagagggagggtggagccacaaaccaaggagccgcacagatgccgacatcaatacacttatgttgtggagaggagccgcatctcgtaatgtctgattttgtttagatgccacacagtagtatcccagccatgggcgcatggatgggggatttggacccagggtcaatggaatttaattcccagatttagggggtgtatggtacggatccaggttccagctttaatttaaaggtgtagtttataatagaaatttaaatagttttaaaaatatttttaatctaaataataaataaaatgacttatctaaatgacttacgggggttcacaacttcaaaactatacgattttatggaacacctaatggcctgctctatcaattccactaagaccccgtttggttccaattagtcctaggactaaagtttagttctaggactaaactttagtcccttcctgtttaattctagggactaaacaaattctaaagtaattaaatatagtgtccaaagactcaaatacccctggaatctatagcaacatggacgtgggataagggcaatggaggaaaaaaatatggtttagtcccctttagccaccacttgagggactagggactaaactgatttagtctctcctttagtccttatgtatggcaaattagagactaaaagagactaaaacgaagagactaaaaattatcccttgcaaccaaacaccccctaaattttctggagctggatcaatcccagacagcaccttaatttaagttgacagtctaacctgggaaattttcagagtgcattcatcccgttcataactgctggtgatcctgacctggtaaccacatcgaaagcattgaagattctcaattcctgcggttcggatgttatagaggttggcgtaccatactcggatccactggctgatgggccagttattcaggcttctgcaacacgggcgcttaagaaaggcactacacttgattctgtcatagagatgctgaagggggttacacctgagctttcttgccccattgttcttttcacatactataatccaattctgaaacgtggtgtgggaaacttcatgtctactatcaaacaagctggcatacatggacttgtagtgcctgatcttcctttggaggagacagcgttgctgaggagcgaggccattatgcacaacatagagctggtgctgcttacaacgccaaccacgccgacagatcggatgaagggaattgcacaagcttcagaaggatttctctatcttgtgagcgctgtaggggttacaggtgcacgctcaaatgtaaacttacgtgtagaacaccttcttagggagatcaagaaggttacagacaaaccggtagctgttggtttcggtgtatcgactccagagcatgtgaaacagatcgtgggctggggagcggacggtgtgattgttggcagtgcgattgtgaagcagttgtgtgaggctgctactcctgaagagggtctggaaaggctcgaggagtacgccaggagtatgaaggctgctatgccgtgagctgatctcactccccgtcacaggcaagctggtgtccatggatgcgggcagagcagtgtctgattggctgcactgaaaatgacattaccttcagacaattcgccttgctctcttctggttctggagtactactttcgaggtccgtcagactgggtcacaagatgatcccaaacggccccagatgctggatttttggacaacggaaagtcgattctgacctctgttaatgtcggcactcatgggtcatgaccaagccatgtttatggtcaaatcagtcccggatgctaacacgcttctctaatctctacctacggagacgactttttccggtgcttatcgtatcattatcatgcatgttactggtagtaacatgttgtctgaacagattctttagctctgtcatggcagcatgaagtgtatctggatgcgaagaagcagtgttggtattgaactgtccatgtacgagttgtttgttgctgtgctttggcggggtgaacagctaggattggataggctctagtgcca

SEQ ID NO: 11443 - DNA, 1099 bp, Zea Mays
cgctgctgctatatataatctgtggcacggtgggcatggcaccagcatctcatatcctactgccggcgttccagagttcgagctgagcagttgcacacagctgctcgtgaagctagctagcgaagccacaggcccacagtgactttgctcccccacaccgtagcggccgtataaaccagctccaaccgatccatcgaaatcgaagcacagtacgtgagcccgaagccggcgtgcacggcctcatagttcccgacctcccgtatgggaactcgtgtgctctcactctcaggaccgaagccatcaagaacagcctcgagctggtgctgctcacaacaccatctacgccagcggacaggatgggggagataacacgagcttcacgaggattcgtctatctcgcgaccgtcaatggagttacaggtccacgcgcaaacgtgaacacacgtgtccagtctctcattcaggaggttaaacaggtcactgacatacccgtggctgtcgggtttggcatatcgaaacctgagcatgtaaagcaggtaggcaaaacttttttaaaaaaaatgcctcaaaaacttattcacatatttttttatagtaacaaattctaacagtatatatattgcacctggacagattgcagagtggggtgcagatggtgtgatcattggtagcgcaatggtgagacagttaggcgaagcagcctctcccaaggaaggattgaagaggctagagaaatacgccaggagcatgaagaacgcgctaccatgccagtgaactagtcgtattgacgcgatataggctgtgttagcaagcacgttggagaacaatgttgcagaagtagcacaattaataatgatccattcggcaaggttgcttttttacaaattgcaacaataagttatcaatataaaatcaacgattcctttgtttaaaaaaaaggaagaaatgttacatcattgcatggtgctgcgattcagtggttactccattcattttaaattacagttcagctcgagtttgtcctgactcagcctttttaaagattgtcagtttgtaacaacaacaacaataataataataagtggctagctcattacat

SEQ ID NO: 11444 - DNA, 1462 bp, Zea Mays
ctcacacacgtacttccgccagcgcagctagctatagctgttcgcctgttctcttctcgcgcgccatcatctctcgtctgtgatcaacgtcggcgcgcggccagcatggagatgatcgacgcggagctgcgtcttggcccgcccgggagcaacaacagcgacgtcgtcgtcaccgtcgtgccgcctgcagcggcgaggaaaccggcggcgccggcgccggcgtcggcggcgaaacggccgtcctcgtcggtggtgaagagcgacgacgcgtccgggacgggcgaccatgacgacgacgccgcaccggcctccaaagcagcacgcgacacaccgcgtacacagctactataccgcgcgcggagcgaccagctgatgatcgggctggtgctcgtgaacgaacgccgcagggtgcgggcggtggggtggccgccggtgagagcgtaccggaagaacgcgttccacgcggcggcggaggcggcgaggaggaccaataataagggcgaggagctgcagggaggaggcggccgcctgtacgtgaaggtgagcatggacggggcgccctacctccgcaaggtcgacctgcggacctacggcggctaccgggagctgagggacgcgctggacgcgctcttcggctgcttctcctcctcctccgcctcctcctcctcggccgacggcggctgccagttcgccgtcgcctacgaggacaaggacggcgacctcatgctcgccggcgacgtgccctgggagatgttcatctgctcctgcaagaagctgaggatcatgagggggtccgaagcaagataaccaacgcaacaacgaggatgcaaaggacatgttggatgcatggcatgcatggaggtccagctagctatggtccgtccaactcatgcatgggacagagggagagagagagacagaaaaaaaaagggaggtctttatatctgtcattcactggaattggaggcgcggcgtagggtatatacctgcacaggggtcggaggccccatgcatgcatgcgcgcgtcgtcgtgttctacggccagcccagccggctcataccatacacaccatggacatgcacatgatcagatggagtggagcatggaggtgatggttcaaggatcacggcggcgtagtacacgtcacgccgtgtctcccgccaccagtcaggcggacgtgctgtggacggctgactggacgtgcatgcatgtcagatcggagattattcagccaagtagcatcggtgaaaagctactatctagaattttttttgtactgtgcacgctagctcatatgctgtagcttatgcttgctagcctatctgtaactttgagctcctcttttgtaagtgacctgggcccatgtatattagttcattctaggggtgcagccgcacccacgtaaaaaaataagaaacaatgtgggattagaaccaaatataattgccaccgctttattat

SEQ ID NO: 11445 - DNA, 2111 bp, Zea Mays
gcaccttatagctcaaaagagtgcattagaggcacaacatggagttggtattcacacaataccagactagagtaatcgtgtgaacattaactaaacaaaatatcatatttgcacataggttagtcattaaaccatatagcataactcataaagagatacaggtttattcacgagcacaaaaagagagttaatcattgtggatatctctaatgaaaaaatacccattaagagacatcacctctaatgcacacaatcatgattaagcaagcatggttacgatcttagaaatcattaatcattgattgaaaggtactcaacacaggcaatcaaaagcataactactccaaggataggtaaacacaataatccaccttaaaagcaatacttatttgcaagaatgtactcaagatactagggtaccatcctttggagagcaagttgaagaatctcatcaaggtcctttgtttgattcaccaataatgattaaggacctattcaccttatttcacttgagatgaacgtgggattagtgtctcacaataattcaaccttgggacaataaataaacaccaaaacaactaatagcttaagcatagagtttgagataaccgtcttaagctctcccatggtctccagtccatctcaaggcacctgcatggtctagttagcacagtttggtacccacgtcgggatgggtccatgacgttcaaccaaaagtgcctttggtacccaaatagcatttgtgctagtcctaggtgatctcatgattgatctagcacatgggtatgatttgggtctcctaagcgtatgagattgagacaaatttacttgcttaggaacctcacctttattacatacctttgatagatgaccctgctcaccacacttgtagcagaaacgtcgctcaccctgacatgacgcttgctgtttgtcatttttcttggtgagagtcatcttggagactgcacatgcttgattcgtcaatagaggacaagaagtgattgtgtggttcttgtcattgcatccgaagcatctccttatcccttctcccttgttggtgtatggacacgatgcaatgaggtgtcctgacttgttgcacttaaagcacccccttttcccttttctctttttgttctttgatgacacagagaaatggttagtgcaagcaacatgattaattgaatctttacctttttctaagctcatgttgatttcttcatctttaggaacattcttcttatggagcttaacacttgcttcagtttttcctttctcaagcttcttcaccacgcgcccgtggatatcttgagagagttgagcaatgtgtcttccccttagttgtctttgcttcttgttcctacacaatttcttttgtgaccctgcaactttttgctcatttaaacactcgcttccttttgagtgacaggggttagcacatggtgatagattatccaaatgtgtacttgtgcaagaatgaagttcacatgaatttaaattcgtaattacgacctcatgagcaacttcaagcatgatgtgtctatccaagagattatcatgataacaagacaataagtcatatttttcagtcagagcaaggttatcatgacttaacaattctacttgactcctaagcatagaattttcaattttaagttgagcagcattagataatacatcatgattatttctttgctcaattaaaatcgattcataccgttggaccaaattcccatgagagtactttacctcctcatgttctttggtcatcttctccaggctgtcgttggttttgatgagagtctcctctagcctgagaagcatctcgccttgttccttgttccttctcaacagcttaatcaagagcactttgtcttctttgttgagatgggtgtagaaacggcgaatctcctcttcttccacatcgtcggtctcattttccctgtcattaatatcaggggaagcaaaacaggaaaatgtaccttgtgatgatgtagactcctcatcctcatattcctcctcatcatcgctcttatctccaccatcattgttagcaataagacatttattactagtgggagacaaacctgttgatgaggtggattcatcgtttg

SEQ ID NO: 11446 - DNA, 2305 bp, Zea Mays
cacccctgttgatgatcgaagcggagagcccctccctcccgtcatgactcctgatgagtcgtggtccagtcctctcggccgccgccgccggccgagaccccagacggtggtaaggcaacttcgttttgctgccgccgtaccatcaagagtgcgacaccgacatagatcctctcctacgtgcgcctgaggctcgccgcgccgcagtccgcagccgtcctcttgcagatacagagcctacggcgtcgagaaccaccggagcccatgtttgctcgttcatgtgattctggtgtgatcagtttggtgtatgtatgtgaaggctcgtttaattccagagctcatgggctaagaaatctctcttccgtaaacaaatacaatacaaccaggagtatactgcaccatcagcaatatcttcagccgtgaggtctaagatgtgttgttatgtgtgtatgtgtgccaagcttgagattaaagggcagtgtattacctctttccatggaatacaagaagtcgttaagcattagtgacagtaaatatggccattaaccagcaataagtaacaaaacattaagcttcattaacttgttgtgttgaagggaacaacaagtcttgtctatgactctactatatagcagcagtacggcatcctgtacagttctcctttccaagacatgcaggcagatgacaaactcgctactcaaatctctctccctccatcttgcatagcttctgagatcgccatggatttcagctgctttcagccccacacggggatctgtagctacctgccattcgattcgtacatgcagcatgatggacagtatgagctccatctccatcctgctgatcaccatccgcttgaagttactggagactacacttctgcgacgttcgacgaccttggacacgagttctttgcagaaagagaaatcgagaagcccatattcaaccgtacttcatcgattggtcgtagagttgggtctcaactacctctgccgactatcaaaactgaggtttctcatctcatagacagtggcctcgtatcatgtaaggcgtatgagataaatgacaggtttctggcaagaaagaagacctctttgaagaaagccaatgtcgtgaaagggcagtggacaccagaggaagataggaagctggtaaaattagtggaacagtttggactgaggaagtggtcgtacatagcacaactgctgccagcaagagtgggaaagcaatgcagagaaagatggcacaaccatttgaggccaaacatcaagaaagacatttggagtgacgaggaagacatggttctgatagaagcccacaaggaggtgggcaacaaatgggcagagatagccaagcggctacccggcaggaccgagaactccataaagaaccactggaacgcaacgaagcggaggcagttcgcgcggaggcggagccgcaccagctccaaggcgcccaagccaggcacccttctgcagagctacatcgaaggcctcggcattgttggcccgagcgacaagagtgctgcgccactttctgaacctacactgtcgcctgaagctcccggagcaaagtcggcaaagaccggtggaacaacgctaccggaagaacacagcccgccgtccaacatgctggattcccaaggcgttcttcttcccagcgaagagcttcttgccccaatctgcgacgaacttctagatggaatgtgtggcggtcttttcgactgcacgaacgaggacgccttcttccgtgtgtgcgctgtggacgatgacatcgacgtgagctacatcttcgaccatgcgatcaaggtcgatcctgagatagacatggagatgatgatgatgtgggatgacgacgccctcgcgtgtactgctggacctgctgctggaacagctcatgtcgagaccgtgcatgtgaaggaggagatggacctgatggagatggtggcagccacgcagaactgtggcgaagcagaaaatcactagagaagcaattatatagatgtgatcgcacgacctacagatgtaaccacatgcagtactatagggtatccatatagaacagcacgaccttttggatcgatgtgtccttcctgtcctggtgagtggtctccacaatcagtaacaaaaaaataaagcttcaaatgaagcatacttggttcacatgtgtgtatatattactgtatttgcagatcttatgatatacacgcggagtgtatatagtaggagtgttgttgttattatccattctaacgtgcttaactgtatgttgtacgagtgctgttattaactacacctattaaatc

SEQ ID NO: 11447 - DNA, 85 bp, Zea Mays
aatacgctagcagccacgacagcttcaggtcttggatagtccccgagctccttttcaacaccttcagctttagcctctgataaga

SEQ ID NO: 11448 - DNA, 691 bp, Zea Mays
tgcagacctggagatggcacatcacattgattcgtgaaatgaaattgttgtcacaaagcgatagttccatcaaagtgtatttcttgtagtacacaggactgaaaccacagaagacaaatgccgcatcgtgcatctgtgcagacaagagatgaatgctacactgcaaatctgcgcagattggagacgaatgatacaatgacagcgccgacataactcaaactaatctattcacatacgttgtactgtcacctacaaacggcagctgtggacgacaacaaattcaattttcgcagaaatttcactggagaacccgtgttacaaacgacgcctgaaaaaccgctgtgctccagcattagtgttttcacccttcagaaaccgctggtgccgttgcttcagaaaactctccatggatttaactgccgttggggattcttcagtatgtgccaggggggcatccagttcattcccttttctgctactggaactggactatggtactatttagcctatatttatgctaacttactttgctcaatgttctggtaacttgtgatcaaagcattttctcagggctgcccttatctccttcagcatctcgtcgatcccgatatgcctcctgcagaaccaaggcaacagggttaaacaaactggatcgacattataacaggacaagagataagcagacgtcaag

SEQ ID NO: 11449 - DNA, 1489 bp, Zea Mays
gtaaatatcaattgggcaactttacaccccttggtcataaagtggcatagttgccctgggaaagtttgatgctctccacattggtcatcgggaattggcaatgcatgcttctaaagcagggactccttttcttctttcttttgtgggaatggccgaagtacttggctggacatataggcctcctatagttgctcattgtgatcgcaagcgggtcctttcatcttgggctccatactgtaggaatgtggtaccacttgaatatcaagttgaattttcaaaggtcaggtccctgtctccacgacaatttgttgaaaggctatcaaaggatcttagaataaaaggtgtcgtggcaggtgaaaattacaggtttggttacaaagcatctggtgacgcaactgagttagtgaaactatgtgaggaatttggtttaagtgcattcattgtacgctctgtcatggacacagcaaaaagatctcttaatggattttcaggcgctataaattcgagtgataaaggacaggtttcttccagccgtgtccgccatgcattggctatgggtgacatggaatacgtctctgaattactagggaggaaacaccgtcttttgctaatggttaaccaacactgccttcatgaaaagaaaagcattgtactccctaattcttgcatgctgaacatgccaccagctgaaggtctctatgaaaactgcgaccttgttaatggagggtatcttggaccatgtagagtgatcatcaactctgatactatcatcattgagatgaaagatgataacagtttatccctaaatcctattcaagaagttcagttagggattgagtttggatgaagttatatactttttgcatctgccatcttgtggagattattgctgaaagaagacattggggggaatactgcaaggggaagtcgaagactttgttcaagcgtgcagtacgcctcatcgtgattgagttcaggagcattttgtagtctcacaagaatgctttattacagaaaaaaaaagtggagatcagtccagggttaccatacacacaaggacaatggagtcaaactggcattttttggggtctgatgacaagttgtatctatcgaaacaaatgcacggaagggggtttatcttgcaatcacgcattctgtaacttatacaattgtttagtctttagttggtacagacaggtagcagtgtcaacattgtagtaatgcttcagccgtttaactagaccttgattcagacaacattcgagatcactctagatttctttgacgcaaaattgcttctaaggggatgtttgtctgtttgacatggctttaacttatatacggaatttttcctctcttttttttttgacagcagaggacttttctttttaacaacagagtttttttttcatgtggtaaccgctaacactaatgtgctgtttggttcacatattgataacgtaacgtgtaaccgataacgttaaattat

SEQ ID NO: 11450 - DNA, 1478 bp, Zea Mays
ttgggcaactttacaccccttggtcataaagtggcatagttgccctgggaaagtttgatgctctccacattggtcatcgggaattggcaatgcatgcttctaaagcagggactccttttcttctttcttttgtgggaatggccgaagtacttggctggacatataggcctcctatagttgctcattgtgatcgcaagcgggtcctttcatcttgggctccatactgtaggaatgtggtaccacttgaatatcaagttgaattttcaaaggtcaggtccctgtctccacgacaatttgttgaaaggctatcaaaggatcttagaataaaaggtgtcgtggcaggtgaaaattacaggtttggttacaaagcatctggtgacgcaactgagttagtgaaactatgtgaggaatttggtttaagtgcattcattgtacgctctgtcatggacacagcaaaaagatctcttaatggattttcaggcgctataaattcgagtgataaaggacaggtttcttccagccgtgtccgccatgcattggctatgggtgacatggaatacgtctctgaattactagggaggaaacaccgtcttttgctaatggttaaccaacactgccttcatgaaaagaaaagcattgtactccctaattcttgcatgctgaacatgccaccagctgaaggtctctatgaaaactgcgaccttgttaatggagggtatcttggaccatgtagagtgatcatcaactctgatactatcatcattgagatgaaagatgataacagtttatccctaaatcctattcaagaagttcagttagggattgagtttggatgaagttatatactttttgcatctgccatcttgtggagattattgctgaaagaagacattggggggaatactgcaaggggaagtcgaagactttgttcaagcgtgcagtacgcctcatcgtgattgagttcaggagcattttgtagtctcacaagaatgctttattacagaaaaaaaaagtggagatcagtccagggttaccatacacacaaggacaatggagtcaaactggcattttttggggtctgatgacaagttgtatctatcgaaacaaatgcacggaagggggtttatcttgcaatcacgcattctgtaacttatacaattgtttagtctttagttggtacagacaggtagcagtgtcaacattgtagtaatgcttcagccgtttaactagaccttgattcagacaacattcgagatcactctagatttctttgacgcaaaattgcttctaaggggatgtttgtctgtttgacatggctttaacttatatacggaatttttcctctcttttttttttgacagcagaggacttttctttttaacaacagagtttttttttcatgtggtaaccgctaacactaatgtgctgtttggttcacatattgataacgtaacgtgtaaccgataacgttaaattat

SEQ ID NO: 11451 - DNA, 1803 bp, Zea Mays
taccccttgtttgttgttgtatatgtttgcgcatttttctataaacttggccaaagttagattgctagaaaagtttggcttaatacaaagctagaacaccttccaatttggaacgaaggatttaggagcggccaagctgggctgttttccatgtcaggtcaaccaaaagggaggtgtgactacttgtgcaatggggtttgaaaaataaggcccctagacatgaagaagggacatagtaggaactcaccgaagaccttcagctcatctggacactcgggggttagactaaacaacgaaggtcttgtcaacgacaggctcctaatagattgtggagaggatcaggattgtgtgctcggtggcatagttgccctgggaaagtttgatgctctccacattggtcatcgggaattggcaatgcatgcttctaaagcagggactccttttcttctttcttttgtgggaatggccgaagtacttggctggacatataggcctcctatagttgctcattgtgatcgcaagcgggtcctttcatcttgggctccatactgtaggaatgtggtaccacttgaatatcaagttgaattttcaaaggtcaggtccctgtctccacgacaatttgttgaaaggctatcaaaggatcttagaataaaaggtgtcgtggcaggtgaaaattacaggtttggttacaaagcatctggtgacgcaactgagttagtgaaactatgtgaggaatttggtttaagtgcattcattgtacgctctgtcatggacacagcaaaaagatctcttaatggattttcaggcgctataaattcgagtgataaaggacaggtttcttccagccgtgtccgccatgcattggctatgggtgacatggaatacgtctctgaattactagggaggaaacaccgtcttttgctaatggttaaccaacactgccttcatgaaaagaaaagcattgtactccctaattcttgcatgctgaacatgccaccagctgaaggtctctatgaaaactgcgaccttgttaatggagggtatcttggaccatgtagagtgatcatcaactctgatactatcatcattgagatgaaagatgataacagtttatccctaaatcctattcaagaagttcagttagggattgagtttggatgaagttatatactttttgcatctgccatcttgtggagattattgctgaaagaagacattggggggaatactgcaaggggaagtcgaagactttgttcaagcgtgcagtacgcctcatcgtgattgagttcaggagcattttgtagtctcacaagaatgctttattacagaaaaaaaaagtggagatcagtccagggttaccatacacacaaggacaatggagtcaaactggcattttttggggtctgatgacaagttgtatctatcgaaacaaatgcacggaagggggtttatcttgcaatcacgcattctgtaacttatacaattgtttagtctttagttggtacagacaggtagcagtgtcaacattgtagtaatgcttcagccgtttaactagaccttgattcagacaacattcgagatcactctagatttctttgacgcaaaattgcttctaaggggatgtttgtctgtttgacatggctttaacttatatacggaatttttcctctcttttttttttgacagcagaggacttttctttttaacaacagagtttttttttcatgtggtaaccgctaacactaatgtgctgtttggttcacatattgataacgtaacgtgtaaccgataacgttaaattat

SEQ ID NO: 11452 - DNA, 1658 bp, Zea Mays
cgcgtcgtcgcctagtcggtgcgtggtgggagtggtatggagaggggcgccgccacggccgccgcggcgctcggctgcgccctccgctccccttccccctccgcgtccccggctccccggtggccgccgctccaccgctgcccacggcgcggcccgcccgggcctccccgctccctcctgccgcccgcgcggcgtttcaggcccctagacatgaagaagggacatagtaggaactcaccgaagaccttcagctcatctggacactcgggggttagactaaacaacgaaggtcttgtcaacgacaggctcctaatagattgtggagaggatcaggattgtgtgctcggcctcctatagttgctcattgtgatcgcaagcgggtcctttcatcttgggctccatactgtaggaatgtggtaccacttgaatatcaagttgaattttcaaaggtcaggtccctgtctccacgacaatttgttgaaaggctatcaaaggatcttagaataaaaggtgtcgtggcaggtgaaaattacaggtttggttacaaagcatctggtgacgcaactgagttagtgaaactatgtgaggaatttggtttaagtgcattcattgtacgctctgtcatggacacagcaaaaagatctcttaatggattttcaggcgctataaattcgagtgataaaggacaggtttcttccagccgtgtccgccatgcattggctatgggtgacatggaatacgtctctgaattactagggaggaaacaccgtcttttgctaatggttaaccaacactgccttcatgaaaagaaaagcattgtactccctaattcttgcatgctgaacatgccaccagctgaaggtctctatgaaaactgcgaccttgttaatggagggtatcttggaccatgtagagtgatcatcaactctgatactatcatcattgagatgaaagatgataacagtttatccctaaatcctattcaagaagttcagttagggattgagtttggatgaagttatatactttttgcatctgccatcttgtggagattattgctgaaagaagacattggggggaatactgcaaggggaagtcgaagactttgttcaagcgtgcagtacgcctcatcgtgattgagttcaggagcattttgtagtctcacaagaatgctttattacagaaaaaaaaagtggagatcagtccagggttaccatacacacaaggacaatggagtcaaactggcattttttggggtctgatgacaagttgtatctatcgaaacaaatgcacggaagggggtttatcttgcaatcacgcattctgtaacttatacaattgtttagtctttagttggtacagacaggtagcagtgtcaacattgtagtaatgcttcagccgtttaactagaccttgattcagacaacattcgagatcactctagatttctttgacgcaaaattgcttctaaggggatgtttgtctgtttgacatggctttaacttatatacggaatttttcctctcttttttttttgacagcagaggacttttctttttaacaacagagtttttttttcatgtggtaaccgctaacactaatgtgctgtttggttcacatattgataacgtaacgtgtaaccgataacgttaaattat

SEQ ID NO: 11453 - DNA, 1790 bp, Zea Mays
gccaggcagccagctcgcgtcgaagaggacgacgtggcccgccaagctcccctgccaaaagaaacaggagtgcccgcgtcgtcgcctagtcggtgcgtggtgggagtggtatggagaggggcgccgccacggccgccgcggcgctcggctgcgccctccgctccccttccccctccgcgtccccggctccccggtggccgccgctccaccgctgcccacggcgcggcccgcccgggcctccccgctccctcctgccgcccgcgcggcgtttcaggcccctagacatgaagaagggacatagtaggaactcaccgaagaccttcagctcatctggacactcgggggttagactaaacaacgaaggtcttgtcaacgacaggctcctaatagattgtggagaggatcaggattgtgtgctcggtggcatagttgccctgggaaagtttgatgctctccacattggtcatcgggaattggcaatgcatgcttctaaagcagggactccttttcttctttcttttgtgggaatggccgaagtacttggctggacatataggcctcctatagttgctcattgtgatcgcaagcgggtcctttcatcttgggctccatactgtaggaatgtggtaccacttgaatatcaagttgaattttcaaaggtcaggtccctgtctccacgacaatttgttgaaaggctatcaaaggatcttagaataaaaggtgtcgtggcaggtgaaaattacaggtttggttacaaagcatctggtgacgcaactgagttagtgaaactatgcgctataaattcgagtgataaaggacaggtttcttccagccgtgtccgccatgcattggctatgggtgacatggaatacgtctctgaattactagggaggaaacaccgtcttttgctaatggttaaccaacactgccttcatgaaaagaaaagcattgtactccctaattcttgcatgctgaacatgccaccagctgaaggtctctatgaaaactgcgaccttgttaatggagggtatcttggaccatgtagagtgatcatcaactctgatactatcatcattgagatgaaagatgataacagtttatccctaaatcctattcaagaagttcagttagggattgagtttggatgaagttatatactttttgcatctgccatcttgtggagattattgctgaaagaagacattggggggaatactgcaaggggaagtcgaagactttgttcaagcgtgcagtacgcctcatcgtgattgagttcaggagcattttgtagtctcacaagaatgctttattacagaaaaaaaaagtggagatcagtccagggttaccatacacacaaggacaatggagtcaaactggcattttttggggtctgatgacaagttgtatctatcgaaacaaatgcacggaagggggtttatcttgcaatcacgcattctgtaacttatacaattgtttagtctttagttggtacagacaggtagcagtgtcaacattgtagtaatgcttcagccgtttaactagaccttgattcagacaacattcgagatcactctagatttctttgacgcaaaattgcttctaaggggatgtttgtctgtttgacatggctttaacttatatacggaatttttcctctcttttttttttgacagcagaggacttttctttttaacaacagagtttttttttcatgtggtaaccgctaacactaatgtgctgtttggttcacatattgataacgtaacgtgtaaccgataacgttaaattat

SEQ ID NO: 11454 - DNA, 1826 bp, Zea Mays
gtccgctgccgccaccagccaccggccacagccaggcagccagctcgcgtcgaagaggacgacgtggcccgccaagctcccctgccaaaagaaacaggagtgcccgcgtcgtcgcctagtcggtgcgtggtgggagtggtatggagaggggcgccgccacggccgccgcggcgctcggctgcgccctccgctccccttccccctccgcgtccccggctccccggtggccgccgctccaccgctgcccacggcgcggcccgcccgggcctccccgctccctcctgccgcccgcgcggcgtttcaggcccctagacatgaagaagggacatagtaggaactcaccgaagaccttcagctcatctggacactcgggggttagactaaacaacgaaggtcttgtcaacgacaggctcctaattggtcatcgggaattggcaatgcatgcttctaaagcagggactccttttcttctttcttttgtgggaatggccgaagtacttggctggacatataggcctcctatagttgctcattgtgatcgcaagcgggtcctttcatcttgggctccatactgtaggaatgtggtaccacttgaatatcaagttgaattttcaaaggtcaggtccctgtctccacgacaatttgttgaaaggctatcaaaggatcttagaataaaaggtgtcgtggcaggtgaaaattacaggtttggttacaaagcatctggtgacgcaactgagttagtgaaactatgtgaggaatttggtttaagtgcattcattgtacgctctgtcatggacacagcaaaaagatctcttaatggattttcaggcgctataaattcgagtgataaaggacaggtttcttccagccgtgtccgccatgcattggctatgggtgacatggaatacgtctctgaattactagggaggaaacaccgtcttttgctaatggttaaccaacactgccttcatgaaaagaaaagcattgtactccctaattcttgcatgctgaacatgccaccagctgaaggtctctatgaaaactgcgaccttgttaatggagggtatcttggaccatgtagagtgatcatcaactctgatactatcatcattgagatgaaagatgataacagtttatccctaaatcctattcaagaagttcagttagggattgagtttggatgaagttatatactttttgcatctgccatcttgtggagattattgctgaaagaagacattggggggaatactgcaaggggaagtcgaagactttgttcaagcgtgcagtacgcctcatcgtgattgagttcaggagcattttgtagtctcacaagaatgctttattacagaaaaaaaaagtggagatcagtccagggttaccatacacacaaggacaatggagtcaaactggcattttttggggtctgatgacaagttgtatctatcgaaacaaatgcacggaagggggtttatcttgcaatcacgcattctgtaacttatacaattgtttagtctttagttggtacagacaggtagcagtgtcaacattgtagtaatgcttcagccgtttaactagaccttgattcagacaacattcgagatcactctagatttctttgacgcaaaattgcttctaaggggatgtttgtctgtttgacatggctttaacttatatacggaatttttcctctcttttttttttgacagcagaggacttttctttttaacaacagagtttttttttcatgtggtaaccgctaacactaatgtgctgtttggttcacatattgataacgtaacgtgtaaccgataacgttaaattat

SEQ ID NO: 11455 - DNA, 1912 bp, Zea Mays
gcaggccgcagcgcagcggccgtgtccgctgccgccaccagccaccggccacagccaggcagccagctcgcgtcgaagaggacgacgtggcccgccaagctcccctgccaaaagaaacaggagtgcccgcgtcgtcgcctagtcggtgcgtggtgggagtggtatggagaggggcgccgccacggccgccgcggcgctcggctgcgccctccgctccccttccccctccgcgtccccggctccccggtggccgccgctccaccgctgcccacggcgcggcccgcccgggcctccccgctccctcctgccgcccgcgcggcgtttcaggcccctagacatgaagaagggacatagtaggaactcaccgaagaccttcagctcatctggacactcgggggttagactaaacaacgaaggtcttgtcaacgacaggctcctaatagattgtggagaggatcaggattgtgtgctcgttgccctgggaaagtttgatgctctccacattggtcatcgggaattggcaatgcatgcttctaaagcagggactccttttcttctttcttttgtgggaatggccgaagtacttggctggacatataggcctcctatagttgctcattgtgatcgcaagcgggtcctttcatcttgggctccatactgtaggaatgtggtaccacttgaatatcaagttgaattttcaaaggtcaggtccctgtctccacgacaatttgttgaaaggctatcaaaggatcttagaataaaaggtgtcgtggcaggtgaaaattacaggtttggttacaaagcatctggtgacgcaactgagttagtgaaactatgtgaggaatttggtttaagtgcattcattgtacgctctgtcatggacacagcaaaaagatctcttaatggattttcaggcgctataaattcgagtgataaaggacaggtttcttccagccgtgtccgccatgcattggctatgggtgacatggaatacgtctctgaattactagggaggaaacaccgtcttttgctaatggttaaccaacactgccttcatgaaaagaaaagcattgtactccctaattcttgcatgctgaacatgccaccagctgaaggtctctatgaaaactgcgaccttgttaatggagggtatcttggaccatgtagagtgatcatcaactctgatactatcatcattgagatgaaagatgataacagtttatccctaaatcctattcaagaagttcagttagggattgagtttggatgaagttatatactttttgcatctgccatcttgtggagattattgctgaaagaagacattggggggaatactgcaaggggaagtcgaagactttgttcaagcgtgcagtacgcctcatcgtgattgagttcaggagcattttgtagtctcacaagaatgctttattacagaaaaaaaaagtggagatcagtccagggttaccatacacacaaggacaatggagtcaaactggcattttttggggtctgatgacaagttgtatctatcgaaacaaatgcacggaagggggtttatcttgcaatcacgcattctgtaacttatacaattgtttagtctttagttggtacagacaggtagcagtgtcaacattgtagtaatgcttcagccgtttaactagaccttgattcagacaacattcgagatcactctagatttctttgacgcaaaattgcttctaaggggatgtttgtctgtttgacatggctttaacttatatacggaatttttcctctcttttttttttgacagcagaggacttttctttttaacaacagagtttttttttcatgtggtaaccgctaacactaatgtgctgtttggttcacatattgataacgtaacgtgtaaccgataacgttaaattat

SEQ ID NO: 11456 - DNA, 1523 bp, Zea Mays
aaataaccagacagacatagctggacatcttgattaacattggatccttgatggagatcacaaagatggggaacagagtggccaactaccctattcatcaagatgcacaagttcttcagacacaaaatgcaatttccattcatgcacagcagcttccaaggcagtttcctccgcaaatgcttcagaatttgacaccacagcaacaacagcagcttcaaaatttgacaccacaacagcagcagcttctgcagcagcagcagtggcttaggcgcaaccagttatgcagcccccgtggtcctcttactatggcagacaagaaccagcctatggtgaatgtgaaggtagagaatactatggattctcaaatcgatgtcccatatgggtcttttactagacaacagcaatttaatataagacagcagcagcaactattgcatcagcagcagcaacagcttcaacagcagcagctccagcaacagcaacaacagctccagcagcagcaacaccaacaacagcttaatcagcagcagcagcaactgcagcaacagcagcagcaattgcaacaacagcagcagcagttcactcagcaacagcaattgcaacaacagcagcagcaactacagcagattaatcagcagcagcaccttcaacagcaacagcaacagcaactaaaccagcaacaacttcagcagcaacagcagcagatgaccatgtcaggaaatcagaatgcacaactagcacagcagttcaaacaagtctcatcaatgagtgcatatggcatgcgaatgccacctgtcaaagtagaagctttccatgaattggtgagcggggactcgtcgctgaagcacgataacgaccctaacaaactcacttctccaaagtagctgcggtgtgcaaaggatagcttttgcggtctgttgccttcctgccccccaacatcatgtctcgcctgtttgattgcgcacaacagcaagacgaaccgtgtatcgtaaatgtgaagcatttggctaattcactgccttcaaacaaactgatgtcaaatacgaactgataatagctccaagtttccttacattctgtacatggattaagggtgcgctgtcctctacataattagacctgtgcatattttaagtttgccagagaaagctcattcatttcatgccaagaaattgtggccattacgttcatagtgtgcgttggctcttcattttcaggccaggcctgggcttggatggaccatccgttagtttttagtatgaagacacttcaaatcaatatattagattggacttaggccaaggaaattttacgaatttggtgtttcgtctcatcctctaggttctattatgattttatccttatccttaattttaagccttttgattttgttctcaggattttaaataaaccagctccttgtttatgtaccacggaattaaatgatgaaaaacagaaaaaaaacttaatgtcgagcaattgaaggcaacttggagttttttttttgtcgtgattgatatgac

SEQ ID NO: 11457 - DNA, 2588 bp, Zea Mays
cttagagatacggctggggaagcatgctggtgtggtggtagtgggcgtcagatgggctggcaaggtgacaagggtcaccggctgagggaggtggaggcctgtcgggtggtgcgggggcttattatcctgtgcgcatgcgtcacagcctgaggattggaggatgtgtgcagtatggcgtcacatgatcgtttggttcattggcacacaaggaaagctaggaggaagaagaatgtctagatgtttaagatctgcgacttcatggagatgatatttatttctctttggaagatgagcaggaagacaacactcaacatcaagtgcattctagaactgcgttcagtccaagcagggatggttccatgttgtctcaacggcataatcggtatgaagaattgcctgacacatggtacaagccatatgctgacaaattcaggatatggcacagcaagcttcactcaggtgacaaagaaataccaaagagaacaccagagggaatgtctgactatcttaagatttgcagtgtacataaaaggaagagggctgtgtttatggatgatcccagcatatctgctcccatattggaaaatggcccttccctgcactcaaagaatgctggggaattcagcaattcaacagacgaattaattccagaaattagatttccatctgactgtgttccagaaagcgcaattcctaaaacaagtgggatatctagggctaacaaaatagaagttcatggagttcttgataatttgccagcaccatctagccgcaacactgcaatgcttgaaaggtttggcatggtgcctgaatattacaagacaggaaacaaatatagaggaaaagatggatctagagtagaagggaaatctttaagccaagagcaagcattgctcatgacaaaacagttggttgctcgctacttggcaaattcaggctttgaaagtggaactgtggtctctattgatgttctttcagaaataataattaagcacatatgtaaattgggacgcaacttgaagcttctaactgacagctacaggaagcaattttcatcaattgaactccttaagatgttcctacaaactgttgggtacagtaacattggatccttgatggagatcacaaagatggggaacagagtggccaactaccctattcatcaagatgcacaagttcttcagacacaaaatgcaatttccattcatgcacagcagcttccaaggcagtttcctccgcaaatgcttcagaatttgacaccacagcaacaacagcagcttcaaaatttgacaccacaacagcagcagcttctgcagcagcagcagtggcttaggcgcaaccagttatgcagcccccgtggtcctcttactatggcagacaagaaccagcctatggtgaatgtgaaggtagagaatactatggattctcaaatcgatgtcccatatgggtcttttactagacaacagcaatttaatataagacagcagcagcaactattgcatcagcagcagcaacagcttcaacagcagcagctccagcaacagcaacaacagctccagcagcagcaacaccaacaacagcttaatcagcagcagcagcaactgcagcaacagcagcagcaattgcaacaacagcagcagcagttcactcagcaacagcaattgcaacaacagcagcagcaactacagcagattaatcagcagcagcaccttcaacagcaacagcaacagcaactaaaccagcaacaacttcagcagcaacagcagcagatgaccatgtcaggaaatcagaatgcacaactagcacagcagttcaaacaagtctcatcaatgagtgcatatggcatgcgaatgccacctgtcaaagtagaagctttccatgaattggtgagcggggactcgtcgctgaagcacgataacgaccctaacaaactcacttctccaaagtagctgcggtgtgcaaaggatagcttttgcggtctgttgccttcctgccccccaacatcatgtctcgcctgtttgattgcgcacaacagcaagacgaaccgtgtatcgtaaatgtgaagcatttggctaattcactgccttcaaacaaactgatgtcaaatacgaactgataatagctccaagtttccttacattctgtacatggattaagggtgcgctgtcctctacataattagacctgtgcatattttaagtttgccagagaaagctcattcatttcatgccaagaaattgtggccattacgttcatagtgtgcgttggctcttcattttcaggccaggcctgggcttggatggaccatccgttagtttttagtatgaagacacttcaaatcaatatattagattggacttaggccaaggaaattttacgaatttggtgtttcgtctcatcctctaggttctattatgattttatccttatccttaattttaagccttttgattttgttctcaggattttaaataaaccagctccttgtttatgtaccacggaattaaatgatgaaaaacagaaaaaaaacttaatgtcgagcaattgaaggcaacttggagttttttttttgtcgtgattgatatgac

SEQ ID NO: 11458 - DNA, 2437 bp, Zea Mays
caatcacacacgagtccggacgcagaagaacccaccgatttcggcgcgcggaccggtcgaacaggcggcccaatcgccacgcggatggcggcggccgccgcactgctgctgggcgaggacgggcgcggctacgagctcgcgcggcggctggaggcgtgcggcgcgtggcgcgagtggctgggcgacgattccgcgcacgccgcgctcgcgcagcacctcacgtccccagcaacctgggacgccttcctctaccccgccgcctccccatcgccgcccccgcgcccgctcctcctcctccagctccgcgttcgcgcgctcctcttcgacaaggcctcggccgcgctcctcctgcccccccgcggcgcggcccctgtcagcctccattccatcaacgccaactatctgcgacttcatggagatgatatttatttctctttggaagatgagcaggaagacaacactcaacatcaagtgcattctagaactgcgttcagtccaagcagggatggttccatgttgtctcaacggcataatcggtatgaagaattgcctgacacatggtacaagccatatgctgacaaattcaggatatggcacagcaagcttcactcaggtgacaaagaaataccaaagagaacaccagagggaatgtctgactatcttaagatttgcagtgtacataaaaggaagagggctgtgtttatggatgatcccagcatatctgctcccatattggaaaatggcccttccctgcactcaaagaatgctggggaattcagcaattcaacagacgaattaattccagaaattagatttccatctgactgtgttccagaaagcgcaattcctaaaacaagtgggatatctagggctaacaaaatagaagttcatggagttcttgataatttgccagcaccatctagccgcaacactgcaatgcttgaaaggtttggcatggtgcctgaatattacaagacaggaaacaaatatagaggaaaagatggatctagagtagaagggaaatctttaagccaagagcaagcattgctcatgacaaaacagttggttgctcgctacttggcaaattcaggctttgaaagtggaactgtggtctctattgatgttctttcagaaataataattaagcacatatgtaaattgggacgcaacttgaagcttctaactgacagctacaggaagcaattttcatcaattgaactccttaagatgttcctacaaactgttgggtacagtaacattggatccttgatggagatcacaaagatggggaacagagtggccaactaccctattcatcaagatgcacaagttcttcagacacaaaatgcaatttccattcatgcacagcagcttccaaggcagtttcctccgcaaatgcttcagaatttgacaccacagcaacaacagcagcttcaaaatttgacaccacaacagcagcagcttctgcagcagcagcagtggcttaggcgcaaccagttatgcagcccccgtggtcctcttactatggcagacaagaaccagcctatggtgaatgtgaaggtagagaatactatggattctcaaatcgatgtcccatatgggtcttttactagacaacagcaatttaatataagacagcagcagcaactattgcatcagcagcagcaacagcttcaacagcagcagctccagcaacagcaacaacagctccagcagcagcaacaccaacaacagcttaatcagcagcagcagcaactgcagcaacagcagcagcaattgcaacaacagcagcagcagttcactcagcaacagcaattgcaacaacagcagcagcaactacagcagattaatcagcagcagcaccttcaacagcaacagcaacagcaactaaaccagcaacaacttcagcagcaacagcagcagatgaccatgtcaggaaatcagaatgcacaactagcacagcagttcaaacaagtctcatcaatgagtgcatatggcatgcgaatgccacctgtcaaagtagaagctttccatgaattggtgagcggggactcgtcgctgaagcacgataacgaccctaacaaactcacttctccaaagtagctgcggtgtgcaaaggatagcttttgcggccaggcctgggcttggatggaccatccgttagtttttagtatgaagacacttcaaatcaatatattagattggacttaggccaaggaaattttacgaatttggtgtttcgtctcatcctctaggttctattatgattttatccttatccttaattttaagccttttgattttgttctcaggattttaaataaaccagctccttgtttatgtaccacggaattaaatgatgaaaaacagaaaaaaaacttaatgtcgagcaattgaaggcaacttggagttttttttttgtcgtgattgatatgac

SEQ ID NO: 11459 - DNA, 2851 bp, Zea Mays
ccggcatccaagttccaatcacacacgagtccggacgcagaagaacccaccgatttcggcgcgcggaccggtcgaacaggcggcccaatcgccacgcggatggcggcggccgccgcactgctgctgggcgaggacgggcgcggctacgagctcgcgcggcggctggaggcgtgcggcgcgtggcgcgagtggctgggcgacgattccgcgcacgccgcgctcgcgcagcacctcacgtccccagcaacctgggacgccttcctctaccccgccgcctccccatcgccgcccccgcgcccgctcctcctcctccagctccgcgttcgcgcgctcctcttcgacaaggcctcggccgcgctcctcctgcccccccgcggcgcggcccctgtcagcctccattccatcaacgccaactatctgcgacttcatggagatgatatttatttctctttggaagatgagcaggaagacaacactcaacatcaagtgcattctagaactgcgttcagtccaagcagggatggttccatgttgtctcaacggcataatcggtatgaagaattgcctgacacatggtacaagccatatgctgacaaattcaggatatggcacagcaagcttcactcaggtgacaaagaaataccaaagagaacaccagagggaatgtctgactatcttaagatttgcagtgtacataaaaggaagagggctgtgtttatggatgatcccagcatatctgctcccatattggaaaatggcccttccctgcactcaaagaatgctggggaattcagcaattcaacagacgaattaattccagaaattagatttccatctgactgtgttccagaaagcgcaattcctaaaacaagtgggatatctagggctaacaaaatagaagttcatggagttcttgataatttgccagcaccatctagccgcaacactgcaatgcttgaaaggtttggcatggtgcctgaatattacaagacaggaaacaaatatagaggaaaagatggatctagagtagaagggaaatctttaagccaagagcaagcattgctcatgacaaaacagttggttgctcgctacttggcaaattcaggctttgaaagtggaactgtggtctctattgatgttctttcagaaataataattaagcacatatgtaaattgggacgcaacttgaagcttctaactgacagctacaggaagcaattttcatcaattgaactccttaagatgttcctacaaactgttgggtacaggaccatatgaccaaatttcccatggcatcttaacacctcttcagtaagctttcagaggagagattcacgctgtcacattccaaacaactgactgtaacattggatccttgatggagatcacaaagatggggaacagagtggccaactaccctattcatcaagatgcacaagttcttcagacacaaaatgcaatttccattcatgcacagcagcttccaaggcagtttcctccgcaaatgcttcagaatttgacaccacagcaacaacagcagcttcaaaatttgacaccacaacagcagcagcttctgcagcagcagcagtggcttaggcgcaaccagttatgcagcccccgtggtcctcttactatggcagacaagaaccagcctatggtgaatgtgaaggtagagaatactatggattctcaaatcgatgtcccatatgggtcttttactagacaacagcaatttaatataagacagcagcagcaactattgcatcagcagcagcaacagcttcaacagcagcagctccagcaacagcaacaacagctccagcagcagcaacaccaacaacagcttaatcagcagcagcagcaactgcagcaacagcagcagcaattgcaacaacagcagcagcagttcactcagcaacagcaattgcaacaacagcagcagcaactacagcagattaatcagcagcagcaccttcaacagcaacagcaacagcaactaaaccagcaacaacttcagcagcaacagcagcagatgaccatgtcaggaaatcagaatgcacaactagcacagcagttcaaacaagtctcatcaatgagtgcatatggcatgcgaatgccacctgtcaaagtagaagctttccatgaattggtgagcggggactcgtcgctgaagcacgataacgaccctaacaaactcacttctccaaagtagctgcggtgtgcaaaggatagcttttgcggtctgttgccttcctgccccccaacatcatgtctcgcctgtttgattgcgcacaacagcaagacgaaccgtgtatcgtaaatgtgaagcatttggctaattcactgccttcaaacaaactgatgtcaaatacgaactgataatagctccaagtttccttacattctgtacatggattaagggtgcgctgtcctctacataattagacctgtgcatattttaagtttgccagagaaagctcattcatttcatgccaagaaattgtggccattacgttcatagtgtgcgttggctcttcattttcaggccaggcctgggcttggatggaccatccgttagtttttagtatgaagacacttcaaatcaatatattagattggacttaggccaaggaaattttacgaatttggtgtttcgtctcatcctctaggttctattatgattttatccttatccttaattttaagccttttgattttgttctcaggattttaaataaaccagctccttgtttatgtaccacggaattaaatgatgaaaaacagaaaaaaaacttaatgtcgagcaattgaaggcaacttggagttttttttttgtcgtgattgatatgac

SEQ ID NO: 11460 - DNA, 2633 bp, Zea Mays
ccggcatccaagttccaatcacacacgagtccggacgcagaagaacccaccgatttcggcgcgcggaccggtcgaacaggcggcccaatcgccacgcggatggcggcggccgccgcactgctgctgggcgaggacgggcgcggctacgagctcgcgcggcggctggaggcgtgcggcgcgtggcgcgagtggctgggcgacgattccgcgcacgccgcgctcgcgcagcacctcacgtccccagcaacctgggacgccttcctctaccccgccgcctccccatcgccgcccccgcgcccgctcctcctcctccagctccgcgttcgcgcgctcctcttcgacaaggcctcggccgcgctcctcctgcccccccgcggcgcggcccctgtcagcctccattccatcaacgccaactatctgcgacttcatggagatgatatttatttctctttggaagatgagcaggaagacaacactcaacatcaagtgcattctagaactgcgttcagtccaagcagggatggttccatgttgtctcaacggcataatcggtatgaagaattgcctgacacatggtacaagccatatgctgacaaattcaggatatggcacagcaagcttcactcaggtgacaaagaaataccaaagagaacaccagagggaatgtctgactatcttaagatttgcagtgtacataaaaggaagagggctgtgtttatggatgatcccagcatatctgctcccatattggaaaatggcccttccctgcactcaaagaatgctggggaattcagcaattcaacagacgaattaattccagaaattagatttccatctgactgtgttccagaaagcgcaattcctaaaacaagtgggatatctagggctaacaaaatagaagttcatggagttcttgataatttgccagcaccatctagccgcaacactgcaatgcttgaaaggtttggcatggtgcctgaatattacaagacaggaaacaaatatagaggaaaagatggatctagagtagaagggaaatctttaagccaagagcaagcattgctcatgacaaaacagttggttgctcgctacttggcaaattcaggctttgaaagtggaactgtggtctctattgatgttctttcagaaataataattaagcacatatgtaaattgggacgcaacttgaagcttctaactgacagctacaggaagcaattttcatcaattgaactccttaagatgttcctacaaactgttgggtacagtaacattggatccttgatggagatcacaaagatggggaacagagtggccaactaccctattcatcaagatgcacaagttcttcagacacaaaatgcaatttccattcatgcacagcagcttccaaggcagtttcctccgcaaatgcttcagaatttgacaccacagcaacaacagcagcttcaaaatttgacaccacaacagcagcagcttctgcagcagcagcagtggcttaggcgcaaccagttatgcagcccccgtggtcctcttactatggcagacaagaaccagcctatggtgaatgtgaaggtagagaatactatggattctcaaatcgatgtcccatatgggtcttttactagacaacagcaatttaatataagacagcagcagcaactattgcatcagcagcagcaacagcttcaacagcagcagctccagcaacagcaacaacagctccagcagcagcaacaccaacaacagcttaatcagcagcagcagcaactgcagcaacagcagcagcaattgcaacaacagcagcagcagttcactcagcaacagcaattgcaacaacagcagcagcaactacagcagattaatcagcagcagcaccttcaacagcaacagcaacagcaactaaaccagcaacaacttcagcagcaacagcagcagatgaccatgtcaggaaatcagaatgcacaactagcacagcagttcaaacaagtctcatcaatgagtgcatatggcatgcgaatgccacctgtcaaagtagaagctttccatgaattggtgagcggggactcgtcgctgaagcacgataacgaccctaacaaactcacttctccaaagtagctgcggtgtgcaaaggatagcttttgcggtctgttgccttcctgccccccaacatcatgtctcgcctgtttgattgcgcacaacagcaagacgaaccgtgtatcgtaaatgtgaagcatttggctaattcactgccttcaaacaaactgatgtcaaatacgaactgataatagctccaagtttccttacattctgtacatggattaagggccaggcctgggcttggatggaccatccgttagtttttagtatgaagacacttcaaatcaatatattagattggacttaggccaaggaaattttacgaatttggtgtttcgtctcatcctctaggttctattatgattttatccttatccttaattttaagccttttgattttgttctcaggattttaaataaaccagctccttgtttatgtaccacggaattaaatgatgaaaaacagaaaaaaaacttaatgtcgagcaattgaaggcaacttggagttttttttttgtcgtgattgatatgac

SEQ ID NO: 11461 - DNA, 218 bp, Zea Mays
gtcctcttcatcctctccggctccgctagccttcttggcctcttccagcgccttcaccaagtccgcgaggcacgagtccggcccgtcgtcgaggctcttgggcgtgaggttctcggcgacgtcggccggcgtcatgtccacctcccggagtagctcgccgacggcgtcgaacagagggtgcgagtccacgtcgagaggaaaaagaggttgacgacggc

SEQ ID NO: 11462 - DNA, 2690 bp, Zea Mays
acacgaaatcccgctttcgcccccgtcctcttccccgctccacctccctttccccctccctccttactccagtcctcccatggcttccagtgccacgggacctgcccgctccccgtgagtccgagacctcctccccgaccgagccctgccctgatcccgacccgggacccacccttgatccggaccgtcctaaatcccaacggggtctctggcgatggcggcggcctccccgccgcaggatcagcagcagccggcggcggagggggccgttgcgcgggaggaccccgcggcgctgaccccgaggagggctcggttcccgcgcgcgtgccactaccgtccgaacgcgccgccgctcacgcccacacccgcgccctcgcctccgccgccgcggccgaggcggaacgggaatgcggggtacgagacgccggagtaccgcgtggtaacgccgctggtggaggaaccggcgtcgcccgctgagctgccgcggtggagattgcgcggcatgtgggagctcgcctccgtcctcaacttcctccacgtgttccggccattgctgaacattccggtggagttcactgcagaggagctggaggacgcgatcataacacccaatggaacgttggatgacgttcatatgcctttattaaagtcaattcctccagtaactcgaatggccatgggacgtggaacatggatagcggtgttatgtaaaaaattgaagcactggtggcattgggttgcagaaggcgatataccgattgtagcctcacatggagcggaaactgagctttacaaggcacttgagccaggaattcgattagtgatcctgaaagccatatgtgatatacgcagtgagcaagaggacgttcggaacttcattgatagttctttgaagcatggttatcatctttccatcttccgtaaagaaaggattggaggagattcacatggaatctcatactggtatgaagatgacccaatccttgggcatcggttgtatcgtgaaattagacgagtggagcatgcgaaggactcaacaaaaaaatctaaaggaaagggagtttctactgttccggttatctcctataactgggaggctgtagcatccaactttgatgagtttaaagtagctgcagagaaactcttttcaagcaggaacaggacagaagtctctcttggcaagaagctgaagttcacttatcttccagagattgaaaagattcacaagaagaaggagaagttgctaaaaaagcaacaaagagaagccatcctccttgacagctgcttgacagtgaatggattgacatctggccgctctcgacgtgaaagaaaacatgtgacttatacttttgatgattatgagcgttcaataaatgaagccataaaaacaataaggttggcccctccccattatgcaaaggattttatggagaaactccagagaagttgtattacaaagcaaaaacagatgaaggaaaggctgaaactctccatcgcagctacaggcagagaaaaagatcccaaaggtacacaaaggactatgttgaggccatatcagatattgacctagattttgacagcgatgatgatatcatgggtgaagcagtctatgatgaggaatatcttagaagaaggaaacgatacaaggcaagcctttctgaaaatgatgatgagtttcagttggatcaagtcgccaatgatggtgatgatgaagtgggtacttctttgaatgttaatgaagacacaaaagatctccaatggtacaaaagatttccacttctcacccctcaagggaccaagttgaaatctattgatgaaatccaaactggcatccgacgcagtaagcgctccacccgttcccgtattaactatcgacagcttgatacttttggcgcaaatacaaaatatggaaagtcagagaaatgcaatgcatcagatccggatgctagttctgatgcactaaatgatacggagctctcaacaagtcaagatcgagaggaagaagacggagtaaacaaagcacaacagcagtacacagagaaaccaatcgttcctgtcaaggagagtagaagtgtccggagaaaattcctcgtcctaaatgagcttgtgcctatagctggttttgatgatgcttcagtcttagtgaaagataagcacgtgaataacaacggaggaaaatgttctgcagcacattagggcgttggggaagctctttttttttggtcacatgggtagcaaatactgggtagaactgctcgcttaagcatggaccaacgagaatccaatgagatggtgatgcaacattggtcttgtttgggcagactgctgcttactacttccagtgtcatgccagcgaggagatgagatggtccatgggtgctgtgtggctgaattcccagcccataaagccaagtccctctctgatacttggaggtcttgctgagatgtgcactaggcacaccgcgtcgattggcgctgtacaattgtcacagctgtacgtgtatctcctccatgtatatacagtgattgggagcaatagcgtcttctggtttcaggatgcctatgggtagttgtctcttcttccttttcccctcttctgagcatctgaagttcggcaataaactcgattcaactgtggcatttacttatttctgtatgcggtaattaatatcgctcgatcttacactact

SEQ ID NO: 11463 - DNA, 2706 bp, Zea Mays
acacgaaatcccgctttcgcccccgtcctcttccccgctccacctccctttccccctccctccttactccagtcctcccatggcttccagtgccacgggacctgcccgctccccgtgagtccgagacctcctccccgaccgagccctgccctgatcccgacccgggacccacccttgatccggaccgtcctaaatcccaacggggtctctggcgatggcggcggcctccccgccgcaggatcagcagcagccggcggcggagggggccgttgcgcgggaggaccccgcggcgctgaccccgaggagggctcggttcccgcgcgcgtgccactaccgtccgaacgcgccgccgctcacgcccacacccgcgccctcgcctccgccgccgcggccgaggcggaacgggaatgcggggtacgagacgccggagtaccgcgtggtaacgccgctggtggaggaaccggcgtcgcccgctgagctgccgcggtggagattgcgcggcatgtgggagctcgcctccgtcctcaacttcctccacgtgttccggccattgctgaacattccggtggagttcactgcagaggagctggaggacgcgatcataacacccaatggaacgttggatgacgttcatatgcctttattaaagtcaattcctccagtaactcgaatggccatgggacgtggaacatggatagcggtgttatgtaaaaaattgaagcactggtggcattgggttgcagaaggcgatataccgattgtagcctcacatggagcggaaactgagctttacaaggcacttgagccaggaattcgattagtgatcctgaaagccatatgtgatatacgcagtgagcaagaggacgttcggaacttcattgatagttctttgaagcatggttatcatctttccatcttccgtaaagaaaggattggaggagattcacatggaatctcatactggtatgaagatgacccaatccttgggcatcggttgtatcgtgaaattagacgagtggagcatgcgaaggactcaacaaaaaaatctaaaggaaagggagtttctactgttccggttatctcctataactgggaggctgtagcatccaactttgatgagtttaaagtagctgcagagaaactcttttcaagcaggaacaggacagaagtctctcttggcaagaagctgaagttcacttatcttccagagattgaaaagattcacaagaagaaggagaagttgctaaaaaagcaacaaagagaagccatcctccttgacagctgcttgacagtgaatggattgacatctggccgctctcgacgtgaaagaaaacatgtgacttatacttttgatgattatgagcgttcaataaatgaagccataaaaacaataaggaaaaatgagaatgctgttgaggttggcccctccccattatgcaaaggattttatggagaaactccagagaagttgtattacaaagcaaaaacagatgaaggaaaggctgaaactctccatcgcaggcagagaaaaagatcccaaaggtacacaaaggactatgttgaggccatatcagatattgacctagattttgacagcgatgatgatatcatgggtgaagcagtctatgatgaggaatatcttagaagaaggaaacgatacaaggcaagcctttctgaaaatgatgatgagtttcagttggatcaagtcgccaatgatggtgatgatgaagtgggtacttctttgaatgttaatgaagacacaaaagatctccaatggtacaaaagatttccacttctcacccctcaagggaccaagttgaaatctattgatgaaatccaaactggcatccgacgcagtaagcgctccacccgttcccgtattaactatcgacagcttgatacttttggcgcaaatacaaaatatggaaagtcagagaaatgcaatgcatcagatccggatgctagttctgatgcactaaatgatacggagctctcaacaagtcaagatcgagaggaagaagacggagtaaacaaagcacaacagcagtacacagagaaaccaatcgttcctgtcaaggagagtagaagtgtccggagaaaattcctcgtcctaaatgagcttgtgcctatagctggttttgatgatgcttcagtcttagtgaaagataagcacgtgaataacaacggaggaaaatgttctgcagcacattagggcgttggggaagctctttttttttggtcacatgggtagcaaatactgggtagaactgctcgcttaagcatggaccaacgagaatccaatgagatggtgatgcaacattggtcttgtttgggcagactgctgcttactacttccagtgtcatgccagcgaggagatgagatggtccatgggtgctgtgtggctgaattcccagcccataaagccaagtccctctctgatacttggaggtcttgctgagatgtgcactaggcacaccgcgtcgattggcgctgtacaattgtcacagctgtacgtgtatctcctccatgtatatacagtgattgggagcaatagcgtcttctggtttcaggatgcctatgggtagttgtctcttcttccttttcccctcttctgagcatctgaagttcggcaataaactcgattcaactgtggcatttacttatttctgtatgcggtaattaatatcgctcgatcttacactact

SEQ ID NO: 11464 - DNA, 2673 bp, Zea Mays
acacgaaatcccgctttcgcccccgtcctcttccccgctccacctccctttccccctccctccttactccagtcctcccatggcttccagtgccacgggacctgcccgctccccgtgagtccgagacctcctccccgaccgagccctgccctgatcccgacccgggacccacccttgatccggaccgtcctaaatcccaacggggtctctggcgatggcggcggcctccccgccgcaggatcagcagcagccggcggcggagggggccgttgcgcgggaggaccccgcggcgctgaccccgaggagggctcggttcccgcgcgcgtgccactaccgtccgaacgcgccgccgctcacgcccacacccgcgccctcgcctccgccgccgcggccgaggcggaacgggaatgcggggtacgagacgccggagtaccgcgtggtaacgccgctggtggaggaaccggcgtcgcccgctgagctgccgcggtggagattgcgcggcatgtgggagctcgcctccgtcctcaacttcctccacgtgttccggccattgctgaacattccggtggagttcactgcagaggagctggaggacgcgatcataacacccaatggaacgttggatgacgttcatatgcctttattaaagtcaattcctccagtaactcgaatggccatgggacgtggaacatggatagcggtgttatgtaaaaaattgaagcactggtggcattgggtatatgacatgttccccgccaagaacaattttacataagggatgaaactgcatttggttgatgagctaataaagaatagaactgcaggttgcagaaggcgatataccgattgtagcctcacatgggtgagttagtatccagacagttccagaactggatctgtagatttaattgtaaatgtgataactttactcaccttattcagagcggaaactgagctttacaaggcacttgagccaggaattcgattagtgatcctgaaagccatatgtgatatacgcagtgagcaagaggacgttcggaacttcattgatagttctttgaagcatggttatcatctttccatcttccgtaaagaaaggattggaggagattcacatggaatctcatactggtatgaagatgacccaatccttgggcatcggttgtatcgtgaaattagacgagtggagcatgcgaaggactcaacaaaaaaatctaaaggaaagggagtttctactgttccggttatctcctataactgggaggctgtagcatccaactttgatgagtttaaagtagctgcagagaaactcttttcaagcaggaacaggacagaagtctctcttggcaagaagctgaagttcacttatcttccagagattgaaaagattcacaagaagaaggagaagttgctaaaaaagcaacaaagagaagccatcctccttgacagctgcttgacagtgaatggattgacatctggccgctctcgacgtgaaagaaaacatgtgacttatacttttgatgattatgagcgttcaataaatgaagccataaaaacaataagcgatgatgatatcatgggtgaagcagtctatgatgaggaatatcttagaagaaggaaacgatacaaggcaagcctttctgaaaatgatgatgagtttcagttggatcaagtcgccaatgatggtgatgatgaagtgggtacttctttgaatgttaatgaagacacaaaagatctccaatggtacaaaagatttccacttctcacccctcaagggaccaagttgaaatctattgatgaaatccaaactggcatccgacgcagtaagcgctccacccgttcccgtattaactatcgacagcttgatacttttggcgcaaatacaaaatatggaaagtcagagaaatgcaatgcatcagatccggatgctagttctgatgcactaaatgatacggagctctcaacaagtcaagatcgagaggaagaagacggagtaaacaaagcacaacagcagtacacagagaaaccaatcgttcctgtcaaggagagtagaagtgtccggagaaaattcctcgtcctaaatgagcttgtgcctatagctggttttgatgatgcttcagtcttagtgaaagataagcacgtgaataacaacggaggaaaatgttctgcagcacattagggcgttggggaagctctttttttttggtcacatgggtagcaaatactgggtagaactgctcgcttaagcatggaccaacgagaatccaatgagatggtgatgcaacattggtcttgtttgggcagactgctgcttactacttccagtgtcatgccagcgaggagatgagatggtccatgggtgctgtgtggctgaattcccagcccataaagccaagtccctctctgatacttggaggtcttgctgagatgtgcactaggcacaccgcgtcgattggcgctgtacaattgtcacagctgtacgtgtatctcctccatgtatatacagtgattgggagcaatagcgtcttctggtttcaggatgcctatgggtagttgtctcttcttccttttcccctcttctgagcatctgaagttcggcaataaactcgattcaactgtggcatttacttatttctgtatgcggtaattaatatcgctcgatcttacactact

SEQ ID NO: 11465 - DNA, 1216 bp, Zea Mays
tcttactctctctccaccgcaagtgtgcacactgcacagtgccactgaccactgcgagctctccctccagtttcacacaccctgatctgttcgcatcagtctcccggtcgcaagcgcctccgaaaccctagactcgcctcgcgagttgcttcgcttctcctgcccccgatggagccgtccccggcggtcgctgcggagctctggtgctcaccgcacctcgccgcgggcggcggccgcccgttggaggcgacctcggccgtcacggagaagagcagcggcggccgcggaggaggcggcgccgtccggaggaggccgagggagaccccggtgtccgaggatgactcgtcccggatcgtctccacttccggcggtggcggcggccaggatttgactgatctagaagcaaagcgttccaaaacaaataagtccagtaataataaaggcagtctaagaacagaggttgaaactgactcaagaagtgctggcaaggctgttagtaaaaacattccagcagcagagccaccaaaacaagattatatccatgtcagggcaaggaggggtcaagcaactgatagtcatagtcttgcagagagggcacgtcgtgagaaaataagtgaacgaatgaaagttctccaagatcttgtgcctggatgcaacaaggttattggcaaagcatcagtacttgatgagataattaattacatccagtcgttgcaatgtcaagttgagttcctgtccatgaaactagaggcagtgaatgcccaggcaaaccagggagttgaagtatttccagccaaagatacatacaacacagctcctgggctgacatttgatacgcaaaccagtagagaatacgcccagggcacgtcgacctcggaatggcttcacatgcagattggcagtggctatgaaagggtttcatgaacgagatgaatccaggcagccgctaaataaagtgaaccatgatcaatcatggccgtgcttgtagatcattctttttcattttttttgaaaccatcatgttccagacgcattttttattcatgcttggagctgtaattccagccggaacatgtatttttgatgaggcgctcatttgtttccccatctgaatctcaagactgtttctgctgttcatgtattccatggaatttctgtagatcgcgttcgtctgtcagaaggatgaataaatcagttgatgctttgattttgaatc

SEQ ID NO: 11466 - DNA, 466 bp, Zea Mays
atgcacctcttgtctgttcctcttcctccatgcaatgcaagtatgcaacgcaacgcatcttctgtttgctagccgccgctcccaacacgtcgctatcgccggcctcttcgggatttgaaaccgggttagaagctgaagctgaagctgaagcagggactgagacagcagcacagtctttgtttcggcaggaatgatatgtgcatctacgttgctcactgggggaataggacttgtgtggttgcttttgctgaaagattatagcatatcatcataggggaatgtgggagtggtgagggaaaaagagcgcatggcatcttttgctcatatgcgtcgtctccctttgttttttcttccctctccctgcgttttatccgttatcatttattttatattattatgaaaagtattgttttttctttctttctttcctgacctatcctacgtgaaaatatccaacaaaacatgg

SEQ ID NO: 11467 - DNA, 1065 bp, Zea Mays
cttagatggggcattacaatcatcttacattcctagaatcatgttttcacgacagctcttgatctttgaggacttggaagttcctagccacaagacgaaaaacattgtgcaatacattagacagatggatgactcaaagaaggttctgttggtggatggaggcgacattgataagaagctaaagctggccactcaaaaccttcactacgttaacgtacttccttccattggcctcaacgtctacagtatcctccagcatgacacccttgtaatgactcgggccgctatcaacagaatcgtcgagcggatgcatacccccatcaaccgctagcaaggagggtttctgagtcgcaccactgcttcttacagccagcaacctgtgctttttcgttccctgttaaagctcgaaggtttcctgttatcttggtgctaacatggagctgcaacgtgagctgtttattttctgtcagactggaggtaccgaccgaggtaggagggaaatgttgtggccttttgtaagcaggtcattggatgtttattttagattattttttggcgttttacccacactacccttgaaacttagtgagttcttatccagcaaataagattatgtaatcctggattatataggtccaaagcttgggacagcaatttgtttagagtcctgtataatctagctgtcacgtcgcaggactcacgtggagaaagatgaagggatttgcatcgtttagggtttagtaagtggcagcggattctgtatttacttggatttggtccattttcatagaagttggctgaaaacgaaaggtttggttggcagaagccaattctaagagacataagctaaaacaaataggcccatcatccatattaaataagctagattgtatatttttagaagcaaacaaataggccctattttaatctaaaattttactgtctacgctgtaaatctcgccgcaccttgatttcggtccgtccgtcgcagccgaagtatgaatttgatgttttttaaggtccaaacaagcacaacaactctattttgtcacgccaacaaaaaaa

SEQ ID NO: 11468 - DNA, 1570 bp, Zea Mays
gttcggatgcttggtctcttgtagaatgggaaatgggcctgcttcaggctggagttgtggtttagaatctgccaggtttctttttcaatgggtattctactcttttggctccaccaaatgaagtgttgattccaccagaactcctttctagcaggactgtgtggacaccagatcgggagcttgggcagtatgaagacctggtagctagggtcacaaacttccataatgaggacaagggcttcatggttttggatggcgatgtttttgatgttccaattaggaaggacattgttcaccgagtagtaaggtggcagcttgctaaaagacagcaggggacacactcaactaaaactatcagtgaagttagtggcactggaagaaagccttacccgcaaaaaggaaccggaaaagcacgacatggaacactgcgcggtgcccagtttcgtggtggtgcaaccatgcatgggcctaaacctcgaagccatgcaatcaagctgcagaagaaagtacggcggctggggcttaagattgccttgtctgctcgaactgctgaggggaagctcttgatctttgaggacttggaagttcctagccacaagacgaaaaacattgtgcaatacattagacagatggatgactcaaagaaggttctgttggtggatggaggcgacattgataagaagctaaagctggccactcaaaaccttcactacgttaacgtacttccttccattggcctcaacgtctacagtatcctccagcatgacacccttgtaatgactcgggccgctatcaacagaatcgtcgagcggatgcatacccccatcaaccgctagcaaggagggtttctgagtcgcaccactgcttcttacagccagcaacctgtgctttttcgttccctgttaaagctcgaaggtttcctgttatcttggtgctaacatggagctgcaacgtgagctgtttattttctgtcagactggaggtaccgaccgaggtaggagggaaatgttgtggccttttgtaagcaggtcattggatgtttattttagattattttttggcgttttacccacactacccttgaaacttagtgagttcttatccagcaaataagattatgtaatcctggattatataggtccaaagcttgggacagcaatttgtttagagtcctgtataatctagctgtcacgtcgcaggactcacgtggagaaagatgaagggatttgcatcgtttagggtttagtaagtggcagcggattctgtatttacttggatttggtccattttcatagaagttggctgaaaacgaaaggtttggttggcagaagccaattctaagagacataagctaaaacaaataggcccatcatccatattaaataagctagattgtatatttttagaagcaaacaaataggccctattttaatctaaaattttactgtctacgctgtaaatctcgccgcaccttgatttcggtccgtccgtcgcagccgaagtatgaatttgatgttttttaaggtccaaacaagcacaacaactctattttgtcacgccaacaaaaaaa

SEQ ID NO: 11469 - DNA, 1913 bp, Zea Mays
gtgggcttgagcgcgtgctgttgctgaaaggcccaagcgaacaagcaaaagggagggacagcccacgcggatcggtgtgcgtggctccgcgctcccttccgccgccagtccgccggctcaactccagccgccgcgtgcccctcctctccccacccgatgcgggccctcgcgcgcgccgcgtcgctgctccgccgcgccgcggggtccgcgcctactacggcgtcgctgtaccatccgccgcggaacgtaggcccttgcctcgtgaagaatctgccaggtttctttttcaatgggtattctactcttttggctccaccaaatgaagtgttgattccaccagaactcctttctagcaggactgtgtggacaccagatcgggagcttgggcagtatgaagacctggtagctagggtcacaaacttccataatgaggacaagggcttcatggttttggatggcgatgtttttgatgttccaattaggaaggacattgttcaccgagtagtaaggtggcagcttgctaaaagacagcaggggacacactcaactaaaactatcagtgaagttagtggcactggaagaaagccttacccgcaaaaaggaaccggaaaagcacgacatggaacactgcgcggtgcccagtttcgtggtggtgcaaccatgcatgggcctaaacctcgaagccatgcaatcaagctgcagaagaaagtacggcggctggggcttaagattgccttgtctgctcgaactgctgaggggaagggtacctgtgtgcctccgctaagcgcgcgcaaccattgctggagcaaacagcgcctgattctgccgctgcccaccagattccttatttcatcctgaagatgagctcctcctgtagtcctccaatcatcctccattttcttgctcttgatctttgaggacttggaagttcctagccacaagacgaaaaacattgtgcaatacattagacagatggatgactcaaagaaggttctgttggtggatggaggcgacattgataagaagctaaagctggccactcaaaaccttcactacgttaacgtacttccttccattggcctcaacgtctacagtatcctccagcatgacacccttgtaatgactcgggccgctatcaacagaatcgtcgagcggatgcatacccccatcaaccgctagcaaggagggtttctgagtcgcaccactgcttcttacagccagcaacctgtgctttttcgttccctgttaaagctcgaaggtttcctgttatcttggtgctaacatggagctgcaacgtgagctgtttattttctgtcagactggaggtaccgaccgaggtaggagggaaatgttgtggccttttgtaagcaggtcattggatgtttattttagattattttttggcgttttacccacactacccttgaaacttagtgagttcttatccagcaaataagattatgtaatcctggattatataggtccaaagcttgggacagcaatttgtttagagtcctgtataatctagctgtcacgtcgcaggactcacgtggagaaagatgaagggatttgcatcgtttagggtttagtaagtggcagcggattctgtatttacttggatttggtccattttcatagaagttggctgaaaacgaaaggtttggttggcagaagccaattctaagagacataagctaaaacaaataggcccatcatccatattaaataagctagattgtatatttttagaagcaaacaaataggccctattttaatctaaaattttactgtctacgctgtaaatctcgccgcaccttgatttcggtccgtccgtcgcagccgaagtatgaatttgatgttttttaaggtccaaacaagcacaacaactctattttgtcacgccaacaaaaaaa

SEQ ID NO: 11470 - DNA, 1767 bp, Zea Mays
gtgggcttgagcgcgtgctgttgctgaaaggcccaagcgaacaagcaaaagggagggacagcccacgcggatcggtgtgcgtggctccgcgctcccttccgccgccagtccgccggctcaactccagccgccgcgtgcccctcctctccccacccgatgcgggccctcgcgcgcgccgcgtcgctgctccgccgcgccgcggggtccgcgcctactacggcgtcgctgtaccatccgccgcggaacgtaggcccttgcctcgtgaagaatctgccaggtttctttttcaatgggtattctactcttttggctccaccaaatgaagtgttgattccaccagaactcctttctagcaggactgtgtggacaccagatcgggagcttgtatgaagacctggtagctagggtcacaaacttccataatgaggacaagggcttcatggttttggatggcgatgtttttgatgttccaattaggaaggacattgttcaccgagtagtaaggtggcagcttgctaaaagacagcaggggacacactcaactaaaactatcagtgaagttagtggcactggaagaaagccttacccgcaaaaaggaaccggaaaagcacgacatggaacactgcgcggtgcccagtttcgtggtggtgcaaccatgcatgggcctaaacctcgaagccatgcaatcaagctgcagaagaaagtacggcggctggggcttaagattgccttgtctgctcgaactgctgaggggaagctcttgatctttgaggacttggaagttcctagccacaagacgaaaaacattgtgcaatacattagacagatggatgactcaaagaaggttctgttggtggatggaggcgacattgataagaagctaaagctggccactcaaaaccttcactacgttaacgtacttccttccattggcctcaacgtctacagtatcctccagcatgacacccttgtaatgactcgggccgctatcaacagaatcgtcgagcggatgcatacccccatcaaccgctagcaaggagggtttctgagtcgcaccactgcttcttacagccagcaacctgtgctttttcgttccctgttaaagctcgaaggtttcctgttatcttggtgctaacatggagctgcaacgtgagctgtttattttctgtcagactggaggtaccgaccgaggtaggagggaaatgttgtggccttttgtaagcaggtcattggatgtttattttagattattttttggcgttttacccacactacccttgaaacttagtgagttcttatccagcaaataagattatgtaatcctggattatataggtccaaagcttgggacagcaatttgtttagagtcctgtataatctagctgtcacgtcgcaggactcacgtggagaaagatgaagggatttgcatcgtttagggtttagtaagtggcagcggattctgtatttacttggatttggtccattttcatagaagttggctgaaaacgaaaggtttggttggcagaagccaattctaagagacataagctaaaacaaataggcccatcatccatattaaataagctagattgtatatttttagaagcaaacaaataggccctattttaatctaaaattttactgtctacgctgtaaatctcgccgcaccttgatttcggtccgtccgtcgcagccgaagtatgaatttgatgttttttaaggtccaaacaagcacaacaactctattttgtcacgccaacaaaaaaa

SEQ ID NO: 11471 - DNA, 1859 bp, Zea Mays
gtgggcttgagcgcgtgctgttgctgaaaggcccaagcgaacaagcaaaagggagggacagcccacgcggatcggtgtgcgtggctccgcgctcccttccgccgccagtccgccggctcaactccagccgccgcgtgcccctcctctccccacccgatgcgggccctcgcgcgcgccgcgtcgctgctccgccgcgccgcggggtccgcgcctactacggcgtcgctgtaccatccgccgcggaacgtaggcccttgcctcgtgaagaatctgccaggtttctttttcaatgggtattctactcttttggctccaccaaatgaagtgttgattccaccagaactcctttctagcaggactgtgtggacaccagatcgggagcttgggcagtatgaagacctggtagctagggtcacaaacttccataatgaggacaagggcttcatggttttggatggcgatgtttttgatgttccaattaggaaggacattgttcaccgagtagtaaggtggcagcttgctaaaagacagcaggggacacactcaactaaaactatcagtgaagttagtggcactggaagaaagccttacccgcaaaaaggaaccggaaaagcacgacatggaacactgcgcggtgcccagtttcgtggtggtgcaaccatgcatgggcctaaacctcgaagccatgcaatcaagctgcagaagaaagtacggcggctggggcttaagattgccttgtctgctcgaactgctgaggggaaggctgttctcttagatggggcattacaatcatcttacattcctagaatcatgttttcacgacaggttcaattgttgccagattttactctcttgatctttgaggacttggaagttcctagccacaagacgaaaaacattgtgcaatacattagacagatggatgactcaaagaaggttctgttggtggatggaggcgacattgataagaagctaaagctggccactcaaaaccttcactacgttaacgtacttccttccattggcctcaacgtctacagtatcctccagcatgacacccttgtaatgactcgggccgctatcaacagaatcgtcgagcggatgcatacccccatcaaccgctagcaaggagggtttctgagtcgcaccactgcttcttacagccagcaacctgtgctttttcgttccctgttaaagctcgaaggtttcctgttatcttggtgctaacatggagctgcaacgtgagctgtttattttctgtcagactggaggtaccgaccgaggtaggagggaaatgttgtggccttttgtaagcaggtcattggatgtttattttagattattttttggcgttttacccacactacccttgaaacttagtgagttcttatccagcaaataagattatgtaatcctggattatataggtccaaagcttgggacagcaatttgtttagagtcctgtataatctagctgtcacgtcgcaggactcacgtggagaaagatgaagggatttgcatcgtttagggtttagtaagtggcagcggattctgtatttacttggatttggtccattttcatagaagttggctgaaaacgaaaggtttggttggcagaagccaattctaagagacataagctaaaacaaataggcccatcatccatattaaataagctagattgtatatttttagaagcaaacaaataggccctattttaatctaaaattttactgtctacgctgtaaatctcgccgcaccttgatttcggtccgtccgtcgcagccgaagtatgaatttgatgttttttaaggtccaaacaagcacaacaactctattttgtcacgccaacaaaaaaa

SEQ ID NO: 11472 - DNA, 5181 bp, Zea Mays
cccccctgcccgtggcctccgccccaattccagcgggacagcctcgatgagccgccaggatcgtcaccagtggcctcgccctaaccacggatacgaccctcgcgccgccgccgccgccgcgcaatgaatgttatccgttgaagatgacaaggatgcccattcattgtggaacacttgcattttacttcccttcagatcaaaatttagggagtgcactggtatgtgctccattgtgtctttgttttcagatctgcacccatctctactgctgttccttcatcgactaaaatgtatcaagtttaagaatttgtttgatgacacacttctgattatgagaagggagattcttggtgatggtattgtgagaatctcgcatgggattgagacaatgagttggttggtggtcagtaagaggctacaaggtaccattgtgcggcatgatgtgtgcaccacagagatagctgtggcgtttactttgcagcagactgaggaaggagattatgaaccttatttgaagcagcaacctgtgtttgcttttcttcctctaaggaattacggtcttaaattcattcttcaaggagattttgttttaccatcttccagagaggaagtggatgcggatagtgcatggaatcagtggttgttgtctgaattcccttctttgtttgtaagtgcccaagaatctttttgtgctcttccctgttttcagaggtgccctggaaaagctgtcacagccttcttgagttttattcctctagcaggagaggttcatggattcttcagccagcttccacacttgatcctttccaagttgcgtctgacccgctgcatgtttttggatggctctactgtgcaatgggtctatccatgcaacacacttaggggttgggatgaacaaactaaaatgttattttcagaaggcttacttcatgaacatcttggtcttggttacctctcaaaaaatattgttatatctgataagttatcaagagccctaggtattcatgactatggaccaaacattttgctagatgccatctcatctatttgccgaattgatggttgtattgagtcattgggcctggaatggctttgtgcttggtttgttaacctttatctgacattgctgtctcattcttctcaaaatgtttcctcagcaagaaacctcgaagacattcttttggataaagttaggaaaataccatgcatcccactttcagatggttcatttacctctatttcagatggtcgtatatggttgccatatgatgttgccagttccattcctgaatgcagtagcattccgaattttccagctctatatggtaatcttcgaactgtaagtccaaaccttctctctgcatgctgcaaaaataaatacctcatggaggaagtcagaataaatgatctggcagacatgctccaaaggatcggggtgcggaagttgtctgggcatgacattgttaaaaatcacatcatggtgtccttgcgtaacggtttagatgctaatgtggctgatatagtgattagagagtatgtgagctttattatggttcatcttcagtcttcttgcaccagctgtaactttgaaagaggagagatagtgtcagaactacggaagagtcctatcttccttacaaaccatggatacaagagcccagctgatgaaccaattcacttcagtaaagattatggaaattccgtggatgttactagactgcttcagaatgtagaaataagttggattgaacttgatagtagctatttgcagcatcatggttcacagtcgtcatcatttgcacgggaaaaatggaggcaattttttgaagaaatgggtgtgactgattttgtgcaggtagtgaaagttgaaaaaactttatcccaagttgattctattctagcaggaggactttctctagctgatgtatctacaaaacaatgtacagtgtatgactgggagtcaccagaattatctagaattttatcaatattttcttcaaaaagatgcaaggaaaattgtgtatatcttctggaagttcttgatagattctgggatgatcattatagtgcaaaatctaggatcttcacagatgctacacattgtggtgaaaacagagcagttgaatcatcatttatgaagtgcattcaaagcttcaaatggatagcatcaagaatggatgaggatcttcattatgcaacagatttattctatgattgtgaaaatgtccgctctctttttggtagtgtggctccatatgctgtaccgcaggtatctagcagttcacttaagaaggccattggattcaaaacagaggtatcttactgtgatgcattgatggtcctgaagtcttggataacgtcaaaggttccctttagagcaagtatgagccagatgtgcaaattctataccttcttgtctgaaggcgtggcagacgcaaagattgacattaaacgggagttcatgtcgtctccttctatatttacaccactacagcgtcctcgggcaagtgaggttattcctggaaggtttttggcgccagaagacctctattggcatgacccaacaggatgttctgaaataacagaggatttcgttgcaacgaaaaacagaagtatgttcccaagaaaaatgctgtctgcagcctatccaaacctttatgaattatttactctgacatgcggtgtaccaaaggccccaacaacatcaaattatgttgagatgctgctacggttgtcaaccattgcattgccttcacaggcaggaaaccatgtcttttgtgtatttgtgagatgggccaagtgtatgcattctgaaagtgacaagatgaatgatatattgtacttgaaagaatcccttcagaaattagaaacaacaatattgcccacctcagccgataaatgggtctctctacatccttcttttggccttgtttgctgggtagatgatgatgagctaaagcaacagtttgttaactctaatgatgtttacttcatacaatttggcgacctttcttctgaggataagcaaatgttgtatggaagagttgctgctttaatgaaaagcttaggcatccaagcactttcaaaggttgtgtatcgtgaagcaatattttatggtacatcagagaacagagaaaaggtttccttgatttgttggctgttgccatacatgcaacgttacatctataagatgcatagagatacttatatcaacttccagaaaaacgacatcatgaagattagcaacctgcaagtagtagttgttgacaagttattccacaagtatgtactgaggggactcgagagttcttctaagaaaagattccaatgtcattgtcttttgcagggagatactctatatgcaacacaagaggctgactcacattcagtatttttggagctttctagaattttctttgatggatcccatgatcttcattttgcaaattttctacacatgatcaaaaccatggccgaatctggcactcatgctgagcaaatagagacttttatcgttaataatcagaatgtgcctgagttacctgagcatgaagctatctggtccttctcttccttgtctgcagccaaacatggttcagcgaaccaaggtggtgctgatacccagggggttgatttccaacctgtccatgaatttagtattcccaatcatcagaaggcacaggtgatggtttctagttggcctctaaactattggagaacagcacccgtcttcagaacacctctcataaaccagcatgcaagcatgcaagaggcaaaggtgaatgatgctggaccttcatcaaacttaaacatgcctgctatgtatggacacaccgaagatagtttgctttctgctgatcttgaaagggattggattatagaagagaatccaagaactgaaactacattgtttggagatagttcatcggaaatccttgatgagcctcagatggtgatgtctgctgaacctttccatgcacctgcttatttgaacttggaggctggaaattcaagcccaacggttcatgtcgagctaacaaattccgatgagaaactggccaatcttgcagaagacaagaatcagcgactttcagatgcaaaccagttaagaacagggaggcttggtgaagaactggtcgagaaatatttggccaaacagctaggttccaacaatgttaggtgggtgaacaacagaattgaaaccggactgccttatgatattgttataacacacccagagggtttcacagagtatgtggaggttaaaacaactgtatcttcaagaaaagattggtttgacgtctcagcaagggaatggcagtttgccttggagaaaggggattcatttagcattgctcgtgtcatcttaggtacaaagaaagcaagtatagaaatgttgaaaaacccacacaagctttgtaagcagaaagcattgcggcttgctctcctgatatccagatcggcagcaacctagactaaaatgtcggttttgttgaggctagcaccgatcatccttctgcagattgttatgattactctgactaataatcaacatgaactggagtgagcatctgcatcttgataggtatttgctgatccaagttagcagattcttctttttggagagagatggggtaccgggtacggcatgagtgcaagacaacatacagttgagccgctctatagtaggctcctctttctattattctaactcgggtaatcttctccaatggcggctctctaccatgtctcttgttacatacaacttacgctctgcctttgtaacccattctggtattttgttgcataatgtatgtgattttgtcattagatttgtttttcaatttctgccctagacatcgtcccataggttgattgtgtaactaaacatgaaactgtacataaatggatggaatttgattttaccatgtacatgaaatttgattttgcgtgcggcggctgcctggtctgtgcgttctggtctctgtgcgcagggcgcggcatctgcccggcagcctgctcgccggctgctcggtgagaaaattggctagttgggtactggttttttttttcaattgataaaaaaacaggatctgatggagccttttcatttttgttttactttccgtctcttttatcagcagttgaaaggcgatcacttattctcaatttggtggaatc

SEQ ID NO: 11473 - DNA, 9162 bp, Zea Mays
cccccctgcccgtggcctccgccccaattccagcgggacagcctcgatgagccgccaggatcgtcaccagtggcctcgccctaaccacggatacgaccctcgcgccgccgccgccgccgcgcaatggtatggcgccgcttcgatgctgtttcccgaccccggcgcggcggcgctgcacgggataaacccctacggcttcgcccctaaccctttcttcaataacttcctcccccagaactccgctgccctagctgcctaccaactgcagcagcagcaggctcatcacttcgcctcccatgcctaccaccaagcccctaccggtaacaccatgcaccgctctaccaaacccgccgccgctgccaaacctgcgccgccaccgggcaaccagcaggccgtgctggaccgggctcaagaggcggcgaggaaggctcgggaggagctcgtgaagggtggggacggcgtcacggcgtggaaggtggcgcaggcggtgctggtggcgctcaaggctgattcgtgggactccctcggcgtccagccccaggatgtgcctctcctgcgggatctcttcctaatcgagggcaaggtgaacgcattcatccattgctatgttgcagcaagaaaaattgtaacggtttatgatctggaggttgagatatgcaagaatgagggggttgtgcaatttgaagagctgggattgggacctttccttcagcacccgcttgttgcacattattttttagtgccagctgatttgtctgtggtgcctaagctttgtagcgaggaaattatcaataccctgctgaaatttgtggacaaatctaagaaaaaaatcacaattgaagattttttgaaccatcttgcagagaaaaaatcagtctctgggaaggaaaaacttggtgtgcgggtacaaagcttggggttgcatatttccttactacgacaggccaagcaaacagaagtgtctgctgcgaagcttcgagcaaatatgagtggatctggtaatagtagtcaggagaaggatttgttgaaaaatgcaagtttccatactcacaagaaggctttggacaagaggttcatttctttaactaatcgtataaaagagttaccaggcatcaataagcatatccattttgattcgaccgatgatgaaactaatagttgtactggttctgaggatggtaaatctgatggcaatgagaatgagaatgaatgttctattcttgacaaaaaggatggtgataagcgtgtgaatagctgcccatatccgtcaaaaactgaagaactggaaaggcttggtttgaaatctgaaattaataaaaggcaatctttagagaatagcaagccaagagacagtgggaaaaaggggaaagtaagtgaaaaaagaaaatatgaagaaatcgggagtcctagctgttcgttcaagcagcctaagaagcagcaaaagttgcaaaaacatgaagcatcaccgaaatgtttcctaagtataggtaagctggaaaattttgtaacaacatggaaggaaacatgtcgtgaacatccagttcaacaggttttggaaatgttagcaaattactatgggagaacgatatcagggaagaggagaattagaaatttcttctcacagtacccaggcattggccttctcaatgttgctgttaaatcaatgggatgtggtctgctggatagcatttacgatgtgatacagcttgctgatgagaatgatgtagcttcaagccctcctcctaacaccaccactgaagttatggaaattgagcctccaagtgttgctattgatgatgtcatcaggaggatttcagaatatattgaatccaacagtaaaatctctggtgatgtggctttgcaagtgagggcacttaatgattgtgaaacatgggtaactactcaattttcagcaaatcaattcagtgctcttggccatgggacattccttgagtttttggacaaacattgtcaccagttccgaactgctttgagtagtttctttaaggagggtccttctaattcttcatctctggaagtttctgtactgcagcagcaaattgaatttttactctgtcaagctgagagtaattggctggaagatagtgacttttcagaggatagttttgttatgcttcttaaaaagcaatttccaacaataagctttaatattgtgcaagacaaatctgatggtggagtttctggctttattgaggggcagaagaaagacatacggacatatagtttaaaattttccatctctttgttggagaaacgatggtctggaactttgccaagtagacatgggaatgttgatgaactggggaacattgtcgctgaacaatcttgttaccataccacagtttgctcacgagaggcaattaattgtttactgagggctcctatgctgtctgatctgcatctttggtcccattgggattcgctatttgctcctacactgggctcctttgtacattggttgctgaatactggtccaattcaagagctcgcatgcattgcgaccacagatggtaggtttattagagtagattcatcagccacagttgaccagtttctggaagctattatccatcgatcaccacttcaagtggcagtgaaactgctttcacttctatacatttacaatggttctatgaacaccccaatgtcattgctaaaatgttatgcacagcgagcaataaagctcatagtagataacaacaatgatttgatgaatgctaaatctgaaaacaaaatatttatgcctgatgagccccaaaacctaagtagtgaaagctctacttgttttgctgatcagtgtcaagaaagctctcaggcgtctcctggaaggttgatcaggtctgatagcttgccaaacattaataacactgttcatttgatcacaaaatttgtacttgattgtcttgatcatctaccttcagaattccgtagtcttgcagcagacatactattggcaggatttcgggttgttactaagaactggcatgcagttatgttgcatgaagccactgaaaacgggcagctttgcatgcttcatgatattggtttgtcacttggagttgtagaatgggttgaagattgccataggttgtgtttaactgatgaagttcatgtgcagacagaaatgcattcttctgccaagcttgcaacacctgcctctgtgggagccacccatgaagattctaacatgcatatttctagtgatgttaatatgatggataagagaaaacaattgtttcctgtcataaatgatcgggctggtatagataaggaagacaataagatgttaaatcctgctggaactgaggcagatgttgcagaactacatactaccagcagatcttctatgatggaagaaacaagtcttgaggaagcatctcttgttattgagactatacgccgtgaagagtttggtctggatcaggcactaagtgacactgagaatagcttgttaaagaagcagcatgctcgacttggcagagcattgcattgcctttcacaagaattatattcccaggattctcatctacttcttgagctgaatgctgacgacaatacatatcctgaggatgttgaagcaacattagcattcattctccaagaggatggtattgctgttctaaacaatgagaggggcttctctgctgagaacattagagcactctgtgatattggtaactcgacaaagaaaggatcaaaccagggttatattggaaataaaggcattggatttaaatcagttttccgggtaactgatgctccggagatccattcaaatggtttccatgtgaaatttgatatcacagatggccagattggttttgtgttgccaactgcagttccaccttacagtaccacttcttttagtagaatgttatccgttgaagatgacaaggatgcccattcattgtggaacacttgcattttacttcccttcagatcaaaatttagggagtgcactggtatgtgctccattgtgtctttgttttcagatctgcacccatctctactgctgttccttcatcgactaaaatgtatcaagtttaagaatttgtttgatgacacacttctgattatgagaagggagattcttggtgatggtattgtgagaatctcgcatgggattgagacaatgagttggttggtggtcagtaagaggctacaaggtaccattgtgcggcatgatgtgtgcaccacagagatagctgtggcgtttactttgcagcagactgaggaaggagattatgaaccttatttgaagcagcaacctgtgtttgcttttcttcctctaaggaattacggtcttaaattcattcttcaaggagattttgttttaccatcttccagagaggaagtggatgcggatagtgcatggaatcagtggttgttgtctgaattcccttctttgtttgtaagtgcccaagaatctttttgtgctcttccctgttttcagaggtgccctggaaaagctgtcacagccttcttgagttttattcctctagcaggagaggttcatggattcttcagccagcttccacacttgatcctttccaagttgcgtctgacccgctgcatgtttttggatggctctactgtgcaatgggtctatccatgcaacacacttaggggttgggatgaacaaactaaaatgttattttcagaaggcttacttcatgaacatcttggtcttggttacctctcaaaaaatattgttatatctgataagttatcaagagccctaggtattcatgactatggaccaaacattttgctagatgccatctcatctatttgccgaattgatggttgtattgagtcattgggcctggaatggctttgtgcttggtttgttaacctttatctgacattgctgtctcattcttctcaaaatgtttcctcagcaagaaacctcgaagacattcttttggataaagttaggaaaataccatgcatcccactttcagatggttcatttacctctatttcagatggtcgtatatggttgccatatgatgttgccagttccattcctgaatgcagtagcattccgaattttccagctctatatggtaatcttcgaactgtaagtccaaaccttctctctgcatgctgcaaaaataaatacctcatggaggaagtcagaataaatgatctggcagacatgctccaaaggatcggggtgcggaagttgtctgggcatgacattgttaaaaatcacatcatggtgtccttgcgtaacggtttagatgctaatgtggctgatatagtgattagagagtatgtgagctttattatggttcatcttcagtcttcttgcaccagctgtaactttgaaagaggagagatagtgtcagaactacggaagagtcctatcttccttacaaaccatggatacaagagcccagctgatgaaccaattcacttcagtaaagattatggaaattccgtggatgttactagactgcttcagaatgtagaaataagttggattgaacttgatagtagctatttgcagcatcatggttcacagtcgtcatcatttgcacgggaaaaatggaggcaattttttgaagaaatgggtgtgactgattttgtgcaggtagtgaaagttgaaaaaactttatcccaagttgattctattctagcaggaggactttctctagctgatgtatctacaaaacaatgtacagtgtatgactgggagtcaccagaattatctagaattttatcaatattttcttcaaaaagatgcaaggaaaattgtgtatatcttctggaagttcttgatagattctgggatgatcattatagtgcaaaatctaggatcttcacagatgctacacattgtggtgaaaacagagcagttgaatcatcatttatgaagtgcattcaaagcttcaaatggatagcatcaagaatggatgaggatcttcattatgcaacagatttattctatgattgtgaaaatgtccgctctctttttggtagtgtggctccatatgctgtaccgcaggtatctagcagttcacttaagaaggccattggattcaaaacagaggtatcttactgtgatgcattgatggtcctgaagtcttggataacgtcaaaggttccctttagagcaagtatgagccagatgtgcaaattctataccttcttgtctgaaggcgtggcagacgcaaagattgacattaaacgggagttcatgtcgtctccttctatatttacaccactacagcgtcctcgggcaagtgaggttattcctggaaggtttttggcgccagaagacctctattggcatgacccaacaggatgttctgaaataacagaggatttcgttgcaacgaaaaacagaagtatgttcccaagaaaaatgctgtctgcagcctatccaaacctttatgaattatttactctgacatgcggtgtaccaaaggccccaacaacatcaaattatgttgagatgctgctacggttgtcaaccattgcattgccttcacaggcaggaaaccatgtcttttgtgtatttgtgagatgggccaagtgtatgcattctgaaagtgacaagatgaatgatatattgtacttgaaagaatcccttcagaaattagaaacaacaatattgcccacctcagccgataaatgggtctctctacatccttcttttggccttgtttgctgggtagatgatgatgagctaaagcaacagtttgttaactctaatgatgtttacttcatacaatttggcgacctttcttctgaggataagcaaatgttgtatggaagagttgctgctttaatgaaaagcttaggcatccaagcactttcaaaggttgtgtatcgtgaagcaatattttatggtacatcagagaacagagaaaaggtttccttgatttgttggctgttgccatacatgcaacgttacatctataagatgcatagagatacttatatcaacttccagaaaaacgacatcatgaagattagcaacctgcaagtagtagttgttgacaagttattccacaagtatgtactgaggggactcgagagttcttctaagaaaagattccaatgtcattgtcttttgcagggagatactctatatgcaacacaagaggctgactcacattcagtatttttggagctttctagaattttctttgatggatcccatgatcttcattttgcaaattttctacacatgatcaaaaccatggccgaatctggcactcatgctgagcaaatagagacttttatcgttaataatcagaatgtgcctgagttacctgagcatgaagctatctggtccttctcttccttgtctgcagccaaacatggttcagcgaaccaaggtggtgctgatacccagggggttgatttccaacctgtccatgaatttagtattcccaatcatcagaaggcacaggtgatggtttctagttggcctctaaactattggagaacagcacccgtcttcagaacacctctcataaaccagcatgcaagcatgcaagaggcaaaggtgaatgatgctggaccttcatcaaacttaaacatgcctgctatgtatggacacaccgaagatagtttgctttctgctgatcttgaaagggattggattatagaagagaatccaagaactgaaactacattgtttggagatagttcatcggaaatccttgatgagcctcagatggtgatgtctgctgaacctttccatgcacctgcttatttgaacttggaggctggaaattcaagcccaacggttcatgtcgagctaacaaattccgatgagaaactggccaatcttgcagaagacaagaatcggcgactttcagatgcaagccagttaagaacaggttcaaacccaatggttgatgttgagctaacaaatttcgatgagaaactggccaatcttgcagaaggcaagaatcagcgactttcagatgcaagccagttaagaacaggttcaaacccaatggttgatgttgagctaacaaatttcgatgagaaactggccattcttgcagaagacaagaatcagcgactttcagatgcaaaccagttaagaacagggaggcttggtgaagaactggtcgagaaatatttggccaaacagctaggttccaacaatgttaggtgggtgaacaacagaattgaaaccggactgccttatgatattgttataacacacccagagggtttcacagagtatgtggaggttaaaacaactgtatcttcaagaaaagattggtttgacgtctcagcaagggaatggcagtttgccttggagaaaggggattcatttagcattgctcgtgtcatcttaggtacaaagaaagcaagtatagaaatgttgaaaaacccacacaagctttgtaagcagaaagcattgcggcttgctctcctgatatccagatcggcagcaacctagactaaaatgtcggttttgttgaggctagcaccgatcatccttctgcagattgttatgattactctgactaataatcaacatgaactggagtgagcatctgcatcttgataggtatttgctgatccaagttagcagattcttctttttggagagagatggggtaccgggtacggcatgagtgcaagacaacatacagttgagccgctctatagtaggctcctctttctattattctaactcgggtaatcttctccaatggcggctctctaccatgtctcttgttacatacaacttacgctctgcctttgtaacccattctggtattttgttgcataatgtatgtgattttgtcattagatttgtttttcaatttctgccctagacatcgtcccataggttgattgtgtaactaaacatgaaactgtacataaatggatggaatttgattttaccatgtacatgaaatttgattttgcgtgcggcggctgcctggtctgtgcgttctggtctctgtgcgcagggcgcggcatctgcccggcagcctgctcgccggctgctcggtgagaaaattggctagttgggtactggttttttttttcaattgataaaaaaacaggatctgatggagccttttcatttttgttttactttccgtctcttttatcagcagttgaaaggcgatcacttattctcaatttggtggaatc

SEQ ID NO: 11474 - DNA, 8524 bp, Zea Mays
cccccctgcccgtggcctccgccccaattccagcgggacagcctcgatgagccgccaggatcgtcaccagtggcctcgccctaaccacggatacgaccctcgcgccgccgccgccgccgcgcaatggtatggcgccgcttcgatgctgtttcccgaccccggcgcggcggcgctgcacgggataaacccctacggcttcgcccctaaccctttcttcaataacttcctcccccagaactccgctgccctagctgcctaccaactgcagcagcagcaggctcatcacttcgcctcccatgcctaccaccaagcccctaccggtaacaccatgcaccgctctaccaaacccgccgccgctgccaaacctgcgccgccaccgggcaaccagcaggccgtgctggaccgggctcaagaggcggcgaggaaggctcgggaggagctcgtgaagggtggggacggcgtcacggcgtggaaggtggcgcaggcggtgctggtggcgctcaaggctgattcgtgggactccctcggcgtccagccccaggatgtgcctctcctgcgggatctcttcctaatcgagggcaaggtgaacgcattcatccattgctatgttgcagcaagaaaaattgtaacggtttatgatctggaggttgagatatgcaagaatgagggggttgtgcaatttgaagagctgggattgggacctttccttcagcacccgcttgttgcacattattttttagtgccagctgatttgtctgtggtgcctaagctttgtagcgaggaaattatcaataccctgctgaaatttgtggacaaatctaagaaaaaaatcacaattgaagattttttgaaccatcttgcagagaaaaaatcagtctctgggaaggaaaaacttggtgtgcgggtacaaagcttgggaaaggccattccattttttactaatttagggaggttttgtaggttgcatatttccttactacgacaggccaagcaaacagaagtgtctgctgcgaagcttcgagcaaatatgagtggatctggtaatagtagtcaggagaaggatttgttgaaaaatgcaagtttccatactcacaagaaggctttggacaagaggttcatttctttaactaatcgtataaaagagttaccaggcatcaataagcatatccattttgattcgaccgatgatgaaactaatagttgtactggttctgaggatggtaaatctgatggcaatgagaatgagaatgaatgttctattcttgacaaaaaggatggtgataagcgtgtgaatagctgcccatatccgtcaaaaactgaagaactggaaaggcttggtttgaaatctgaaattaataaaaggcaatctttagagaatagcaagccaagagacagtgggaaaaaggggaaagttttggaaatgttagcaaattactatgggagaacgatatcagggaagaggagaattagaaatttcttctcacagtacccaggcattggccttctcaatgttgctgttaaatcaatgggatgtggtctgctggatagcatttacgatgtgatacagcttgctgatgagaatgatgtagcttcaagccctcctcctaacaccaccactgaagttatggaaattgagcctccaagtgttgctattgatgatgtcatcaggaggatttcagaatatattgaatccaacagtaaaatctctggtgatgtggctttgcaagtgagggcacttaatgattgtgaaacatgggtaactactcaattttcagcaaatcaattcagtgctcttggccatgggacattccttgagtttttggacaaacattgtcaccagttccgaactgctttgagtagtttctttaaggagggtccttctaattcttcatctctggaagtttctgtactgcagcagcaaattgaatttttactctgtcaagctgagagtaattggctggaagatagtgacttttcagaggatagttttgttatgcttcttaaaaagcaatttccaacaataagctttaatattgtgcaagacaaatctgatggtggagtttctggctttattgaggggcagaagaaagacatacggacatatagtttaaaattttccatctctttgttggagaaacgatggtctggaactttgccaagtagacatgggaatgttgatgaactggggaacattgtcgctgaacaatcttgttaccataccacagtttgctcacgagaggcaattaattgtttactgagggctcctatgctgtctgatctgcatctttggtcccattgggattcgctatttgctcctacactgggctcctttgtacattggttgctgaatactggtccaattcaagagctcgcatgcattgcgaccacagatggtaggtttattagagtagattcatcagccacagttgaccagtttctggaagctattatccatcgatcaccacttcaagtggcagtgaaactgctttcacttctatacatttacaatggttctatgaacaccccaatgtcattgctaaaatgttatgcacagcgagcaataaagctcatagtagataacaacaatgatttgatgaatgctaaatctgaaaacaaaatatttatgcctgatgagccccaaaacctaagtagtgaaagctctacttgttttgctgatcagtgtcaagaaagctctcaggcgtctcctggaaggttgatcaggtctgatagcttgccaaacattaataacactgttcatttgatcacaaaatttgtacttgattgtcttgatcatctaccttcagaattccgtagtcttgcagcagacatactattggcaggatttcgggttgttactaagaactggcatgcagttatgttgcatgaagccactgaaaacgggcagctttgcatgcttcatgatattggtttgtcacttggagttgtagaatgggttgaagattgccataggttgtgtttaactgatgaagttcatgtgcagacagaaatgcattcttctgccaagcttgcaacacctgcctctgtgggagccacccatgaagattctaacatgcatatttctagtgatgttaatatgatggataagagaaaacaattgtttcctgtcataaatgatcgggctggtatagataaggaagacaataagatgttaaatcctgctggaactgaggcagatgttgcagaactacatactaccagcagatcttctatgatggaagaaacaagtcttgaggaagcatctcttgttattgagactatacgccgtgaagagtttggtctggatcaggcactaagtgacactgagaatagcttgttaaagaagcagcatgctcgacttggcagagcattgcattgcctttcacaagaattatattcccaggattctcatctacttcttgagctggtacagaatgctgacgacaatacatatcctgaggatgttgaagcaacattagcattcattctccaagaggatggtattgctgttctaaacaatgagaggggcttctctgctgagaacattagagcactctgtgatattggtaactcgacaaagaaaggatcaaaccagggttatattggaaataaaggcattggatttaaatcagttttccgggtaactgatgctccggagatccattcaaatggtttccatgtgaaatttgatatcacagatggccagattggttttgtgttgccaactgcagttccaccttacagtaccacttcttttagtagaatgttatccgttgaagatgacaaggatgcccattcattgtggaacacttgcattttacttcccttcagatcaaaatttagggagtgcactgatctgcacccatctctactgctgttccttcatcgactaaaatgtatcaagtttaagaatttgtttgatgacacacttctgattatgagaagggagattcttggtgatggtattgtgagaatctcgcatgggattgagacaatgagttggttggtggtcagtaagaggctacaaggtaccattgtgcggcatgatgtgtgcaccacagagatagctgtggcgtttactttgcagcagactgaggaaggagattatgaaccttatttgaagcagcaacctgtgtttgcttttcttcctctaaggaattacggtcttaaattcattcttcaaggagattttgttttaccatcttccagagaggaagtggatgcggatagtgcatggaatcagtggttgttgtctgaattcccttctttgtttgtaagtgcccaagaatctttttgtgctcttccctgttttcagaggtgccctggaaaagctgtcacagccttcttgagttttattcctctagcaggagaggttcatggattcttcagccagcttccacacttgatcctttccaagttgcgtctgacccgctgcatgtttttggatggctctactgtgcaatgggtctatccatgcaacacacttaggggttgggatgaacaaactaaaatgttattttcagaaggcttacttcatgaacatcttggtcttggttacctctcaaaaaatattgttatatctgataagttatcaagagccctaggtattcatgactatggaccaaacattttgctagatgccatctcatctatttgccgaattgatggttgtattgagtcattgggcctggaatggctttgtgcttggtttgttaacctttatctgacattgctgtctcattcttctcaaaatgtttcctcagcaagaaacctcgaagacattcttttggataaagttaggaaaataccatgcatcccactttcagatggttcatttacctctatttcagatggtcgtatatggttgccatatgatgttgccagttccattcctgaatgcagtagcattccgaattttccagctctatatggtaatcttcgaactgtaagtccaaaccttctctctgcatgctgcaaaaataaatacctcatggaggaagtcagaataaatgatctggcagacatgctccaaaggatcggggtgcggaagttgtctgggcatgacattgttaaaaatcacatcatggtgtccttgcgtaacggtttagatgctaatgtggctgatatagtgattagagagtatgtgagctttattatggttcatcttcagtcttcttgcaccagctgtaactttgaaagaggagagatagtgtcagaactacggaagagtcctatcttccttacaaaccatggatacaagagcccagctgatgaaccaattcacttcagtaaagattatggaaattccgtggatgttactagactgcttcagaatgtagaaataagttggattgaacttgatagtagctatttgcagcatcatggttcacagtcgtcatcatttgcacgggaaaaatggaggcaattttttgaagaaatgggtgtgactgattttgtgcagagcagttgaatcatcatttatgaagtgcattcaaagcttcaaatggatagcatcaagaatggatgaggatcttcattatgcaacagatttattctatgattgtgaaaatgtccgctctctttttggtagtgtggctccatatgctgtaccgcaggtatctagcagttcacttaagaaggccattggattcaaaacagaggtatcttactgtgatgcattgatggtcctgaagtcttggataacgtcaaaggttccctttagagcaagtatgagccagatgtgcaaattctataccttcttgtctgaaggcgtggcagacgcaaagattgacattaaacgggagttcatgtcgtctccttctatatttacaccactacagcgtcctcgggcaagtgaggttattcctggaaggtttttggcgccagaagacctctattggcatgacccaacaggatgttctgaaataacagaggatttcgttgcaacgaaaaacagaagtatgttcccaagaaaaatgctgtctgcagcctatccaaacctttatgaattatttactctgacatgcggtgtaccaaaggccccaacaacatcaaattatgttgagatgctgctacggttgtcaaccattgcattgccttcacaggcaggaaaccatgtcttttgtgtatttgtgagatgggccaagtgtatgcattctgaaagtgacaagatgaatgatatattgtacttgaaagaatcccttcagaaattagaaacaacaatattgcccacctcagccgataaatgggtctctctacatccttcttttggccttgtttgctgggtagatgatgatgagctaaagcaacagtttgttaactctaatgatgtttacttcatacaatttggcgacctttcttctgaggataagcaaatgttgtatggaagagttgctgctttaatgaaaagcttaggcatccaagcactttcaaaggttgtgtatcgtgaagcaatattttatggtacatcagagaacagagaaaaggtttccttgatttgttggctgttgccatacatgcaacgttacatctataagatgcatagagatacttatatcaacttccagaaaaacgacatcatgaagattagcaacctgcaagtagtagttgttgacaagttattccacaagtatgtactgaggggactcgagagttcttctaagaaaagattccaatgtcattgtcttttgcagggagatactctatatgcaacacaagaggctgactcacattcagtatttttggagctttctagaattttctttgatggatcccatgatcttcattttgcaaattttctacacatgatcaaaaccatggccgaatctggcactcatgctgagcaaatagagacttttatcgttaataatcagaatgtgcctgagttacctgagcatgaagctatctggtccttctcttccttgtctgcagccaaacatggttcagcgaaccaaggtggtgctgatacccagggggttgatttccaacctgtccatgaatttagtattcccaatcatcagaaggcacaggtgatggtttctagttggcctctaaactattggagaacagcacccgtcttcagaacacctctcataaaccagcatgcaagcatgcaagaggcaaaggtgaatgatgctggaccttcatcaaacttaaacatgcctgctatgtatggacacaccgaagatagtttgctttctgctgatcttgaaagggattggattatagaagagaatccaagaactgaaactacattgtttggagatagttcatcggaaatccttgatgagcctcagatggtgatgtctgctgaacctttccatgcacctgcttatttgaacttggaggctggaaattcaagcccaacggttcatgtcgagctaacaaattccgatgagaaactggccaatcttgcagaagacaagaatcagcgactttcagatgcaaaccagttaagaacagggaggcttggtgaagaactggtcgagaaatatttggccaaacagctaggttccaacaatgttaggtgggtgaacaacagaattgaaaccggactgccttatgatattgttataacacacccagagggtttcacagagtatgtggaggttaaaacaactgtatcttcaagaaaagattggtttgacgtctcagcaagggaatggcagtttgccttggagaaaggggattcatttagcattgctcgtgtcatcttaggtacaaagaaagcaagtatagaaatgttgaaaaacccacacaagctttgtaagcagaaagcattgcggcttgctctcctgatatccagatcggcagcaacctagactaaaatgtcggttttgttgaggctagcaccgatcatccttctgcagattgttatgattactctgactaataatcaacatgaactggagtgagcatctgcatcttgataggtatttgctgatccaagttagcagattcttctttttggagagagatggggtaccgggtacggcatgagtgcaagacaacatacagttgagccgctctatagtaggctcctctttctattattctaactcgggtaatcttctccaatggcggctctctaccatgtctcttgttacatacaacttacgctctgcctttgtaacccattctggtattttgttgcataatgtatgtgattttgtcattagatttgtttttcaatttctgccctagacatcgtcccataggttgattgtgtaactaaacatgaaactgtacataaatggatggaatttgattttaccatgtacatgaaatttgattttgcgtgcggcggctgcctggtctgtgcgttctggtctctgtgcgcagggcgcggcatctgcccggcagcctgctcgccggctgctcggtgagaaaattggctagttgggtactggttttttttttcaattgataaaaaaacaggatctgatggagccttttcatttttgttttactttccgtctcttttatcagcagttgaaaggcgatcacttattctcaatttggtggaatc

SEQ ID NO: 11475 - DNA, 8813 bp, Zea Mays
atccagaagagacccaattgcccagggccgccgccgcgccgacctcgccgtcgcgcgctttgcttctcttgcccccctgcccgtggcctccgccccaattccagcgggacagcctcgatgagccgccaggatcgtcaccagtggcctcgccctaaccacggatacgaccctcgcgccgccgccgccgccgcgcaatggtatggcgccgcttcgatgctgtttcccgaccccggcgcggcggcgctgcacgggataaacccctacggcttcgcccctaaccctttcttcaataacttcctcccccagaactccgctgccctagctgcctaccaactgcagcagcagcaggctcatcacttcgcctcccatgcctaccaccaagcccctaccggtaacaccatgcaccgctctaccaaacccgccgccgctgccaaacctgcgccgccaccgggcaaccagcaggccgtgctggaccgggctcaagaggcggcgaggaaggctcgggaggagctcgtgaagggtggggacggcgtcacggcgtggaaggtggcgcaggcggtgctggtggcgctcaaggctgattcgtgggactccctcggcgtccagccccaggatgtgcctctcctgcgggatctcttcctaatcgagggcaaggtgaacgcattcatccattgctatgttgcagcaagaaaaattgtaacggtttatgatctggaggttgagatatgcaagaatgagggggttgtgcaatttgaagagctgggattgggacctttccttcagcacccgcttgttgcacattattttttagtgccagctgatttgtctgtggtgcctaagctttgtagcgaggaaattatcaataccctgctgaaatttgtggacaaatctaagaaaaaaatcacaattgaagattttttgaaccatcttgcagagaaaaaatcagtctctgggaaggaaaaacttggtgtgcgggtacaaagcttggggttgcatatttccttactacgacaggccaagcaaacagaagtgtctgctgcgaagcttcgagcaaatatgagtggatctggtaatagtagtcaggagaaggatttgttgaaaaatgcaagtttccatactcacaagaaggctttggacaagaggttcatttctttaactaatcgtataaaagagttaccaggcatcaataagcatatccattttgattcgaccgatgatgaaactaatagttgtactggttctgaggatggtaaatctgatggcaatgagaatgagaatgaatgttctattcttgacaaaaaggatggtgataagcgtgtgaatagctgcccatatccgtcaaaaactgaagaactggaaaggcttggtttgaaatctgaaattaataaaaggcaatctttagagaatagcaagccaagagacagtgggaaaaaggggaaagttttggaaatgttagcaaattactatgggagaacgatatcagggaagaggagaattagaaatttcttctcacagtacccaggcattggccttctcaatgttgctgttaaatcaatgggatgtggtctgctggatagcatttacgatgtgatacagcttgctgatgagaatgatgtagcttcaagccctcctcctaacaccaccactgaagttatggaaattgagcctccaagtgttgctattgatgatgtcatcaggaggatttcagaatatattgaatccaacagtaaaatctctggtgatgtggctttgcaagtgagggcacttaatgattgtgaaacatgggtaactactcaattttcagcaaatcaattcagtgctcttggccatgggacattccttgagtttttggacaaacattgtcaccagttccgaactgctttgagtagtttctttaaggagggtccttctaattcttcatctctggaagtttctgtactgcagcagcaaattgaatttttactctgtcaagctgagagtaattggctggaagatagtgacttttcagaggatagttttgttatgcttcttaaaaagcaatttccaacaataagctttaatattgtgcaagacaaatctgatggtggagtttctggctttattgaggggcagaagaaagacatacggacatatagtttaaaattttccatctctttgttggagaaacgatggtctggaactttgccaagtagacatgggaatgttgatgaactggggaacattgtcgctgaacaatcttgttaccataccacagtttgctcacgagaggcaattaattgtttactgagggctcctatgctgtctgatctgcatctttggtcccattgggattcgctatttgctcctacactgggctcctttgtacattggttgctgaatactggtccaattcaagagctcgcatgcattgcgaccacagatggtaggtttattagagtagattcatcagccacagttgaccagtttctggaagctattatccatcgatcaccacttcaagtggcagtgaaactgctttcacttctatacatttacaatggttctatgaacaccccaatgtcattgctaaaatgttatgcacagcgagcaataaagctcatagtagataacaacaatgatttgatgaatgctaaatctgaaaacaaaatatttatgcctgatgagccccaaaacctaagtagtgaaagctctacttgttttgctgatcagtgtcaagaaagctctcaggcgtctcctggaaggttgatcaggtctgatagcttgccaaacattaataacactgttcatttgatcacaaaatttgtacttgattgtcttgatcatctaccttcagaattccgtagtcttgcagcagacatactattggcaggatttcgggttgttactaagaactggcatgcagttatgttgcatgaagccactgaaaacgggcagctttgcatgcttcatgatattggtttgtcacttggagttgtagaatgggttgaagattgccataggttgtgtttaactgatgaagttcatgtgcagacagaaatgcattcttctgccaagcttgcaacacctgcctctgtgggagccacccatgaagattctaacatgcatatttctagtgatgttaatatgatggataagagaaaacaattgtttcctgtcataaatgatcgggctggtatagataaggaagacaataagatgttaaatcctgctggaactgaggcagatgttgcagaactacatactaccagcagatcttctatgatggaagaaacaagtcttgaggaagcatctcttgttattgagactatacgccgtgaagagtttggtctggatcaggcactaagtgacactgagaatagcttgttaaagaagcagcatgctcgacttggcagagcattgcattgcctttcacaagaattatattcccaggattctcatctacttcttgagctggtacagaatgctgacgacaatacatatcctgaggatgttgaagcaacattagcattcattctccaagaggatggtattgctgttctaaacaatgagaggggcttctctgctgagaacattagagcactctgtgatattggtaactcgacaaagaaaggatcaaaccagggttatattggaaataaaggcattggatttaaatcagttttccgggtaactgatgctccggagatccattcaaatggtttccatgtgaaatttgatatcacagatggccagattggttttgtgttgccaactgcagttccaccttacagtaccacttcttttagtagaatgttatccgttgaagatgacaaggatgcccattcattgtggaacacttgcattttacttcccttcagatcaaaatttagggagtgcactgatctgcacccatctctactgctgttccttcatcgactaaaatgtatcaagtttaagaatttgtttgatgacacacttctgattatgagaagggagattcttggtgatggtattgtgagaatctcgcatgggattgagacaatgagttggttggtggtcagtaagaggctacaaggtaccattgtgcggcatgatgtgtgcaccacagagatagctgtggcgtttactttgcagcagactgaggaaggagattatgaaccttatttgaagcagcaacctgtgtttgcttttcttcctctaaggaattacggtcttaaattcattcttcaaggagattttgttttaccatcttccagagaggaagtggatgcggatagtgcatggaatcagtggttgttgtctgaattcccttctttgtttgtaagtgcccaagaatctttttgtgctcttccctgttttcagaggtgccctggaaaagctgtcacagccttcttgagttttattcctctagcaggagaggttcatggattcttcagccagcttccacacttgatcctttccaagttgcgtctgacccgctgcatgtttttggatggctctactgtgcaatgggtctatccatgcaacacacttaggggttgggatgaacaaactaaaatgttattttcagaaggcttacttcatgaacatcttggtcttggttacctctcaaaaaatattgttatatctgataagttatcaagagccctaggtattcatgactatggaccaaacattttgctagatgccatctcatctatttgccgaattgatggttgtattgagtcattgggcctggaatggctttgtgcttggtttgttaacctttatctgacattgctgtctcattcttctcaaaatgtttcctcagcaagaaacctcgaagacattcttttggataaagttaggaaaataccatgcatcccactttcagatggttcatttacctctatttcagatggtcgtatatggttgccatatgatgttgccagttccattcctgaatgcagtagcattccgaattttccagctctatatggtaatcttcgaactgtaagtccaaaccttctctctgcatgctgcaaaaataaatacctcatggaggaagtcagaataaatgatctggcagacatgctccaaaggatcggggtgcggaagttgtctgggcatgacattgttaaaaatcacatcatggtgtccttgcgtaacggtttagatgctaatgtggctgatatagtgattagagagtatgtgagctttattatggttcatcttcagtcttcttgcaccagctgtaactttgaaagaggagagatagtgtcagaactacggaagagtcctatcttccttacaaaccatggatacaagagcccagctgatgaaccaattcacttcagtaaagattatggaaattccgtggatgttactagactgcttcagaatgtagaaataagttggattgaacttgatagtagctatttgcagcatcatggttcacagtcgtcatcatttgcacgggaaaaatggaggcaattttttgaagaaatgggtgtgactgattttgtgcaggtagtgaaagttgaaaaaactttatcccaagttgattctattctagcaggaggactttctctagctgatgtatctacaaaacaatgtacagtgtatgactgggagtcaccagaattatctagaattttatcaatattttcttcaaaaagatgcaaggaaaattgtgtatatcttctggaagttcttgatagattctgggatgatcattatagtgcaaaatctaggatcttcacagatgctacacattgtggtgaaaacagagcagttgaatcatcatttatgaagtgcattcaaagcttcaaatggatagcatcaagaatggatgaggatcttcattatgcaacagatttattctatgattgtgaaaatgtccgctctctttttggtagtgtggctccatatgctgtaccgcaggtatctagcagttcacttaagaaggccattggattcaaaacagaggtatcttactgtgatgcattgatggtcctgaagtcttggataacgtcaaaggttccctttagagcaagtatgagccagatgtgcaaattctataccttcttgtctgaaggcgtggcagacgcaaagattgacattaaacgggagttcatgtcgtctccttctatatttacaccactacagcgtcctcgggcaagtgaggttattcctggaaggtttttggcgccagaagacctctattggcatgacccaacaggatgttctgaaataacagaggatttcgttgcaacgaaaaacagaagtatgttcccaagaaaaatgctgtctgcagcctatccaaacctttatgaattatttactctgacatgcggtgtaccaaaggccccaacaacatcaaattatgttgagatgctgctacggttgtcaaccattgcattgccttcacaggcaggaaaccatgtcttttgtgtatttgtgagatgggccaagtgtatgcattctgaaagtgacaagatgaatgatatattgtacttgaaagaatcccttcagaaattagaaacaacaatattgcccacctcagccgataaatgggtctctctacatccttcttttggccttgtttgctgggtagatgatgatgagctaaagcaacagtttgttaactctaatgatgtttacttcatacaatttggcgacctttcttctgaggataagcaaatgttgtatggaagagttgctgctttaatgaaaagcttaggcatccaagcactttcaaaggttgtgtatcgtgaagcaatattttatggtacatcagagaacagagaaaaggtttccttgatttgttggctgttgccatacatgcaacgttacatctataagatgcatagagatacttatatcaacttccagaaaaacgacatcatgaagattagcaacctgcaagtagtagttgttgacaagttattccacaagtatgtactgaggggactcgagagttcttctaagaaaagattccaatgtcattgtcttttgcagggagatactctatatgcaacacaagaggctgactcacattcagtatttttggagctttctagaattttctttgatggatcccatgatcttcattttgcaaattttctacacatgatcaaaaccatggccgaatctggcactcatgctgagcaaatagagacttttatcgttaataatcagaatgtgcctgagttacctgagcatgaagctatctggtccttctcttccttgtctgcagccaaacatggttcagcgaaccaaggtggtgctgatacccagggggttgatttccaacctgtccatgaatttagtattcccaatcatcagaaggcacaggtgatggtttctagttggcctctaaactattggagaacagcacccgtcttcagaacacctctcataaaccagcatgcaagcatgcaagaggcaaaggtgaatgatgctggaccttcatcaaacttaaacatgcctgctatgtatggacacaccgaagatagtttgctttctgctgatcttgaaagggattggattatagaagagaatccaagaactgaaactacattgtttggagatagttcatcggaaatccttgatgagcctcagatggtgatgtctgctgaacctttccatgcacctgcttatttgaacttggaggctggaaattcaagcccaacggttcatgtcgagctaacaaattccgatgagaaactggccaatcttgcagaagacaagaatcagcgactttcagatgcaaaccagttaagaacagggaggcttggtgaagaactggtcgagaaatatttggccaaacagctaggttccaacaatgttaggtgggtgaacaacagaattgaaaccggactgccttatgatattgttataacacacccagagggtttcacagagtatgtggaggttaaaacaactgtatcttcaagaaaagattggtttgacgtctcagcaagggaatggcagtttgccttggagaaaggggattcatttagcattgctcgtgtcatcttaggtacaaagaaagcaagtatagaaatgttgaaaaacccacacaagctttgtaagcagaaagcattgcggcttgctctcctgatatccagatcggcagcaacctagactaaaatgtcggttttgttgaggctagcaccgatcatccttctgcagattgttatgattactctgactaataatcaacatgaactggagtgagcatctgcatcttgataggtatttgctgatccaagttagcagattcttctttttggagagagatggggtaccgggtacggcatgagtgcaagacaacatacagttgagccgctctatagtaggctcctctttctattattctaactcgggtaatcttctccaatggcggctctctaccatgtctcttgttacatacaacttacgctctgcctttgtaacccattctggtattttgttgcataatgtatgtgattttgtcattagatttgtttttcaatttctgccctagacatcgtcccataggttgattgtgtaactaaacatgaaactgtacataaatggatggaatttgattttaccatgtacatgaaatttgattttgcgtgcggcggctgcctggtctgtgcgttctggtctctgtgcgcagggcgcggcatctgcccggcagcctgctcgccggctgctcggtgagaaaattggctagttgggtactggttttttttttcaattgataaaaaaacaggatctgatggagccttttcatttttgttttactttccgtctcttttatcagcagttgaaaggcgatcacttattctcaatttggtggaatc

SEQ ID NO: 11476 - DNA, 8585 bp, Zea Mays
atccagaagagacccaattgcccagggccgccgccgcgccgacctcgccgtcgcgcgctttgcttctcttgcccccctgcccgtggcctccgccccaattccagcgggacagcctcgatgagccgccaggatcgtcaccagtggcctcgccctaaccacggatacgaccctcgcgccgccgccgccgccgcgcaatggtatggcgccgcttcgatgctgtttcccgaccccggcgcggcggcgctgcacgggataaacccctacggcttcgcccctaaccctttcttcaataacttcctcccccagaactccgctgccctagctgcctaccaactgcagcagcagcaggctcatcacttcgcctcccatgcctaccaccaagcccctaccggtaacaccatgcaccgctctaccaaacccgccgccgctgccaaacctgcgccgccaccgggcaaccagcaggccgtgctggaccgggctcaagaggcggcgaggaaggctcgggaggagctcgtgaagggtggggacggcgtcacggcgtggaaggtggcgcaggcggtgctggtggcgctcaaggctgattcgtgggactccctcggcgtccagccccaggatgtgcctctcctgcgggatctcttcctaatcgagggcaaggtgaacgcattcatccattgctatgttgcagcaagaaaaattgtaacggtttatgatctggaggttgagatatgcaagaatgagggggttgtgcaatttgaagagctgggattgggacctttccttcagcacccgcttgttgcacattattttttagtgccagctgatttgtctgtggtgcctaagctttgtagcgaggaaattatcaataccctgctgaaatttgtggacaaatctaagaaaaaaatcacaattgaagattttttgaaccatcttgcagagaaaaaatcagtctctgggaaggaaaaacttggtgtgcgggtacaaagcttgggaaaggccattccattttttactaatttagggaggttttgtaggttgcatatttccttactacgacaggccaagcaaacagaagtgtctgctgcgaagcttcgagcaaatatgagtggatctggtaatagtagtcaggagaaggatttgttgaaaaatgcaagtttccatactcacaagaaggctttggacaagaggttcatttctttaactaatcgtataaaagagttaccaggcatcaataagcatatccattttgattcgaccgatgatgaaactaatagttgtactggttctgaggatggtaaatctgatggcaatgagaatgagaatgaatgttctattcttgacaaaaaggatggtgataagcgtgtgaatagctgcccatatccgtcaaaaactgaagaactggaaaggcttggtttgaaatctgaaattaataaaaggcaatctttagagaatagcaagccaagagacagtgggaaaaaggggaaagttttggaaatgttagcaaattactatgggagaacgatatcagggaagaggagaattagaaatttcttctcacagtacccaggcattggccttctcaatgttgctgttaaatcaatgggatgtggtctgctggatagcatttacgatgtgatacagcttgctgatgagaatgatgtagcttcaagccctcctcctaacaccaccactgaagttatggaaattgagcctccaagtgttgctattgatgatgtcatcaggaggatttcagaatatattgaatccaacagtaaaatctctggtgatgtggctttgcaagtgagggcacttaatgattgtgaaacatgggtaactactcaattttcagcaaatcaattcagtgctcttggccatgggacattccttgagtttttggacaaacattgtcaccagttccgaactgctttgagtagtttctttaaggagggtccttctaattcttcatctctggaagtttctgtactgcagcagcaaattgaatttttactctgtcaagctgagagtaattggctggaagatagtgacttttcagaggatagttttgttatgcttcttaaaaagcaatttccaacaataagctttaatattgtgcaagacaaatctgatggtggagtttctggctttattgaggggcagaagaaagacatacggacatatagtttaaaattttccatctctttgttggagaaacgatggtctggaactttgccaagtagacatgggaatgttgatgaactggggaacattgtcgctgaacaatcttgttaccataccacagtttgctcacgagaggcaattaattgtttactgagggctcctatgctgtctgatctgcatctttggtcccattgggattcgctatttgctcctacactgggctcctttgtacattggttgctgaatactggtccaattcaagagctcgcatgcattgcgaccacagatggtaggtttattagagtagattcatcagccacagttgaccagtttctggaagctattatccatcgatcaccacttcaagtggcagtgaaactgctttcacttctatacatttacaatggttctatgaacaccccaatgtcattgctaaaatgttatgcacagcgagcaataaagctcatagtagataacaacaatgatttgatgaatgctaaatctgaaaacaaaatatttatgcctgatgagccccaaaacctaagtagtgaaagctctacttgttttgctgatcagtgtcaagaaagctctcaggcgtctcctggaaggttgatcaggtctgatagcttgccaaacattaataacactgttcatttgatcacaaaatttgtacttgattgtcttgatcatctaccttcagaattccgtagtcttgcagcagacatactattggcaggatttcgggttgttactaagaactggcatgcagttatgttgcatgaagccactgaaaacgggcagctttgcatgcttcatgatattggtttgtcacttggagttgtagaatgggttgaagattgccataggttgtgtttaactgatgaagttcatgtgcagacagaaatgcattcttctgccaagcttgcaacacctgcctctgtgggagccacccatgaagattctaacatgcatatttctagtgatgttaatatgatggataagagaaaacaattgtttcctgtcataaatgatcgggctggtatagataaggaagacaataagatgttaaatcctgctggaactgaggcagatgttgcagaactacatactaccagcagatcttctatgatggaagaaacaagtcttgaggaagcatctcttgttattgagactatacgccgtgaagagtttggtctggatcaggcactaagtgacactgagaatagcttgttaaagaagcagcatgctcgacttggcagagcattgcattgcctttcacaagaattatattcccaggattctcatctacttcttgagctggtacagaatgctgacgacaatacatatcctgaggatgttgaagcaacattagcattcattctccaagaggatggtattgctgttctaaacaatgagaggggcttctctgctgagaacattagagcactctgtgatattggtaactcgacaaagaaaggatcaaaccagggttatattggaaataaaggcattggatttaaatcagttttccgggtaactgatgctccggagatccattcaaatggtttccatgtgaaatttgatatcacagatggccagattggttttgtgttgccaactgcagttccaccttacagtaccacttcttttagtagaatgttatccgttgaagatgacaaggatgcccattcattgtggaacacttgcattttacttcccttcagatcaaaatttagggagtgcactggtatgtgctccattgtgtctttgttttcagatctgcacccatctctactgctgttccttcatcgactaaaatgtatcaagtttaagaatttgtttgatgacacacttctgattatgagaagggagattcttggtgatggtattgtgagaatctcgcatgggattgagacaatgagttggttggtggtcagtaagaggctacaaggtaccattgtgcggcatgatgtgtgcaccacagagatagctgtggcgtttactttgcagcagactgaggaaggagattatgaaccttatttgaagcagcaacctgtgtttgcttttcttcctctaaggaattacggtcttaaattcattcttcaaggagattttgttttaccatcttccagagaggaagtggatgcggatagtgcatggaatcagtggttgttgtctgaattcccttctttgtttgtaagtgcccaagaatctttttgtgctcttccctgttttcagaggtgccctggaaaagctgtcacagccttcttgagttttattcctctagcaggagaggttcatggattcttcagccagcttccacacttgatcctttccaagttgcgtctgacccgctgcatgtttttggatggctctactgtgcaatgggtctatccatgcaacacacttaggggttgggatgaacaaactaaaatgttattttcagaaggcttacttcatgaacatcttggtcttggttacctctcaaaaaatattgttatatctgataagttatcaagagccctaggtattcatgactatggaccaaacattttgctagatgccatctcatctatttgccgaattgatggttgtattgagtcattgggcctggaatggctttgtgcttggtttgttaacctttatctgacattgctgtctcattcttctcaaaatgtttcctcagcaagaaacctcgaagacattcttttggataaagttaggaaaataccatgcatcccactttcagatggttcatttacctctatttcagatggtcgtatatggttgccatatgatgttgccagttccattcctgaatgcagtagcattccgaattttccagctctatatggtaatcttcgaactgtagtgaaagttgaaaaaactttatcccaagttgattctattctagcaggaggactttctctagctgatgtatctacaaaacaatgtacagtgtatgactgggagtcaccagaattatctagaattttatcaatattttcttcaaaaagatgcaaggaaaattgtgtatatcttctggaagttcttgatagattctgggatgatcattatagtgcaaaatctaggatcttcacagatgctacacattgtggtgaaaacagagcagttgaatcatcatttatgaagtgcattcaaagcttcaaatggatagcatcaagaatggatgaggatcttcattatgcaacagatttattctatgattgtgaaaatgtccgctctctttttggtagtgtggctccatatgctgtaccgcaggtatctagcagttcacttaagaaggccattggattcaaaacagaggtatcttactgtgatgcattgatggtcctgaagtcttggataacgtcaaaggttccctttagagcaagtatgagccagatgtgcaaattctataccttcttgtctgaaggcgtggcagacgcaaagattgacattaaacgggagttcatgtcgtctccttctatatttacaccactacagcgtcctcgggcaagtgaggttattcctggaaggtttttggcgccagaagacctctattggcatgacccaacaggatgttctgaaataacagaggatttcgttgcaacgaaaaacagaagtatgttcccaagaaaaatgctgtctgcagcctatccaaacctttatgaattatttactctgacatgcggtgtaccaaaggccccaacaacatcaaattatgttgagatgctgctacggttgtcaaccattgcattgccttcacaggcaggaaaccatgtcttttgtgtatttgtgagatgggccaagtgtatgcattctgaaagtgacaagatgaatgatatattgtacttgaaagaatcccttcagaaattagaaacaacaatattgcccacctcagccgataaatgggtctctctacatccttcttttggccttgtttgctgggtagatgatgatgagctaaagcaacagtttgttaactctaatgatgtttacttcatacaatttggcgacctttcttctgaggataagcaaatgttgtatggaagagttgctgctttaatgaaaagcttaggcatccaagcactttcaaaggttgtgtatcgtgaagcaatattttatggtacatcagagaacagagaaaaggtttccttgatttgttggctgttgccatacatgcaacgttacatctataagatgcatagagatacttatatcaacttccagaaaaacgacatcatgaagattagcaacctgcaagtagtagttgttgacaagttattccacaagtatgtactgaggggactcgagagttcttctaagaaaagattccaatgtcattgtcttttgcagggagatactctatatgcaacacaagaggctgactcacattcagtatttttggagctttctagaattttctttgatggatcccatgatcttcattttgcaaattttctacacatgatcaaaaccatggccgaatctggcactcatgctgagcaaatagagacttttatcgttaataatcagaatgtgcctgagttacctgagcatgaagctatctggtccttctcttccttgtctgcagccaaacatggttcagcgaaccaaggtggtgctgatacccagggggttgatttccaacctgtccatgaatttagtattcccaatcatcagaaggcacaggtgatggtttctagttggcctctaaactattggagaacagcacccgtcttcagaacacctctcataaaccagcatgcaagcatgcaagaggcaaaggtgaatgatgctggaccttcatcaaacttaaacatgcctgctatgtatggacacaccgaagatagtttgctttctgctgatcttgaaagggattggattatagaagagaatccaagaactgaaactacattgtttggagatagttcatcggaaatccttgatgagcctcagatggtgatgtctgctgaacctttccatgcacctgcttatttgaacttggaggctggaaattcaagcccaacggttcatgtcgagctaacaaattccgatgagaaactggccaatcttgcagaagacaagaatcggcgactttcagatgcaagccagttaagaacaggttcaaacccaatggttgatgttgagctaacaaatttcgatgagaaactggccaatcttgcagaaggcaagaatcagcgactttcagatgcaagccagttaagaacaggttcaaacccaatggttgatgttgagctaacaaatttcgatgagaaactggccattcttgcagaagacaagaatcagcgactttcagatgcaaaccagttaagaacagggaggcttggtgaagaactggtcgagaaatatttggccaaacagctaggttccaacaatgttaggtgggtgaacaacagaattgaaaccggactgccttatgatattgttataacacacccagagggtttcacagagtatgtggaggttaaaacaactgtatcttcaagaaaagattggtttgacgtctcagcaagggaatggcagtttgccttggagaaaggggattcatttagcattgctcgtgtcatcttaggtacaaagaaagcaagtatagaaatgttgaaaaacccacacaagctttgtaagcagaaagcattgcggcttgctctcctgatatccagatcggcagcaacctagactaaaatgtcggttttgttgaggctagcaccgatcatccttctgcagattgttatgattactctgactaataatcaacatgaactggagtgagcatctgcatcttgataggtatttgctgatccaagttagcagattcttctttttggagagagatggggtaccgggtacggcatgagtgcaagacaacatacagttgagccgctctatagtaggctcctctttctattattctaactcgggtaatcttctccaatggcggctctctaccatgtctcttgttacatacaacttacgctctgcctttgtaacccattctggtattttgttgcataatgtatgtgattttgtcattagatttgtttttcaatttctgccctagacatcgtcccataggttgattgtgtaactaaacatgaaactgtacataaatggatggaatttgattttaccatgtacatgaaatttgattttgcgtgcggcggctgcctggtctgtgcgttctggtctctgtgcgcagggcgcggcatctgcccggcagcctgctcgccggctgctcggtgagaaaattggctagttgggtactggttttttttttcaattgataaaaaaacaggatctgatggagccttttcatttttgttttactttccgtctcttttatcagcagttgaaaggcgatcacttattctcaatttggtggaatc

SEQ ID NO: 11477 - DNA, 9241 bp, Zea Mays
ctatccagaagagacccaattgcccagggccgccgccgcgccgacctcgccgtcgcgcgctttgcttctcttgcccccctgcccgtggcctccgccccaattccagcgggacagcctcgatgagccgccaggatcgtcaccagtggcctcgccctaaccacggatacgaccctcgcgccgccgccgccgccgcgcaatggtatggcgccgcttcgatgctgtttcccgaccccggcgcggcggcgctgcacgggataaacccctacggcttcgcccctaaccctttcttcaataacttcctcccccagaactccgctgccctagctgcctaccaactgcagcagcagcaggctcatcacttcgcctcccatgcctaccaccaagcccctaccggtaacaccatgcaccgctctaccaaacccgccgccgctgccaaacctgcgccgccaccgggcaaccagcaggccgtgctggaccgggctcaagaggcggcgaggaaggctcgggaggagctcgtgaagggtggggacggcgtcacggcgtggaaggtggcgcaggcggtgctggtggcgctcaaggctgattcgtgggactccctcggcgtccagccccaggatgtgcctctcctgcgggatctcttcctaatcgagggcaaggtgaacgcattcatccattgctatgttgcagcaagaaaaattgtaacggtttatgatctggaggttgagatatgcaagaatgagggggttgtgcaatttgaagagctgggattgggacctttccttcagcacccgcttgttgcacattattttttagtgccagctgatttgtctgtggtgcctaagctttgtagcgaggaaattatcaataccctgctgaaatttgtggacaaatctaagaaaaaaatcacaattgaagattttttgaaccatcttgcagagaaaaaatcagtctctgggaaggaaaaacttggtgtgcgggtacaaagcttggggttgcatatttccttactacgacaggccaagcaaacagaagtgtctgctgcgaagcttcgagcaaatatgagtggatctggtaatagtagtcaggagaaggatttgttgaaaaatgcaagtttccatactcacaagaaggctttggacaagaggttcatttctttaactaatcgtataaaagagttaccaggcatcaataagcatatccattttgattcgaccgatgatgaaactaatagttgtactggttctgaggatggtaaatctgatggcaatgagaatgagaatgaatgttctattcttgacaaaaaggatggtgataagcgtgtgaatagctgcccatatccgtcaaaaactgaagaactggaaaggcttggtttgaaatctgaaattaataaaaggcaatctttagagaatagcaagccaagagacagtgggaaaaaggggaaagtaagtgaaaaaagaaaatatgaagaaatcgggagtcctagctgttcgttcaagcagcctaagaagcagcaaaagttgcaaaaacatgaagcatcaccgaaatgtttcctaagtataggtaagctggaaaattttgtaacaacatggaaggaaacatgtcgtgaacatccagttcaacaggttttggaaatgttagcaaattactatgggagaacgatatcagggaagaggagaattagaaatttcttctcacagtacccaggcattggccttctcaatgttgctgttaaatcaatgggatgtggtctgctggatagcatttacgatgtgatacagcttgctgatgagaatgatgtagcttcaagccctcctcctaacaccaccactgaagttatggaaattgagcctccaagtgttgctattgatgatgtcatcaggaggatttcagaatatattgaatccaacagtaaaatctctggtgatgtggctttgcaagtgagggcacttaatgattgtgaaacatgggtaactactcaattttcagcaaatcaattcagtgctcttggccatgggacattccttgagtttttggacaaacattgtcaccagttccgaactgctttgagtagtttctttaaggagggtccttctaattcttcatctctggaagtttctgtactgcagcagcaaattgaatttttactctgtcaagctgagagtaattggctggaagatagtgacttttcagaggatagttttgttatgcttcttaaaaagcaatttccaacaataagctttaatattgtgcaagacaaatctgatggtggagtttctggctttattgaggggcagaagaaagacatacggacatatagtttaaaattttccatctctttgttggagaaacgatggtctggaactttgccaagtagacatgggaatgttgatgaactggggaacattgtcgctgaacaatcttgttaccataccacagtttgctcacgagaggcaattaattgtttactgagggctcctatgctgtctgatctgcatctttggtcccattgggattcgctatttgctcctacactgggctcctttgtacattggttgctgaatactggtccaattcaagagctcgcatgcattgcgaccacagatggtaggtttattagagtagattcatcagccacagttgaccagtttctggaagctattatccatcgatcaccacttcaagtggcagtgaaactgctttcacttctatacatttacaatggttctatgaacaccccaatgtcattgctaaaatgttatgcacagcgagcaataaagctcatagtagataacaacaatgatttgatgaatgctaaatctgaaaacaaaatatttatgcctgatgagccccaaaacctaagtagtgaaagctctacttgttttgctgatcagtgtcaagaaagctctcaggcgtctcctggaaggttgatcaggtctgatagcttgccaaacattaataacactgttcatttgatcacaaaatttgtacttgattgtcttgatcatctaccttcagaattccgtagtcttgcagcagacatactattggcaggatttcgggttgttactaagaactggcatgcagttatgttgcatgaagccactgaaaacgggcagctttgcatgcttcatgatattggtttgtcacttggagttgtagaatgggttgaagattgccataggttgtgtttaactgatgaagttcatgtgcagacagaaatgcattcttctgccaagcttgcaacacctgcctctgtgggagccacccatgaagattctaacatgcatatttctagtgatgttaatatgatggataagagaaaacaattgtttcctgtcataaatgatcgggctggtatagataaggaagacaataagatgttaaatcctgctggaactgaggcagatgttgcagaactacatactaccagcagatcttctatgatggaagaaacaagtcttgaggaagcatctcttgttattgagactatacgccgtgaagagtttggtctggatcaggcactaagtgacactgagaatagcttgttaaagaagcagcatgctcgacttggcagagcattgcattgcctttcacaagaattatattcccaggattctcatctacttcttgagctggtacagaatgctgacgacaatacatatcctgaggatgttgaagcaacattagcattcattctccaagaggatggtattgctgttctaaacaatgagaggggcttctctgctgagaacattagagcactctgtgatattggtaactcgacaaagaaaggatcaaaccagggttatattggaaataaaggcattggatttaaatcagttttccgggtaactgatgctccggagatccattcaaatggtttccatgtgaaatttgatatcacagatggccagattggttttgtgttgccaactgcagttccaccttacagtaccacttcttttagtagaatgttatccgttgaagatgacaaggatgcccattcattgtggaacacttgcattttacttcccttcagatcaaaatttagggagtgcactggtatgtgctccattgtgtctttgttttcagatctgcacccatctctactgctgttccttcatcgactaaaatgtatcaagtttaagaatttgtttgatgacacacttctgattatgagaagggagattcttggtgatggtattgtgagaatctcgcatgggattgagacaatgagttggttggtggtcagtaagaggctacaaggtaccattgtgcggcatgatgtgtgcaccacagagatagctgtggcgtttactttgcagcagactgaggaaggagattatgaaccttatttgaagcagcaacctgtgtttgcttttcttcctctaaggaattacggtcttaaattcattcttcaaggagattttgttttaccatcttccagagaggaagtggatgcggatagtgcatggaatcagtggttgttgtctgaattcccttctttgtttgtaagtgcccaagaatctttttgtgctcttccctgttttcagaggtgccctggaaaagctgtcacagccttcttgagttttattcctctagcaggagaggttcatggattcttcagccagcttccacacttgatcctttccaagttgcgtctgacccgctgcatgtttttggatggctctactgtgcaatgggtctatccatgcaacacacttaggggttgggatgaacaaactaaaatgttattttcagaaggcttacttcatgaacatcttggtcttggttacctctcaaaaaatattgttatatctgataagttatcaagagccctaggtattcatgactatggaccaaacattttgctagatgccatctcatctatttgccgaattgatggttgtattgagtcattgggcctggaatggctttgtgcttggtttgttaacctttatctgacattgctgtctcattcttctcaaaatgtttcctcagcaagaaacctcgaagacattcttttggataaagttaggaaaataccatgcatcccactttcagatggttcatttacctctatttcagatggtcgtatatggttgccatatgatgttgccagttccattcctgaatgcagtagcattccgaattttccagctctatatggtaatcttcgaactgtaagtccaaaccttctctctgcatgctgcaaaaataaatacctcatggaggaagtcagaataaatgatctggcagacatgctccaaaggatcggggtgcggaagttgtctgggcatgacattgttaaaaatcacatcatggtgtccttgcgtaacggtttagatgctaatgtggctgatatagtgattagagagtatgtgagctttattatggttcatcttcagtcttcttgcaccagctgtaactttgaaagaggagagatagtgtcagaactacggaagagtcctatcttccttacaaaccatggatacaagagcccagctgatgaaccaattcacttcagtaaagattatggaaattccgtggatgttactagactgcttcagaatgtagaaataagttggattgaacttgatagtagctatttgcagcatcatggttcacagtcgtcatcatttgcacgggaaaaatggaggcaattttttgaagaaatgggtgtgactgattttgtgcaggtagtgaaagttgaaaaaactttatcccaagttgattctattctagcaggaggactttctctagctgatgtatctacaaaacaatgtacagtgtatgactgggagtcaccagaattatctagaattttatcaatattttcttcaaaaagatgcaaggaaaattgtgtatatcttctggaagttcttgatagattctgggatgatcattatagtgcaaaatctaggatcttcacagatgctacacattgtggtgaaaacagagcagttgaatcatcatttatgaagtgcattcaaagcttcaaatggatagcatcaagaatggatgaggatcttcattatgcaacagatttattctatgattgtgaaaatgtccgctctctttttggtagtgtggctccatatgctgtaccgcaggtatctagcagttcacttaagaaggccattggattcaaaacagaggtatcttactgtgatgcattgatggtcctgaagtcttggataacgtcaaaggttccctttagagcaagtatgagccagatgtgcaaattctataccttcttgtctgaaggcgtggcagacgcaaagattgacattaaacgggagttcatgtcgtctccttctatatttacaccactacagcgtcctcgggcaagtgaggttattcctggaaggtttttggcgccagaagacctctattggcatgacccaacaggatgttctgaaataacagaggatttcgttgcaacgaaaaacagaagtatgttcccaagaaaaatgctgtctgcagcctatccaaacctttatgaattatttactctgacatgcggtgtaccaaaggccccaacaacatcaaattatgttgagatgctgctacggttgtcaaccattgcattgccttcacaggcaggaaaccatgtcttttgtgtatttgtgagatgggccaagtgtatgcattctgaaagtgacaagatgaatgatatattgtacttgaaagaatcccttcagaaattagaaacaacaatattgcccacctcagccgataaatgggtctctctacatccttcttttggccttgtttgctgggtagatgatgatgagctaaagcaacagtttgttaactctaatgatgtttacttcatacaatttggcgacctttcttctgaggataagcaaatgttgtatggaagagttgctgctttaatgaaaagcttaggcatccaagcactttcaaaggttgtgtatcgtgaagcaatattttatggtacatcagagaacagagaaaaggtttccttgatttgttggctgttgccatacatgcaacgttacatctataagatgcatagagatacttatatcaacttccagaaaaacgacatcatgaagattagcaacctgcaagtagtagttgttgacaagttattccacaagtatgtactgaggggactcgagagttcttctaagaaaagattccaatgtcattgtcttttgcagggagatactctatatgcaacacaagaggctgactcacattcagtatttttggagctttctagaattttctttgatggatcccatgatcttcattttgcaaattttctacacatgatcaaaaccatggccgaatctggcactcatgctgagcaaatagagacttttatcgttaataatcagaatgtgcctgagttacctgagcatgaagctatctggtccttctcttccttgtctgcagccaaacatggttcagcgaaccaaggtggtgctgatacccagggggttgatttccaacctgtccatgaatttagtattcccaatcatcagaaggcacaggtgatggtttctagttggcctctaaactattggagaacagcacccgtcttcagaacacctctcataaaccagcatgcaagcatgcaagaggcaaaggtgaatgatgctggaccttcatcaaacttaaacatgcctgctatgtatggacacaccgaagatagtttgctttctgctgatcttgaaagggattggattatagaagagaatccaagaactgaaactacattgtttggagatagttcatcggaaatccttgatgagcctcagatggtgatgtctgctgaacctttccatgcacctgcttatttgaacttggaggctggaaattcaagcccaacggttcatgtcgagctaacaaattccgatgagaaactggccaatcttgcagaagacaagaatcggcgactttcagatgcaagccagttaagaacaggttcaaacccaatggttgatgttgagctaacaaatttcgatgagaaactggccaatcttgcagaaggcaagaatcagcgactttcagatgcaagccagttaagaacaggttcaaacccaatggttgatgttgagctaacaaatttcgatgagaaactggccattcttgcagaagacaagaatcagcgactttcagatgcaaaccagttaagaacagggaggcttggtgaagaactggtcgagaaatatttggccaaacagctaggttccaacaatgttaggtgggtgaacaacagaattgaaaccggactgccttatgatattgttataacacacccagagggtttcacagagtatgtggaggttaaaacaactgtatcttcaagaaaagattggtttgacgtctcagcaagggaatggcagtttgccttggagaaaggggattcatttagcattgctcgtgtcatcttaggtacaaagaaagcaagtatagaaatgttgaaaaacccacacaagctttgtaagcagaaagcattgcggcttgctctcctgatatccagatcggcagcaacctagactaaaatgtcggttttgttgaggctagcaccgatcatccttctgcagattgttatgattactctgactaataatcaacatgaactggagtgagcatctgcatcttgataggtatttgctgatccaagttagcagattcttctttttggagagagatggggtaccgggtacggcatgagtgcaagacaacatacagttgagccgctctatagtaggctcctctttctattattctaactcgggtaatcttctccaatggcggctctctaccatgtctcttgttacatacaacttacgctctgcctttgtaacccattctggtattttgttgcataatgtatgtgattttgtcattagatttgtttttcaatttctgccctagacatcgtcccataggttgattgtgtaactaaacatgaaactgtacataaatggatggaatttgattttaccatgtacatgaaatttgattttgcgtgcggcggctgcctggtctgtgcgttctggtctctgtgcgcagggcgcggcatctgcccggcagcctgctcgccggctgctcggtgagaaaattggctagttgggtactggttttttttttcaattgataaaaaaacaggatctgatggagccttttcatttttgttttactttccgtctcttttatcagcagttgaaaggcgatcacttattctcaatttggtggaatc

SEQ ID NO: 11478 - DNA, 9091 bp, Zea Mays
ctatccagaagagacccaattgcccagggccgccgccgcgccgacctcgccgtcgcgcgctttgcttctcttgcccccctgcccgtggcctccgccccaattccagcgggacagcctcgatgagccgccaggatcgtcaccagtggcctcgccctaaccacggatacgaccctcgcgccgccgccgccgccgcgcaatggtatggcgccgcttcgatgctgtttcccgaccccggcgcggcggcgctgcacgggataaacccctacggcttcgcccctaaccctttcttcaataacttcctcccccagaactccgctgccctagctgcctaccaactgcagcagcagcaggctcatcacttcgcctcccatgcctaccaccaagcccctaccggtaacaccatgcaccgctctaccaaacccgccgccgctgccaaacctgcgccgccaccgggcaaccagcaggccgtgctggaccgggctcaagaggcggcgaggaaggctcgggaggagctcgtgaagggtggggacggcgtcacggcgtggaaggtggcgcaggcggtgctggtggcgctcaaggctgattcgtgggactccctcggcgtccagccccaggatgtgcctctcctgcgggatctcttcctaatcgagggcaaggtgaacgcattcatccattgctatgttgcagcaagaaaaattgtaacggtttatgatctggaggttgagatatgcaagaatgagggggttgtgcaatttgaagagctgggattgggacctttccttcagcacccgcttgttgcacattattttttagtgccagctgatttgtctgtggtgcctaagctttgtagcgaggaaattatcaataccctgctgaaatttgtggacaaatctaagaaaaaaatcacaattgaagattttttgaaccatcttgcagagaaaaaatcagtctctgggaaggaaaaacttggtgtgcgggtacaaagcttggggttgcatatttccttactacgacaggccaagcaaacagaagtgtctgctgcgaagcttcgagcaaatatgagtggatctggtaatagtagtcaggagaaggatttgttgaaaaatgcaagtttccatactcacaagaaggctttggacaagaggttcatttctttaactaatcgtataaaagagttaccaggcatcaataagcatatccattttgattcgaccgatgatgaaactaatagttgtactggttctgaggatggtaaatctgatggcaatgagaatgagaatgaatgttctattcttgacaaaaaggatggtgataagcgtgtgaatagctgcccatatccgtcaaaaactgaagaactggaaaggcttggtttgaaatctgaaattaataaaaggcaatctttagagaatagcaagccaagagacagtgggaaaaaggggaaagtaagtgaaaaaagaaaatatgaagaaatcgggagtcctagctgttcgttcaagcagcctaagaagcagcaaaagttgcaaaaacatgaagcatcaccgaaatgtttcctaagtataggtaagctggaaaattttgtaacaacatggaaggaaacatgtcgtgaacatccagttcaacaggttttggaaatgttagcaaattactatgggagaacgatatcagggaagaggagaattagaaatttcttctcacagtacccaggcattggccttctcaatgttgctgttaaatcaatgggatgtggtctgctggatagcatttacgatgtgatacagcttgctgatgagaatgatgtagcttcaagccctcctcctaacaccaccactgaagttatggaaattgagcctccaagtaaagaaaatacaggtagcactaatggagcccatgagaagagtgaagacaacatgactgcacatggtgttgctattgatgatgtcatcaggaggatttcagaatatattgaatccaacagtaaaatctctggtgatgtggctttgcaagtgagggcacttaatgattgtgaaacatgggtaactactcaattttcagcaaatcaattcagtgctcttggccatgggacattccttgagtttttggacaaacattgtcaccagttccgaactgctttgagtagtttctttaaggagggtccttctaattcttcatctctggaagtttctgtactgcagcagcaaattgaatttttactctgtcaagctgagagtaattggctggaagatagtgacttttcagaggatagttttgttatgcttcttaaaaagcaatttccaacaataagctttaatattgtgcaagacaaatctgatggtggagtttctggctttattgaggggcagaagaaagacatacggacatatagtttaaaattttccatctctttgttggagaaacgatggtctggaactttgccaagtagacatgggaatgttgatgaactggggaacattgtcgctgaacaatcttgttaccataccacagtttgctcacgagaggcaattaattgtttactgagggctcctatgctgtctgatctgcatctttggtcccattgggattcgctatttgctcctacactgggctcctttgtacattggttgctgaatactggtccaattcaagagctcgcatgcattgcgaccacagatggtaggtttattagagtagattcatcagccacagttgaccagtttctggaagctattatccatcgatcaccacttcaagtggcagtgaaactgctttcacttctatacatttacaatggttctatgaacaccccaatgtcattgctaaaatgttatgcacagcgagcaataaagctcatagtagataacaacaatgatttgatgaatgctaaatctgaaaacaaaatatttatgcctgatgagccccaaaacctaagtagtgaaagctctacttgttttgctgatcagtgtcaagaaagctctcaggcgtctcctggaaggttgatcaggtctgatagcttgccaaacattaataacactgttcatttgatcacaaaatttgtacttgattgtcttgatcatctaccttcagaattccgtagtcttgcagcagacatactattggcaggatttcgggttgttactaagaactggcatgcagttatgttgcatgaagccactgaaaacgggcagctttgcatgcttcatgatattggtttgtcacttggagttgtagaatgggttgaagattgccataggttgtgtttaactgatgaagttcatgtgcagacagaaatgcattcttctgccaagcttgcaacacctgcctctgtgggagccacccatgaagattctaacatgcatatttctagtgatgttaatatgatggataagagaaaacaattgtttcctgtcataaatgatcgggctggtatagataaggaagacaataagatgttaaatcctgctggaactgaggcagatgttgcagaactacatactaccagcagatcttctatgatggaagaaacaagtcttgaggaagcatctcttgttattgagactatacgccgtgaagagtttggtctggatcaggcactaagtgacactgagaatagcttgttaaagaagcagcatgctcgacttggcagagcattgcattgcctttcacaagaattatattcccaggattctcatctacttcttgagctggtacagaatgctgacgacaatacatatcctgaggatgttgaagcaacattagcattcattctccaagaggatggtattgctgttctaaacaatgagaggggcttctctgctgagaacattagagcactctgtgatattggtaactcgacaaagaaaggatcaaaccagggttatattggaaataaaggcattggatttaaatcagttttccgggtaactgatgctccggagatccattcaaatggtttccatgtgaaatttgatatcacagatggccagattggttttgtgttgccaactgcagttccaccttacagtaccacttcttttagtagaatgttatccgttgaagatgacaaggatgcccattcattgtggaacacttgcattttacttcccttcagatcaaaatttagggagtgcactggtatgtgctccattgtgtctttgttttcagatctgcacccatctctactgctgttccttcatcgactaaaatgtatcaagtttaagaatttgtttgatgacacacttctgattatgagaagggagattcttggtgatggtattgtgagaatctcgcatgggattgagacaatgagttggttggtggtcagtaagaggctacaaggtaccattgtgcggcatgatgtgtgcaccacagagatagctgtggcgtttactttgcagcagactgaggaaggagattatgaaccttatttgaagcagcaacctgtgtttgcttttcttcctctaaggaattacggtcttaaattcattcttcaaggagattttgttttaccatcttccagagaggaagtggatgcggatagtgcatggaatcagtggttgttgtctgaattcccttctttgtttgtaagtgcccaagaatctttttgtgctcttccctgttttcagaggtgccctggaaaagctgtcacagccttcttgagttttattcctctagcaggagaggttcatggattcttcagccagcttccacacttgatcctttccaagttgcgtctgacccgctgcatgtttttggatggctctactgtgcaatgggtctatccatgcaacacacttaggggttgggatgaacaaactaaaatgttattttcagaaggcttacttcatgaacatcttggtcttggttacctctcaaaaaatattgttatatctgataagttatcaagagccctaggtattcatgactatggaccaaacattttgctagatgccatctcatctatttgccgaattgatggttgtattgagtcattgggcctggaatggctttgtgcttggtttgttaacctttatctgacattgctgtctcattcttctcaaaatgtttcctcagcaagaaacctcgaagacattcttttggataaagttaggaaaataccatgcatcccactttcagatggttcatttacctctatttcagatggtcgtatatggttgccatatgatgttgccagttccattcctgaatgcagtagcattccgaattttccagctctatatggtaatcttcgaactgtaagtccaaaccttctctctgcatgctgcaaaaataaatacctcatggaggaagtcagaataaatgatctggcagacatgctccaaaggatcggggtgcggaagttgtctgggcatgacattgttaaaaatcacatcatggtgtccttgcgtaacggtttagatgctaatgtggctgatatagtgattagagagtatgtgagctttattatggttcatcttcagtcttcttgcaccagctgtaactttgaaagaggagagatagtgtcagaactacggaagagtcctatcttccttacaaaccatggatacaagagcccagctgatgaaccaattcacttcagtaaagattatggaaattccgtggatgttactagactgcttcagaatgtagaaataagttggattgaacttgatagtagctatttgcagcatcatggttcacagtcgtcatcatttgcacgggaaaaatggaggcaattttttgaagaaatgggtgtgactgattttgtgcaggtagtgaaagttgaaaaaactttatcccaagttgattctattctagcaggaggactttctctagctgatgtatctacaaaacaatgtacagtgtatgactgggagtcaccagaattatctagaattttatcaatattttcttcaaaaagatgcaaggaaaattgtgtatatcttctggaagttcttgatagattctgggatgatcattatagtgcaaaatctaggatcttcacagatgctacacattgtggtgaaaacagagcagttgaatcatcatttatgaagtgcattcaaagcttcaaatggatagcatcaagaatggatgaggatcttcattatgcaacagatttattctatgattgtgaaaatgtccgctctctttttggtagtgtggctccatatgctgtaccgcaggtatctagcagttcacttaagaaggccattggattcaaaacagaggtatcttactgtgatgcattgatggtcctgaagtcttggataacgtcaaaggttccctttagagcaagtatgagccagatgtgcaaattctataccttcttgtctgaaggcgtggcagacgcaaagattgacattaaacgggagttcatgtcgtctccttctatatttacaccactacagcgtcctcgggcaagtgaggttattcctggaaggtttttggcgccagaagacctctattggcatgacccaacaggatgttctgaaataacagaggatttcgttgcaacgaaaaacagaagtatgttcccaagaaaaatgctgtctgcagcctatccaaacctttatgaattatttactctgacatgcggtgtaccaaaggccccaacaacatcaaattatgttgagatgctgctacggttgtcaaccattgcattgccttcacaggcaggaaaccatgtcttttgtgtatttgtgagatgggccaagtgtatgcattctgaaagtgacaagatgaatgatatattgtacttgaaagaatcccttcagaaattagaaacaacaatattgcccacctcagccgataaatgggtctctctacatccttcttttggccttgtttgctgggtagatgatgatgagctaaagcaacagtttgttaactctaatgatgtttacttcatacaatttggcgacctttcttctgaggataagcaaatgttgtatggaagagttgctgctttaatgaaaagcttaggcatccaagcactttcaaaggttgtgtatcgtgaagcaatattttatggtacatcagagaacagagaaaaggtttccttgatttgttggctgttgccatacatgcaacgttacatctataagatgcatagagatacttatatcaacttccagaaaaacgacatcatgaagattagcaacctgcaagtagtagttgttgacaagttattccacaagtatgtactgaggggactcgagagttcttctaagaaaagattccaatgtcattgtcttttgcagggagatactctatatgcaacacaagaggctgactcacattcagtatttttggagctttctagaattttctttgatggatcccatgatcttcattttgcaaattttctacacatgatcaaaaccatggccgaatctggcactcatgctgagcaaatagagacttttatcgttaataatcagaatgtgcctgagttacctgagcatgaagctatctggtccttctcttccttgtctgcagccaaacatggttcagcgaaccaaggtggtgctgatacccagggggttgatttccaacctgtccatgaatttagtattcccaatcatcagaaggcacaggtgatggtttctagttggcctctaaactattggagaacagcacccgtcttcagaacacctctcataaaccagcatgcaagcatgcaagaggcaaaggtgaatgatgctggaccttcatcaaacttaaacatgcctgctatgtatggacacaccgaagatagtttgctttctgctgatcttgaaagggattggattatagaagagaatccaagaactgaaactacattgtttggagatagttcatcggaaatccttgatgagcctcagatggtgatgtctgctgaacctttccatgcacctgcttatttgaacttggaggctggaaattcaagcccaacggttcatgtcgagctaacaaattccgatgagaaactggccaatcttgcagaagacaagaatcagcgactttcagatgcaaaccagttaagaacagggaggcttggtgaagaactggtcgagaaatatttggccaaacagctaggttccaacaatgttaggtgggtgaacaacagaattgaaaccggactgccttatgatattgttataacacacccagagggtttcacagagtatgtggaggttaaaacaactgtatcttcaagaaaagattggtttgacgtctcagcaagggaatggcagtttgccttggagaaaggggattcatttagcattgctcgtgtcatcttaggtacaaagaaagcaagtatagaaatgttgaaaaacccacacaagctttgtaagcagaaagcattgcggcttgctctcctgatatccagatcggcagcaacctagactaaaatgtcggttttgttgaggctagcaccgatcatccttctgcagattgttatgattactctgactaataatcaacatgaactggagtgagcatctgcatcttgataggtatttgctgatccaagttagcagattcttctttttggagagagatggggtaccgggtacggcatgagtgcaagacaacatacagttgagccgctctatagtaggctcctctttctattattctaactcgggtaatcttctccaatggcggctctctaccatgtctcttgttacatacaacttacgctctgcctttgtaacccattctggtattttgttgcataatgtatgtgattttgtcattagatttgtttttcaatttctgccctagacatcgtcccataggttgattgtgtaactaaacatgaaactgtacataaatggatggaatttgattttaccatgtacatgaaatttgattttgcgtgcggcggctgcctggtctgtgcgttctggtctctgtgcgcagggcgcggcatctgcccggcagcctgctcgccggctgctcggtgagaaaattggctagttgggtactggttttttttttcaattgataaaaaaacaggatctgatggagccttttcatttttgttttactttccgtctcttttatcagcagttgaaaggcgatcacttattctcaatttggtggaatc

SEQ ID NO: 11479 - DNA, 8918 bp, Zea Mays
ggcatctctatccagaagagacccaattgcccagggccgccgccgcgccgacctcgccgtcgcgcgctttgcttctcttgcccccctgcccgtggcctccgccccaattccagcgggacagcctcgatgagccgccaggatcgtcaccagtggcctcgccctaaccacggatacgaccctcgcgccgccgccgccgccgcgcaatggtatggcgccgcttcgatgctgtttcccgaccccggcgcggcggcgctgcacgggataaacccctacggcttcgcccctaaccctttcttcaataacttcctcccccagaactccgctgccctagctgcctaccaactgcagcagcagcaggctcatcacttcgcctcccatgcctaccaccaagcccctaccggtaacaccatgcaccgctctaccaaacccgccgccgctgccaaacctgcgccgccaccgggcaaccagcaggccgtgctggaccgggctcaagaggcggcgaggaaggctcgggaggagctcgtgaagggtggggacggcgtcacggcgtggaaggtggcgcaggcggtgctggtggcgctcaaggctgattcgtgggactccctcggcgtccagccccaggatgtgcctctcctgcgggatctcttcctaatcgagggcaaggtgaacgcattcatccattgctatgttgcagcaagaaaaattgtaacggtttatgatctggaggttgagatatgcaagaatgagggggttgtgcaatttgaagagctgggattgggacctttccttcagcacccgcttgttgcacattattttttagtgccagctgatttgtctgtggtgcctaagctttgtagcgaggaaattatcaataccctgctgaaatttgtggacaaatctaagaaaaaaatcacaattgaagattttttgaaccatcttgcagagaaaaaatcagtctctgggaaggaaaaacttggtgtgcgggtacaaagcttggggttgcatatttccttactacgacaggccaagcaaacagaagtgtctgctgcgaagcttcgagcaaatatgagtggatctggtaatagtagtcaggagaaggatttgttgaaaaatgcaagtttccatactcacaagaaggctttggacaagaggttcatttctttaactaatcgtataaaagagttaccaggcatcaataagcatatccattttgattcgaccgatgatgaaactaatagttgtactggttctgaggatggtaaatctgatggcaatgagaatgagaatgaatgttctattcttgacaaaaaggatggtgataagcgtgtgaatagctgcccatatccgtcaaaaactgaagaactggaaaggcttggtttgaaatctgaaattaataaaaggcaatctttagagaatagcaagccaagagacagtgggaaaaaggggaaagttttggaaatgttagcaaattactatgggagaacgatatcagggaagaggagaattagaaatttcttctcacagtacccaggcattggccttctcaatgttgctgttaaatcaatgggatgtggtctgctggatagcatttacgatgtgatacagcttgctgatgagaatgatgtagcttcaagccctcctcctaacaccaccactgaagttatggaaattgagcctccaagtaaagaaaatacaggtagcactaatggagcccatgagaagagtgaagacaacatgactgcacatggtgttgctattgatgatgtcatcaggaggatttcagaatatattgaatccaacagtaaaatctctggtgatgtggctttgcaagtgagggcacttaatgattgtgaaacatgggtaactactcaattttcagcaaatcaattcagtgctcttggccatgggacattccttgagtttttggacaaacattgtcaccagttccgaactgctttgagtagtttctttaaggagggtccttctaattcttcatctctggaagtttctgtactgcagcagcaaattgaatttttactctgtcaagctgagagtaattggctggaagatagtgacttttcagaggatagttttgttatgcttcttaaaaagcaatttccaacaataagctttaatattgtgcaagacaaatctgatggtggagtttctggctttattgaggggcagaagaaagacatacggacatatagtttaaaattttccatctctttgttggagaaacgatggtctggaactttgccaagtagacatgggaatgttgatgaactggggaacattgtcgctgaacaatcttgttaccataccacagtttgctcacgagaggcaattaattgtttactgagggctcctatgctgtctgatctgcatctttggtcccattgggattcgctatttgctcctacactgggctcctttgtacattggttgctgaatactggtccaattcaagagctcgcatgcattgcgaccacagatggtaggtttattagagtagattcatcagccacagttgaccagtttctggaagctattatccatcgatcaccacttcaagtggcagtgaaactgctttcacttctatacatttacaatggttctatgaacaccccaatgtcattgctaaaatgttatgcacagcgagcaataaagctcatagtagataacaacaatgatttgatgaatgctaaatctgaaaacaaaatatttatgcctgatgagccccaaaacctaagtagtgaaagctctacttgttttgctgatcagtgtcaagaaagctctcaggcgtctcctggaaggttgatcaggtctgatagcttgccaaacattaataacactgttcatttgatcacaaaatttgtacttgattgtcttgatcatctaccttcagaattccgtagtcttgcagcagacatactattggcaggatttcgggttgttactaagaactggcatgcagttatgttgcatgaagccactgaaaacgggcagctttgcatgcttcatgatattggtttgtcacttggagttgtagaatgggttgaagattgccataggttgtgtttaactgatgaagttcatgtgcagacagaaatgcattcttctgccaagcttgcaacacctgcctctgtgggagccacccatgaagattctaacatgcatatttctagtgatgttaatatgatggataagagaaaacaattgtttcctgtcataaatgatcgggctggtatagataaggaagacaataagatgttaaatcctgctggaactgaggcagatgttgcagaactacatactaccagcagatcttctatgatggaagaaacaagtcttgaggaagcatctcttgttattgagactatacgccgtgaagagtttggtctggatcaggcactaagtgacactgagaatagcttgttaaagaagcagcatgctcgacttggcagagcattgcattgcctttcacaagaattatattcccaggattctcatctacttcttgagctggtacagaatgctgacgacaatacatatcctgaggatgttgaagcaacattagcattcattctccaagaggatggtattgctgttctaaacaatgagaggggcttctctgctgagaacattagagcactctgtgatattggtaactcgacaaagaaaggatcaaaccagggttatattggaaataaaggcattggatttaaatcagttttccgggtaactgatgctccggagatccattcaaatggtttccatgtgaaatttgatatcacagatggccagattggttttgtgttgccaactgcagttccaccttacagtaccacttcttttagtagaatgttatccgttgaagatgacaaggatgcccattcattgtggaacacttgcattttacttcccttcagatcaaaatttagggagtgcactggtatgtgctccattgtgtctttgttttcagatctgcacccatctctactgctgttccttcatcgactaaaatgtatcaagtttaagaatttgtttgatgacacacttctgattatgagaagggagattcttggtgatggtattgtgagaatctcgcatgggattgagacaatgagttggttggtggtcagtaagaggctacaaggtaccattgtgcggcatgatgtgtgcaccacagagatagctgtggcgtttactttgcagcagactgaggaaggagattatgaaccttatttgaagcagcaacctgtgtttgcttttcttcctctaaggaattacggtcttaaattcattcttcaaggagattttgttttaccatcttccagagaggaagtggatgcggatagtgcatggaatcagtggttgttgtctgaattcccttctttgtttgtaagtgcccaagaatctttttgtgctcttccctgttttcagaggtgccctggaaaagctgtcacagccttcttgagttttattcctctagcaggagaggttcatggattcttcagccagcttccacacttgatcctttccaagttgcgtctgacccgctgcatgtttttggatggctctactgtgcaatgggtctatccatgcaacacacttaggggttgggatgaacaaactaaaatgttattttcagaaggcttacttcatgaacatcttggtcttggttacctctcaaaaaatattgttatatctgataagttatcaagagccctaggtattcatgactatggaccaaacattttgctagatgccatctcatctatttgccgaattgatggttgtattgagtcattgggcctggaatggctttgtgcttggtttgttaacctttatctgacattgctgtctcattcttctcaaaatgtttcctcagcaagaaacctcgaagacattcttttggataaagttaggaaaataccatgcatcccactttcagatggttcatttacctctatttcagatggtcgtatatggttgccatatgatgttgccagttccattcctgaatgcagtagcattccgaattttccagctctatatggtaatcttcgaactgtaagtccaaaccttctctctgcatgctgcaaaaataaatacctcatggaggaagtcagaataaatgatctggcagacatgctccaaaggatcggggtgcggaagttgtctgggcatgacattgttaaaaatcacatcatggtgtccttgcgtaacggtttagatgctaatgtggctgatatagtgattagagagtatgtgagctttattatggttcatcttcagtcttcttgcaccagctgtaactttgaaagaggagagatagtgtcagaactacggaagagtcctatcttccttacaaaccatggatacaagagcccagctgatgaaccaattcacttcagtaaagattatggaaattccgtggatgttactagactgcttcagaatgtagaaataagttggattgaacttgatagtagctatttgcagcatcatggttcacagtcgtcatcatttgcacgggaaaaatggaggcaattttttgaagaaatgggtgtgactgattttgtgcaggtagtgaaagttgaaaaaactttatcccaagttgattctattctagcaggaggactttctctagctgatgtatctacaaaacaatgtacagtgtatgactgggagtcaccagaattatctagaattttatcaatattttcttcaaaaagatgcaaggaaaattgtgtatatcttctggaagttcttgatagattctgggatgatcattatagtgcaaaatctaggatcttcacagatgctacacattgtggtgaaaacagagcagttgaatcatcatttatgaagtgcattcaaagcttcaaatggatagcatcaagaatggatgaggatcttcattatgcaacagatttattctatgattgtgaaaatgtccgctctctttttggtagtgtggctccatatgctgtaccgcaggtatctagcagttcacttaagaaggccattggattcaaaacagaggtatcttactgtgatgcattgatggtcctgaagtcttggataacgtcaaaggttccctttagagcaagtatgagccagatgtgcaaattctataccttcttgtctgaaggcgtggcagacgcaaagattgacattaaacgggagttcatgtcgtctccttctatatttacaccactacagcgtcctcgggcaagtgaggttattcctggaaggtttttggcgccagaagacctctattggcatgacccaacaggatgttctgaaataacagaggatttcgttgcaacgaaaaacagaagtatgttcccaagaaaaatgctgtctgcagcctatccaaacctttatgaattatttactctgacatgcggtgtaccaaaggccccaacaacatcaaattatgttgagatgctgctacggttgtcaaccattgcattgccttcacaggcaggaaaccatgtcttttgtgtatttgtgagatgggccaagtgtatgcattctgaaagtgacaagatgaatgatatattgtacttgaaagaatcccttcagaaattagaaacaacaatattgcccacctcagccgataaatgggtctctctacatccttcttttggccttgtttgctgggtagatgatgatgagctaaagcaacagtttgttaactctaatgatgtttacttcatacaatttggcgacctttcttctgaggataagcaaatgttgtatggaagagttgctgctttaatgaaaagcttaggcatccaagcactttcaaaggttgtgtatcgtgaagcaatattttatggtacatcagagaacagagaaaaggtttccttgatttgttggctgttgccatacatgcaacgttacatctataagatgcatagagatacttatatcaacttccagaaaaacgacatcatgaagattagcaacctgcaagtagtagttgttgacaagttattccacaagtatgtactgaggggactcgagagttcttctaagaaaagattccaatgtcattgtcttttgcagggagatactctatatgcaacacaagaggctgactcacattcagtatttttggagctttctagaattttctttgatggatcccatgatcttcattttgcaaattttctacacatgatcaaaaccatggccgaatctggcactcatgctgagcaaatagagacttttatcgttaataatcagaatgtgcctgagttacctgagcatgaagctatctggtccttctcttccttgtctgcagccaaacatggttcagcgaaccaaggtggtgctgatacccagggggttgatttccaacctgtccatgaatttagtattcccaatcatcagaaggcacaggtgatggtttctagttggcctctaaactattggagaacagcacccgtcttcagaacacctctcataaaccagcatgcaagcatgcaagaggcaaaggtgaatgatgctggaccttcatcaaacttaaacatgcctgctatgtatggacacaccgaagatagtttgctttctgctgatcttgaaagggattggattatagaagagaatccaagaactgaaactacattgtttggagatagttcatcggaaatccttgatgagcctcagatggtgatgtctgctgaacctttccatgcacctgcttatttgaacttggaggctggaaattcaagcccaacggttcatgtcgagctaacaaattccgatgagaaactggccaatcttgcagaagacaagaatcagcgactttcagatgcaaaccagttaagaacagggaggcttggtgaagaactggtcgagaaatatttggccaaacagctaggttccaacaatgttaggtgggtgaacaacagaattgaaaccggactgccttatgatattgttataacacacccagagggtttcacagagtatgtggaggttaaaacaactgtatcttcaagaaaagattggtttgacgtctcagcaagggaatggcagtttgccttggagaaaggggattcatttagcattgctcgtgtcatcttaggtacaaagaaagcaagtatagaaatgttgaaaaacccacacaagctttgtaagcagaaagcattgcggcttgctctcctgatatccagatcggcagcaacctagactaaaatgtcggttttgttgaggctagcaccgatcatccttctgcagattgttatgattactctgactaataatcaacatgaactggagtgagcatctgcatcttgataggtatttgctgatccaagttagcagattcttctttttggagagagatggggtaccgggtacggcatgagtgcaagacaacatacagttgagccgctctatagtaggctcctctttctattattctaactcgggtaatcttctccaatggcggctctctaccatgtctcttgttacatacaacttacgctctgcctttgtaacccattctggtattttgttgcataatgtatgtgattttgtcattagatttgtttttcaatttctgccctagacatcgtcccataggttgattgtgtaactaaacatgaaactgtacataaatggatggaatttgattttaccatgtacatgaaatttgattttgcgtgcggcggctgcctggtctgtgcgttctggtctctgtgcgcagggcgcggcatctgcccggcagcctgctcgccggctgctcggtgagaaaattggctagttgggtactggttttttttttcaattgataaaaaaacaggatctgatggagccttttcatttttgttttactttccgtctcttttatcagcagttgaaaggcgatcacttattctcaatttggtggaatc

SEQ ID NO: 11480 - DNA, 8989 bp, Zea Mays
ggcatctctatccagaagagacccaattgcccagggccgccgccgcgccgacctcgccgtcgcgcgctttgcttctcttgcccccctgcccgtggcctccgccccaattccagcgggacagcctcgatgagccgccaggatcgtcaccagtggcctcgccctaaccacggatacgaccctcgcgccgccgccgccgccgcgcaatggtatggcgccgcttcgatgctgtttcccgaccccggcgcggcggcgctgcacgggataaacccctacggcttcgcccctaaccctttcttcaataacttcctcccccagaactccgctgccctagctgcctaccaactgcagcagcagcaggctcatcacttcgcctcccatgcctaccaccaagcccctaccggtaacaccatgcaccgctctaccaaacccgccgccgctgccaaacctgcgccgccaccgggcaaccagcaggccgtgctggaccgggctcaagaggcggcgaggaaggctcgggaggagctcgtgaagggtggggacggcgtcacggcgtggaaggtggcgcaggcggtgctggtggcgctcaaggctgattcgtgggactccctcggcgtccagccccaggatgtgcctctcctgcgggatctcttcctaatcgagggcaaggtgaacgcattcatccattgctatgttgcagcaagaaaaattgtaacggtttatgatctggaggttgagatatgcaagaatgagggggttgtgcaatttgaagagctgggattgggacctttccttcagcacccgcttgttgcacattattttttagtgccagctgatttgtctgtggtgcctaagctttgtagcgaggaaattatcaataccctgctgaaatttgtggacaaatctaagaaaaaaatcacaattgaagattttttgaaccatcttgcagagaaaaaatcagtctctgggaaggaaaaacttggtgtgcgggtacaaagcttgggaaaggccattccattttttactaatttagggaggttttgtaggttgcatatttccttactacgacaggccaagcaaacagaagtgtctgctgcgaagcttcgagcaaatatgagtggatctggtaatagtagtcaggagaaggatttgttgaaaaatgcaagtttccatactcacaagaaggctttggacaagaggttcatttctttaactaatcgtataaaagagttaccaggcatcaataagcatatccattttgattcgaccgatgatgaaactaatagttgtactggttctgaggatggtaaatctgatggcaatgagaatgagaatgaatgttctattcttgacaaaaaggatggtgataagcgtgtgaatagctgcccatatccgtcaaaaactgaagaactggaaaggcttggtttgaaatctgaaattaataaaaggcaatctttagagaatagcaagccaagagacagtgggaaaaaggggaaagttttggaaatgttagcaaattactatgggagaacgatatcagggaagaggagaattagaaatttcttctcacagtacccaggcattggccttctcaatgttgctgttaaatcaatgggatgtggtctgctggatagcatttacgatgtgatacagcttgctgatgagaatgatgtagcttcaagccctcctcctaacaccaccactgaagttatggaaattgagcctccaagtgttgctattgatgatgtcatcaggaggatttcagaatatattgaatccaacagtaaaatctctggtgatgtggctttgcaagtgagggcacttaatgattgtgaaacatgggtaactactcaattttcagcaaatcaattcagtgctcttggccatgggacattccttgagtttttggacaaacattgtcaccagttccgaactgctttgagtagtttctttaaggagggtccttctaattcttcatctctggaagtttctgtactgcagcagcaaattgaatttttactctgtcaagctgagagtaattggctggaagatagtgacttttcagaggatagttttgttatgcttcttaaaaagcaatttccaacaataagctttaatattgtgcaagacaaatctgatggtggagtttctggctttattgaggggcagaagaaagacatacggacatatagtttaaaattttccatctctttgttggagaaacgatggtctggaactttgccaagtagacatgggaatgttgatgaactggggaacattgtcgctgaacaatcttgttaccataccacagtttgctcacgagaggcaattaattgtttactgagggctcctatgctgtctgatctgcatctttggtcccattgggattcgctatttgctcctacactgggctcctttgtacattggttgctgaatactggtccaattcaagagctcgcatgcattgcgaccacagatggtaggtttattagagtagattcatcagccacagttgaccagtttctggaagctattatccatcgatcaccacttcaagtggcagtgaaactgctttcacttctatacatttacaatggttctatgaacaccccaatgtcattgctaaaatgttatgcacagcgagcaataaagctcatagtagataacaacaatgatttgatgaatgctaaatctgaaaacaaaatatttatgcctgatgagccccaaaacctaagtagtgaaagctctacttgttttgctgatcagtgtcaagaaagctctcaggcgtctcctggaaggttgatcaggtctgatagcttgccaaacattaataacactgttcatttgatcacaaaatttgtacttgattgtcttgatcatctaccttcagaattccgtagtcttgcagcagacatactattggcaggatttcgggttgttactaagaactggcatgcagttatgttgcatgaagccactgaaaacgggcagctttgcatgcttcatgatattggtttgtcacttggagttgtagaatgggttgaagattgccataggttgtgtttaactgatgaagttcatgtgcagacagaaatgcattcttctgccaagcttgcaacacctgcctctgtgggagccacccatgaagattctaacatgcatatttctagtgatgttaatatgatggataagagaaaacaattgtttcctgtcataaatgatcgggctggtatagataaggaagacaataagatgttaaatcctgctggaactgaggcagatgttgcagaactacatactaccagcagatcttctatgatggaagaaacaagtcttgaggaagcatctcttgttattgagactatacgccgtgaagagtttggtctggatcaggcactaagtgacactgagaatagcttgttaaagaagcagcatgctcgacttggcagagcattgcattgcctttcacaagaattatattcccaggattctcatctacttcttgagctggtacagaatgctgacgacaatacatatcctgaggatgttgaagcaacattagcattcattctccaagaggatggtattgctgttctaaacaatgagaggggcttctctgctgagaacattagagcactctgtgatattggtaactcgacaaagaaaggatcaaaccagggttatattggaaataaaggcattggatttaaatcagttttccgggtaactgatgctccggagatccattcaaatggtttccatgtgaaatttgatatcacagatggccagattggttttgtgttgccaactgcagttccaccttacagtaccacttcttttagtagaatgttatccgttgaagatgacaaggatgcccattcattgtggaacacttgcattttacttcccttcagatcaaaatttagggagtgcactgatctgcacccatctctactgctgttccttcatcgactaaaatgtatcaagtttaagaatttgtttgatgacacacttctgattatgagaagggagattcttggtgatggtattgtgagaatctcgcatgggattgagacaatgagttggttggtggtcagtaagaggctacaaggtaccattgtgcggcatgatgtgtgcaccacagagatagctgtggcgtttactttgcagcagactgaggaaggagattatgaaccttatttgaagcagcaacctgtgtttgcttttcttcctctaaggaattacggtcttaaattcattcttcaaggagattttgttttaccatcttccagagaggaagtggatgcggatagtgcatggaatcagtggttgttgtctgaattcccttctttgtttgtaagtgcccaagaatctttttgtgctcttccctgttttcagaggtgccctggaaaagctgtcacagccttcttgagttttattcctctagcaggagaggttcatggattcttcagccagcttccacacttgatcctttccaagttgcgtctgacccgctgcatgtttttggatggctctactgtgcaatgggtctatccatgcaacacacttaggggttgggatgaacaaactaaaatgttattttcagaaggcttacttcatgaacatcttggtcttggttacctctcaaaaaatattgttatatctgataagttatcaagagccctaggtattcatgactatggaccaaacattttgctagatgccatctcatctatttgccgaattgatggttgtattgagtcattgggcctggaatggctttgtgcttggtttgttaacctttatctgacattgctgtctcattcttctcaaaatgtttcctcagcaagaaacctcgaagacattcttttggataaagttaggaaaataccatgcatcccactttcagatggttcatttacctctatttcagatggtcgtatatggttgccatatgatgttgccagttccattcctgaatgcagtagcattccgaattttccagctctatatggtaatcttcgaactgtaagtccaaaccttctctctgcatgctgcaaaaataaatacctcatggaggaagtcagaataaatgatctggcagacatgctccaaaggatcggggtgcggaagttgtctgggcatgacattgttaaaaatcacatcatggtgtccttgcgtaacggtttagatgctaatgtggctgatatagtgattagagagtatgtgagctttattatggttcatcttcagtcttcttgcaccagctgtaactttgaaagaggagagatagtgtcagaactacggaagagtcctatcttccttacaaaccatggatacaagagcccagctgatgaaccaattcacttcagtaaagattatggaaattccgtggatgttactagactgcttcagaatgtagaaataagttggattgaacttgatagtagctatttgcagcatcatggttcacagtcgtcatcatttgcacgggaaaaatggaggcaattttttgaagaaatgggtgtgactgattttgtgcagtgtatgactgggagtcaccagaattatctagaattttatcaatattttcttcaaaaagatgcaaggaaaattgtgtatatcttctggaagttcttgatagattctgggatgatcattatagtgcaaaatctaggatcttcacagatgctacacattgtggtgaaaacagagcagttgaatcatcatttatgaagtgcattcaaagcttcaaatggatagcatcaagaatggatgaggatcttcattatgcaacagatttattctatgattgtgaaaatgtccgctctctttttggtagtgtggctccatatgctgtaccgcaggtatctagcagttcacttaagaaggccattggattcaaaacagaggtatcttactgtgatgcattgatggtcctgaagtcttggataacgtcaaaggttccctttagagcaagtatgagccagatgtgcaaattctataccttcttgtctgaaggcgtggcagacgcaaagattgacattaaacgggagttcatgtcgtctccttctatatttacaccactacagcgtcctcgggcaagtgaggttattcctggaaggtttttggcgccagaagacctctattggcatgacccaacaggatgttctgaaataacagaggatttcgttgcaacgaaaaacagaagtatgttcccaagaaaaatgctgtctgcagcctatccaaacctttatgaattatttactctgacatgcggtgtaccaaaggccccaacaacatcaaattatgttgagatgctgctacggttgtcaaccattgcattgccttcacaggcaggaaaccatgtcttttgtgtatttgtgagatgggccaagtgtatgcattctgaaagtgacaagatgaatgatatattgtacttgaaagaatcccttcagaaattagaaacaacaatattgcccacctcagccgataaatgggtctctctacatccttcttttggccttgtttgctgggtagatgatgatgagctaaagcaacagtttgttaactctaatgatgtttacttcatacaatttggcgacctttcttctgaggataagcaaatgttgtatggaagagttgctgctttaatgaaaagcttaggcatccaagcactttcaaaggttgtgtatcgtgaagcaatattttatggtacatcagagaacagagaaaaggtttccttgatttgttggctgttgccatacatgcaacgttacatctataagatgcatagagatacttatatcaacttccagaaaaacgacatcatgaagattagcaacctgcaagtagtagttgttgacaagttattccacaagtatgtactgaggggactcgagagttcttctaagaaaagattccaatgtcattgtcttttgcagggagatactctatatgcaacacaagaggctgactcacattcagtatttttggagctttctagaattttctttgatggatcccatgatcttcattttgcaaattttctacacatgatcaaaaccatggccgaatctggcactcatgctgagcaaatagagacttttatcgttaataatcagaatgtgcctgagttacctgagcatgaagctatctggtccttctcttccttgtctgcagccaaacatggttcagcgaaccaaggtggtgctgatacccagggggttgatttccaacctgtccatgaatttagtattcccaatcatcagaaggcacaggtgatggtttctagttggcctctaaactattggagaacagcacccgtcttcagaacacctctcataaaccagcatgcaagcatgcaagaggcaaaggtgaatgatgctggaccttcatcaaacttaaacatgcctgctatgtatggacacaccgaagatagtttgctttctgctgatcttgaaagggattggattatagaagagaatccaagaactgaaactacattgtttggagatagttcatcggaaatccttgatgagcctcagatggtgatgtctgctgaacctttccatgcacctgcttatttgaacttggaggctggaaattcaagcccaacggttcatgtcgagctaacaaattccgatgagaaactggccaatcttgcagaagacaagaatcggcgactttcagatgcaagccagttaagaacaggttcaaacccaatggttgatgttgagctaacaaatttcgatgagaaactggccaatcttgcagaaggcaagaatcagcgactttcagatgcaagccagttaagaacaggttcaaacccaatggttgatgttgagctaacaaatttcgatgagaaactggccattcttgcagaagacaagaatcagcgactttcagatgcaaaccagttaagaacagggaggcttggtgaagaactggtcgagaaatatttggccaaacagctaggttccaacaatgttaggtgggtgaacaacagaattgaaaccggactgccttatgatattgttataacacacccagagggtttcacagagtatgtggaggttaaaacaactgtatcttcaagaaaagattggtttgacgtctcagcaagggaatggcagtttgccttggagaaaggggattcatttagcattgctcgtgtcatcttaggtacaaagaaagcaagtatagaaatgttgaaaaacccacacaagctttgtaagcagaaagcattgcggcttgctctcctgatatccagatcggcagcaacctagactaaaatgtcggttttgttgaggctagcaccgatcatccttctgcagattgttatgattactctgactaataatcaacatgaactggagtgagcatctgcatcttgataggtatttgctgatccaagttagcagattcttctttttggagagagatggggtaccgggtacggcatgagtgcaagacaacatacagttgagccgctctatagtaggctcctctttctattattctaactcgggtaatcttctccaatggcggctctctaccatgtctcttgttacatacaacttacgctctgcctttgtaacccattctggtattttgttgcataatgtatgtgattttgtcattagatttgtttttcaatttctgccctagacatcgtcccataggttgattgtgtaactaaacatgaaactgtacataaatggatggaatttgattttaccatgtacatgaaatttgattttgcgtgcggcggctgcctggtctgtgcgttctggtctctgtgcgcagggcgcggcatctgcccggcagcctgctcgccggctgctcggtgagaaaattggctagttgggtactggttttttttttcaattgataaaaaaacaggatctgatggagccttttcatttttgttttactttccgtctcttttatcagcagttgaaaggcgatcacttattctcaatttggtggaatc

SEQ ID NO: 11481 - DNA, 9314 bp, Zea Mays
ggcatctctatccagaagagacccaattgcccagggccgccgccgcgccgacctcgccgtcgcgcgctttgcttctcttgcccccctgcccgtggcctccgccccaattccagcgggacagcctcgatgagccgccaggatcgtcaccagtggcctcgccctaaccacggatacgaccctcgcgccgccgccgccgccgcgcaatggtatggcgccgcttcgatgctgtttcccgaccccggcgcggcggcgctgcacgggataaacccctacggcttcgcccctaaccctttcttcaataacttcctcccccagaactccgctgccctagctgcctaccaactgcagcagcagcaggctcatcacttcgcctcccatgcctaccaccaagcccctaccggtaacaccatgcaccgctctaccaaacccgccgccgctgccaaacctgcgccgccaccgggcaaccagcaggccgtgctggaccgggctcaagaggcggcgaggaaggctcgggaggagctcgtgaagggtggggacggcgtcacggcgtggaaggtggcgcaggcggtgctggtggcgctcaaggctgattcgtgggactccctcggcgtccagccccaggatgtgcctctcctgcgggatctcttcctaatcgagggcaaggtgaacgcattcatccattgctatgttgcagcaagaaaaattgtaacggtttatgatctggaggttgagatatgcaagaatgagggggttgtgcaatttgaagagctgggattgggacctttccttcagcacccgcttgttgcacattattttttagtgccagctgatttgtctgtggtgcctaagctttgtagcgaggaaattatcaataccctgctgaaatttgtggacaaatctaagaaaaaaatcacaattgaagattttttgaaccatcttgcagagaaaaaatcagtctctgggaaggaaaaacttggtgtgcgggtacaaagcttggggttgcatatttccttactacgacaggccaagcaaacagaagtgtctgctgcgaagcttcgagcaaatatgagtggatctggtaatagtagtcaggagaaggatttgttgaaaaatgcaagtttccatactcacaagaaggctttggacaagaggttcatttctttaactaatcgtataaaagagttaccaggcatcaataagcatatccattttgattcgaccgatgatgaaactaatagttgtactggttctgaggatggtaaatctgatggcaatgagaatgagaatgaatgttctattcttgacaaaaaggatggtgataagcgtgtgaatagctgcccatatccgtcaaaaactgaagaactggaaaggcttggtttgaaatctgaaattaataaaaggcaatctttagagaatagcaagccaagagacagtgggaaaaaggggaaagtaagtgaaaaaagaaaatatgaagaaatcgggagtcctagctgttcgttcaagcagcctaagaagcagcaaaagttgcaaaaacatgaagcatcaccgaaatgtttcctaagtataggtaagctggaaaattttgtaacaacatggaaggaaacatgtcgtgaacatccagttcaacaggttttggaaatgttagcaaattactatgggagaacgatatcagggaagaggagaattagaaatttcttctcacagtacccaggcattggccttctcaatgttgctgttaaatcaatgggatgtggtctgctggatagcatttacgatgtgatacagcttgctgatgagaatgatgtagcttcaagccctcctcctaacaccaccactgaagttatggaaattgagcctccaagtaaagaaaatacaggtagcactaatggagcccatgagaagagtgaagacaacatgactgcacatggtgttgctattgatgatgtcatcaggaggatttcagaatatattgaatccaacagtaaaatctctggtgatgtggctttgcaagtgagggcacttaatgattgtgaaacatgggtaactactcaattttcagcaaatcaattcagtgctcttggccatgggacattccttgagtttttggacaaacattgtcaccagttccgaactgctttgagtagtttctttaaggagggtccttctaattcttcatctctggaagtttctgtactgcagcagcaaattgaatttttactctgtcaagctgagagtaattggctggaagatagtgacttttcagaggatagttttgttatgcttcttaaaaagcaatttccaacaataagctttaatattgtgcaagacaaatctgatggtggagtttctggctttattgaggggcagaagaaagacatacggacatatagtttaaaattttccatctctttgttggagaaacgatggtctggaactttgccaagtagacatgggaatgttgatgaactggggaacattgtcgctgaacaatcttgttaccataccacagtttgctcacgagaggcaattaattgtttactgagggctcctatgctgtctgatctgcatctttggtcccattgggattcgctatttgctcctacactgggctcctttgtacattggttgctgaatactggtccaattcaagagctcgcatgcattgcgaccacagatggtaggtttattagagtagattcatcagccacagttgaccagtttctggaagctattatccatcgatcaccacttcaagtggcagtgaaactgctttcacttctatacatttacaatggttctatgaacaccccaatgtcattgctaaaatgttatgcacagcgagcaataaagctcatagtagataacaacaatgatttgatgaatgctaaatctgaaaacaaaatatttatgcctgatgagccccaaaacctaagtagtgaaagctctacttgttttgctgatcagtgtcaagaaagctctcaggcgtctcctggaaggttgatcaggtctgatagcttgccaaacattaataacactgttcatttgatcacaaaatttgtacttgattgtcttgatcatctaccttcagaattccgtagtcttgcagcagacatactattggcaggatttcgggttgttactaagaactggcatgcagttatgttgcatgaagccactgaaaacgggcagctttgcatgcttcatgatattggtttgtcacttggagttgtagaatgggttgaagattgccataggttgtgtttaactgatgaagttcatgtgcagacagaaatgcattcttctgccaagcttgcaacacctgcctctgtgggagccacccatgaagattctaacatgcatatttctagtgatgttaatatgatggataagagaaaacaattgtttcctgtcataaatgatcgggctggtatagataaggaagacaataagatgttaaatcctgctggaactgaggcagatgttgcagaactacatactaccagcagatcttctatgatggaagaaacaagtcttgaggaagcatctcttgttattgagactatacgccgtgaagagtttggtctggatcaggcactaagtgacactgagaatagcttgttaaagaagcagcatgctcgacttggcagagcattgcattgcctttcacaagaattatattcccaggattctcatctacttcttgagctggtacagaatgctgacgacaatacatatcctgaggatgttgaagcaacattagcattcattctccaagaggatggtattgctgttctaaacaatgagaggggcttctctgctgagaacattagagcactctgtgatattggtaactcgacaaagaaaggatcaaaccagggttatattggaaataaaggcattggatttaaatcagttttccgggtaactgatgctccggagatccattcaaatggtttccatgtgaaatttgatatcacagatggccagattggttttgtgttgccaactgcagttccaccttacagtaccacttcttttagtagaatgttatccgttgaagatgacaaggatgcccattcattgtggaacacttgcattttacttcccttcagatcaaaatttagggagtgcactggtatgtgctccattgtgtctttgttttcagatctgcacccatctctactgctgttccttcatcgactaaaatgtatcaagtttaagaatttgtttgatgacacacttctgattatgagaagggagattcttggtgatggtattgtgagaatctcgcatgggattgagacaatgagttggttggtggtcagtaagaggctacaaggtaccattgtgcggcatgatgtgtgcaccacagagatagctgtggcgtttactttgcagcagactgaggaaggagattatgaaccttatttgaagcagcaacctgtgtttgcttttcttcctctaaggaattacggtcttaaattcattcttcaaggagattttgttttaccatcttccagagaggaagtggatgcggatagtgcatggaatcagtggttgttgtctgaattcccttctttgtttgtaagtgcccaagaatctttttgtgctcttccctgttttcagaggtgccctggaaaagctgtcacagccttcttgagttttattcctctagcaggagaggttcatggattcttcagccagcttccacacttgatcctttccaagttgcgtctgacccgctgcatgtttttggatggctctactgtgcaatgggtctatccatgcaacacacttaggggttgggatgaacaaactaaaatgttattttcagaaggcttacttcatgaacatcttggtcttggttacctctcaaaaaatattgttatatctgataagttatcaagagccctaggtattcatgactatggaccaaacattttgctagatgccatctcatctatttgccgaattgatggttgtattgagtcattgggcctggaatggctttgtgcttggtttgttaacctttatctgacattgctgtctcattcttctcaaaatgtttcctcagcaagaaacctcgaagacattcttttggataaagttaggaaaataccatgcatcccactttcagatggttcatttacctctatttcagatggtcgtatatggttgccatatgatgttgccagttccattcctgaatgcagtagcattccgaattttccagctctatatggtaatcttcgaactgtaagtccaaaccttctctctgcatgctgcaaaaataaatacctcatggaggaagtcagaataaatgatctggcagacatgctccaaaggatcggggtgcggaagttgtctgggcatgacattgttaaaaatcacatcatggtgtccttgcgtaacggtttagatgctaatgtggctgatatagtgattagagagtatgtgagctttattatggttcatcttcagtcttcttgcaccagctgtaactttgaaagaggagagatagtgtcagaactacggaagagtcctatcttccttacaaaccatggatacaagagcccagctgatgaaccaattcacttcagtaaagattatggaaattccgtggatgttactagactgcttcagaatgtagaaataagttggattgaacttgatagtagctatttgcagcatcatggttcacagtcgtcatcatttgcacgggaaaaatggaggcaattttttgaagaaatgggtgtgactgattttgtgcaggtagtgaaagttgaaaaaactttatcccaagttgattctattctagcaggaggactttctctagctgatgtatctacaaaacaatgtacagtgtatgactgggagtcaccagaattatctagaattttatcaatattttcttcaaaaagatgcaaggaaaattgtgtatatcttctggaagttcttgatagattctgggatgatcattatagtgcaaaatctaggatcttcacagatgctacacattgtggtgaaaacagagcagttgaatcatcatttatgaagtgcattcaaagcttcaaatggatagcatcaagaatggatgaggatcttcattatgcaacagatttattctatgattgtgaaaatgtccgctctctttttggtagtgtggctccatatgctgtaccgcaggtatctagcagttcacttaagaaggccattggattcaaaacagaggtatcttactgtgatgcattgatggtcctgaagtcttggataacgtcaaaggttccctttagagcaagtatgagccagatgtgcaaattctataccttcttgtctgaaggcgtggcagacgcaaagattgacattaaacgggagttcatgtcgtctccttctatatttacaccactacagcgtcctcgggcaagtgaggttattcctggaaggtttttggcgccagaagacctctattggcatgacccaacaggatgttctgaaataacagaggatttcgttgcaacgaaaaacagaagtatgttcccaagaaaaatgctgtctgcagcctatccaaacctttatgaattatttactctgacatgcggtgtaccaaaggccccaacaacatcaaattatgttgagatgctgctacggttgtcaaccattgcattgccttcacaggcaggaaaccatgtcttttgtgtatttgtgagatgggccaagtgtatgcattctgaaagtgacaagatgaatgatatattgtacttgaaagaatcccttcagaaattagaaacaacaatattgcccacctcagccgataaatgggtctctctacatccttcttttggccttgtttgctgggtagatgatgatgagctaaagcaacagtttgttaactctaatgatgtttacttcatacaatttggcgacctttcttctgaggataagcaaatgttgtatggaagagttgctgctttaatgaaaagcttaggcatccaagcactttcaaaggttgtgtatcgtgaagcaatattttatggtacatcagagaacagagaaaaggtttccttgatttgttggctgttgccatacatgcaacgttacatctataagatgcatagagatacttatatcaacttccagaaaaacgacatcatgaagattagcaacctgcaagtagtagttgttgacaagttattccacaagtatgtactgaggggactcgagagttcttctaagaaaagattccaatgtcattgtcttttgcagggagatactctatatgcaacacaagaggctgactcacattcagtatttttggagctttctagaattttctttgatggatcccatgatcttcattttgcaaattttctacacatgatcaaaaccatggccgaatctggcactcatgctgagcaaatagagacttttatcgttaataatcagaatgtgcctgagttacctgagcatgaagctatctggtccttctcttccttgtctgcagccaaacatggttcagcgaaccaaggtggtgctgatacccagggggttgatttccaacctgtccatgaatttagtattcccaatcatcagaaggcacaggtgatggtttctagttggcctctaaactattggagaacagcacccgtcttcagaacacctctcataaaccagcatgcaagcatgcaagaggcaaaggtgaatgatgctggaccttcatcaaacttaaacatgcctgctatgtatggacacaccgaagatagtttgctttctgctgatcttgaaagggattggattatagaagagaatccaagaactgaaactacattgtttggagatagttcatcggaaatccttgatgagcctcagatggtgatgtctgctgaacctttccatgcacctgcttatttgaacttggaggctggaaattcaagcccaacggttcatgtcgagctaacaaattccgatgagaaactggccaatcttgcagaagacaagaatcggcgactttcagatgcaagccagttaagaacaggttcaaacccaatggttgatgttgagctaacaaatttcgatgagaaactggccaatcttgcagaaggcaagaatcagcgactttcagatgcaagccagttaagaacaggttcaaacccaatggttgatgttgagctaacaaatttcgatgagaaactggccattcttgcagaagacaagaatcagcgactttcagatgcaaaccagttaagaacagggaggcttggtgaagaactggtcgagaaatatttggccaaacagctaggttccaacaatgttaggtgggtgaacaacagaattgaaaccggactgccttatgatattgttataacacacccagagggtttcacagagtatgtggaggttaaaacaactgtatcttcaagaaaagattggtttgacgtctcagcaagggaatggcagtttgccttggagaaaggggattcatttagcattgctcgtgtcatcttaggtacaaagaaagcaagtatagaaatgttgaaaaacccacacaagctttgtaagcagaaagcattgcggcttgctctcctgatatccagatcggcagcaacctagactaaaatgtcggttttgttgaggctagcaccgatcatccttctgcagattgttatgattactctgactaataatcaacatgaactggagtgagcatctgcatcttgataggtatttgctgatccaagttagcagattcttctttttggagagagatggggtaccgggtacggcatgagtgcaagacaacatacagttgagccgctctatagtaggctcctctttctattattctaactcgggtaatcttctccaatggcggctctctaccatgtctcttgttacatacaacttacgctctgcctttgtaacccattctggtattttgttgcataatgtatgtgattttgtcattagatttgtttttcaatttctgccctagacatcgtcccataggttgattgtgtaactaaacatgaaactgtacataaatggatggaatttgattttaccatgtacatgaaatttgattttgcgtgcggcggctgcctggtctgtgcgttctggtctctgtgcgcagggcgcggcatctgcccggcagcctgctcgccggctgctcggtgagaaaattggctagttgggtactggttttttttttcaattgataaaaaaacaggatctgatggagccttttcatttttgttttactttccgtctcttttatcagcagttgaaaggcgatcacttattctcaatttggtggaatc

SEQ ID NO: 11482 - DNA, 9032 bp, Zea Mays
ggcatctctatccagaagagacccaattgcccagggccgccgccgcgccgacctcgccgtcgcgcgctttgcttctcttgcccccctgcccgtggcctccgccccaattccagcgggacagcctcgatgagccgccaggatcgtcaccagtggcctcgccctaaccacggatacgaccctcgcgccgccgccgccgccgcgcaatggtatggcgccgcttcgatgctgtttcccgaccccggcgcggcggcgctgcacgggataaacccctacggcttcgcccctaaccctttcttcaataacttcctcccccagaactccgctgccctagctgcctaccaactgcagcagcagcaggctcatcacttcgcctcccatgcctaccaccaagcccctaccggtaacaccatgcaccgctctaccaaacccgccgccgctgccaaacctgcgccgccaccgggcaaccagcaggccgtgctggaccgggctcaagaggcggcgaggaaggctcgggaggagctcgtgaagggtggggacggcgtcacggcgtggaaggtggcgcaggcggtgctggtggcgctcaaggctgattcgtgggactccctcggcgtccagccccaggatgtgcctctcctgcgggatctcttcctaatcgagggcaaggtgaacgcattcatccattgctatgttgcagcaagaaaaattgtaacggtttatgatctggaggttgagatatgcaagaatgagggggttgtgcaatttgaagagctgggattgggacctttccttcagcacccgcttgttgcacattattttttagtgccagctgatttgtctgtggtgcctaagctttgtagcgaggaaattatcaataccctgctgaaatttgtggacaaatctaagaaaaaaatcacaattgaagattttttgaaccatcttgcagagaaaaaatcagtctctgggaaggaaaaacttggtgtgcgggtacaaagcttggggttgcatatttccttactacgacaggccaagcaaacagaagtgtctgctgcgaagcttcgagcaaatatgagtggatctggtaatagtagtcaggagaaggatttgttgaaaaatgcaagtttccatactcacaagaaggctttggacaagaggttcatttctttaactaatcgtataaaagagttaccaggcatcaataagcatatccattttgattcgaccgatgatgaaactaatagttgtactggttctgaggatggtaaatctgatggcaatgagaatgagaatgaatgttctattcttgacaaaaaggatggtgataagcgtgtgaatagctgcccatatccgtcaaaaactgaagaactggaaaggcttggtttgaaatctgaaattaataaaaggcaatctttagagaatagcaagccaagagacagtgggaaaaaggggaaagtaagtgaaaaaagaaaatatgaagaaatcgggagtcctagctgttcgttcaagcagcctaagaagcagcaaaagttgcaaaaacatgaagcatcaccgaaatgtttcctaagtataggtaagctggaaaattttgtaacaacatggaaggaaacatgtcgtgaacatccagttcaacaggttttggaaatgttagcaaattactatgggagaacgatatcagggaagaggagaattagaaatttcttctcacagtacccaggcattggccttctcaatgttgctgttaaatcaatgggatgtggtctgctggatagcatttacgatgtgatacagcttgctgatgagaatgatgtagcttcaagccctcctcctaacaccaccactgaagttatggaaattgagcctccaagtgttgctattgatgatgtcatcaggaggatttcagaatatattgaatccaacagtaaaatctctggtgatgtggctttgcaagtgagggcacttaatgattgtgaaacatgggtaactactcaattttcagcaaatcaattcagtgctcttggccatgggacattccttgagtttttggacaaacattgtcaccagttccgaactgctttgagtagtttctttaaggagggtccttctaattcttcatctctggaagtttctgtactgcagcagcaaattgaatttttactctgtcaagctgagagtaattggctggaagatagtgacttttcagaggatagttttgttatgcttcttaaaaagcaatttccaacaataagctttaatattgtgcaagacaaatctgatggtggagtttctggctttattgaggggcagaagaaagacatacggacatatagtttaaaattttccatctctttgttggagaaacgatggtctggaactttgccaagtagacatgggaatgttgatgaactggggaacattgtcgctgaacaatcttgttaccataccacagtttgctcacgagaggcaattaattgtttactgagggctcctatgctgtctgatctgcatctttggtcccattgggattcgctatttgctcctacactgggctcctttgtacattggttgctgaatactggtccaattcaagagctcgcatgcattgcgaccacagatggtaggtttattagagtagattcatcagccacagttgaccagtttctggaagctattatccatcgatcaccacttcaagtggcagtgaaactgctttcacttctatacatttacaatggttctatgaacaccccaatgtcattgctaaaatgttatgcacagcgagcaataaagctcatagtagataacaacaatgatttgatgaatgctaaatctgaaaacaaaatatttatgcctgatgagccccaaaacctaagtagtgaaagctctacttgttttgctgatcagtgtcaagaaagctctcaggcgtctcctggaaggttgatcaggtctgatagcttgccaaacattaataacactgttcatttgatcacaaaatttgtacttgattgtcttgatcatctaccttcagaattccgtagtcttgcagcagacatactattggcaggatttcgggttgttactaagaactggcatgcagttatgttgcatgaagccactgaaaacgggcagctttgcatgcttcatgatattggtttgtcacttggagttgtagaatgggttgaagattgccataggttgtgtttaactgatgaagttcatgtgcagacagaaatgcattcttctgccaagcttgcaacacctgcctctgtgggagccacccatgaagattctaacatgcatatttctagtgatgttaatatgatggataagagaaaacaattgtttcctgtcataaatgatcgggctggtatagataaggaagacaataagatgttaaatcctgctggaactgaggcagatgttgcagaactacatactaccagcagatcttctatgatggaagaaacaagtcttgaggaagcatctcttgttattgagactatacgccgtgaagagtttggtctggatcaggcactaagtgacactgagaatagcttgttaaagaagcagcatgctcgacttggcagagcattgcattgcctttcacaagaattatattcccaggattctcatctacttcttgagctggtacagaatgctgacgacaatacatatcctgaggatgttgaagcaacattagcattcattctccaagaggatggtattgctgttctaaacaatgagaggggcttctctgctgagaacattagagcactctgtgatattggtaactcgacaaagaaaggatcaaaccagggttatattggaaataaaggcattggatttaaatcagttttccgggtaactgatgctccggagatccattcaaatggtttccatgtgaaatttgatatcacagatggccagattggttttgtgttgccaactgcagttccaccttacagtaccacttcttttagtagaatgttatccgttgaagatgacaaggatgcccattcattgtggaacacttgcattttacttcccttcagatcaaaatttagggagtgcactggtatgtgctccattgtgtctttgttttcagatctgcacccatctctactgctgttccttcatcgactaaaatgtatcaagtttaagaatttgtttgatgacacacttctgattatgagaagggagattcttggtgatggtattgtgagaatctcgcatgggattgagacaatgagttggttggtggtcagtaagaggctacaaggtaccattgtgcggcatgatgtgtgcaccacagagatagctgtggcgtttactttgcagcagactgaggaaggagattatgaaccttatttgaagcagcaacctgtgtttgcttttcttcctctaaggaattacggtcttaaattcattcttcaaggagattttgttttaccatcttccagagaggaagtggatgcggatagtgcatggaatcagtggttgttgtctgaattcccttctttgtttgtaagtgcccaagaatctttttgtgctcttccctgttttcagaggtgccctggaaaagctgtcacagccttcttgagttttattcctctagcaggagaggttcatggattcttcagccagcttccacacttgatcctttccaagttgcgtctgacccgctgcatgtttttggatggctctactgtgcaatgggtctatccatgcaacacacttaggggttgggatgaacaaactaaaatgttattttcagaaggcttacttcatgaacatcttggtcttggttacctctcaaaaaatattgttatatctgataagttatcaagagccctaggtattcatgactatggaccaaacattttgctagatgccatctcatctatttgccgaattgatggttgtattgagtcattgggcctggaatggctttgtgcttggtttgttaacctttatctgacattgctgtctcattcttctcaaaatgtttcctcagcaagaaacctcgaagacattcttttggataaagttaggaaaataccatgcatcccactttcagatggttcatttacctctatttcagatggtcgtatatggttgccatatgatgttgccagttccattcctgaatgcagtagcattccgaattttccagctctatatggtaatcttcgaactgtaagtccaaaccttctctctgcatgctgcaaaaataaatacctcatggaggaagtcagaataaatgatctggcagacatgctccaaaggatcggggtgcggaagttgtctgggcatgacattgttaaaaatcacatcatggtgtccttgcgtaacggtttagatgctaatgtggctgatatagtgattagagagtatgtgagctttattatggttcatcttcagtcttcttgcaccagctgtaactttgaaagaggagagatagtgtcagaactacggaagagtcctatcttccttacaaaccatggatacaagagcccagctgatgaaccaattcacttcagtaaagattatggaaattccgtggatgttactagactgcttcagaatgtagaaataagttggattgaacttgatagtagctatttgcagcatcatggttcacagtcgtcatcatttgcacgggaaaaatggaggcaattttttgaagaaatgggtgtgactgattttgtgcaggtagtgaaagttgaaaaaactttatcccaagttgattctattctagcaggaggactttctctagctgatgtatctacaaaacaatgtacagtgtatgactgggagtcaccagaattatctagaattttatcaatattttcttcaaaaagatgcaaggaaaattgtgtatatcttctggaagttcttgatagattctgggatgatcattatagtgcaaaatctaggatcttcacagatgctacacattgtggtgaaaacagagcagttgaatcatcatttatgaagtgcattcaaagcttcaaatggatagcatcaagaatggatgaggatcttcattatgcaacagatttattctatgattgtgaaaatgtccgctctctttttggtagtgtggctccatatgctgtaccgcaggtatctagcagttcacttaagaaggccattggattcaaaacagaggtatcttactgtgatgcattgatggtcctgaagtcttggataacgtcaaaggttccctttagagcaagtatgagccagatgtgcaaattctataccttcttgtctgaaggcgtggcagacgcaaagattgacattaaacgggagttcatgtcgtctccttctatatttacaccactacagcgtcctcgggcaagtgaggttattcctggaaggtttttggcgccagaagacctctattggcatgacccaacaggatgttctgaaataacagaggatttcgttgcaacgaaaaacagaagtatgttcccaagaaaaatgctgtctgcagcctatccaaacctttatgaattatttactctgacatgcggtgtaccaaaggccccaacaacatcaaattatgttgagatgctgctacggttgtcaaccattgcattgccttcacaggcaggaaaccatgtcttttgtgtatttgtgagatgggccaagtgtatgcattctgaaagtgacaagatgaatgatatattgtacttgaaagaatcccttcagaaattagaaacaacaatattgcccacctcagccgataaatgggtctctctacatccttcttttggccttgtttgctgggtagatgatgatgagctaaagcaacagtttgttaactctaatgatgtttacttcatacaatttggcgacctttcttctgaggataagcaaatgttgtatggaagagttgctgctttaatgaaaagcttaggcatccaagcactttcaaaggttgtgtatcgtgaagcaatattttatggtacatcagagaacagagaaaaggtttccttgatttgttggctgttgccatacatgcaacgttacatctataagatgcatagagatacttatatcaacttccagaaaaacgacatcatgaagattagcaacctgcaagtagtagttgttgacaagttattccacaagtatgtactgaggggactcgagagttcttctaagaaaagattccaatgtcattgtcttttgcagggagatactctatatgcaacacaagaggctgactcacattcagtatttttggagctttctagaattttctttgatggatcccatgatcttcattttgcaaattttctacacatgatcaaaaccatggccgaatctggcactcatgctgagcaaatagagacttttatcgttaataatcagaatgtgcctgagttacctgagcatgaagctatctggtccttctcttccttgtctgcagccaaacatggttcagcgaaccaaggtggtgctgatacccagggggttgatttccaacctgtccatgaatttagtattcccaatcatcagaaggcacaggtgatggtttctagttggcctctaaactattggagaacagcacccgtcttcagaacacctctcataaaccagcatgcaagcatgcaagaggcaaaggtgaatgatgctggaccttcatcaaacttaaacatgcctgctatgtatggacacaccgaagatagtttgctttctgctgatcttgaaagggattggattatagaagagaatccaagaactgaaactacattgtttggagatagttcatcggaaatccttgatgagcctcagatggtgatgtctgctgaacctttccatgcacctgcttatttgaacttggaggctggaaattcaagcccaacggttcatgtcgagctaacaaattccgatgagaaactggccaatcttgcagaagacaagaatcagcgactttcagatgcaaaccagttaagaacagggaggcttggtgaagaactggtcgagaaatatttggccaaacagctaggttccaacaatgttaggtgggtgaacaacagaattgaaaccggactgccttatgatattgttataacacacccagagggtttcacagagtatgtggaggttaaaacaactgtatcttcaagaaaagattggtttgacgtctcagcaagggaatggcagtttgccttggagaaaggggattcatttagcattgctcgtgtcatcttaggtacaaagaaagcaagtatagaaatgttgaaaaacccacacaagctttgtaagcagaaagcattgcggcttgctctcctgatatccagatcggcagcaacctagactaaaatgtcggttttgttgaggctagcaccgatcatccttctgcagattgttatgattactctgactaataatcaacatgaactggagtgagcatctgcatcttgataggtatttgctgatccaagttagcagattcttctttttggagagagatggggtaccgggtacggcatgagtgcaagacaacatacagttgagccgctctatagtaggctcctctttctattattctaactcgggtaatcttctccaatggcggctctctaccatgtctcttgttacatacaacttacgctctgcctttgtaacccattctggtattttgttgcataatgtatgtgattttgtcattagatttgtttttcaatttctgccctagacatcgtcccataggttgattgtgtaactaaacatgaaactgtacataaatggatggaatttgattttaccatgtacatgaaatttgattttgcgtgcggcggctgcctggtctgtgcgttctggtctctgtgcgcagggcgcggcatctgcccggcagcctgctcgccggctgctcggtgagaaaattggctagttgggtactggttttttttttcaattgataaaaaaacaggatctgatggagccttttcatttttgttttactttccgtctcttttatcagcagttgaaaggcgatcacttattctcaatttggtggaatc

SEQ ID NO: 11483 - DNA, 926 bp, Zea Mays
cttagcaaagaggtatcaaagaggaatggccagaagaggattatcccatctatgcaaatggtcctggatatgttatatcctctgatattgcagactccattctatcagaatttttaaaccttaaattaaggcttttcaaaatggaggatgtcagcatgggcatgtgggtcgagcggttcaacagcaccagacttgttaaatacgtccacagcgtcaaattttgtcaatttggatgcatagatgattattacactgcacactaccaatcaccgaggcagatgttgtgtttgtgggacaagctgcaggctggaaaagctcaatgttgcaatatgagatagcaacattggaggtggtggtactggtaggcgtttctgtggtggtagtgcctatccttattcatgaaggagaacctagaagccttgaaaataaattaaaccctcgagatgactaacaaattgccatttaacggatttttttggtatagctgaacaggcggtgtttcagctggaaatggaaacagggggaatgggcagcggcctgtaacgactttctgattgagcttgcggcgctcttctttctcgacgtatagacggagttctgtgagcagtatggaacctgcttgggtcttgatttgtaaatgggacgggtagaaagcttagtcaaataactattgcttttggcacttatggctgtggttgcatttataggcaacccagttgtacagatggtagtgtacaagaattttgctgtgctcttaacatggtcataagttatggtttgattagcaggcctacttgtcttaatctggtcataagttatgactttattactggtggacttgtcactatcacgacttcggctctatgactttatgacctttaaccacagttattactactgttcaaaattataattcattttctact

SEQ ID NO: 11484 - DNA, 1708 bp, Zea Mays
gtctgcaccctccactatcaccagataaatggatgggttggtgaagtgtgagaagtggattcgggatgatgaagggcggtcggaggagtcaaaaacgtcatggtggctgaaccggcttattggccgcacaaagacagtctccgttgattggtcatacccattcgtcgaggaccgcctgtttgttctcactctcactgctgggttcgagggttaccatgtgaatgttgatggacggcatgtgacatcatttccataccgcactggatttgttcttgaggatgctactggcttatcattggatggggaccttgatgtgcaatcagtgtttgcggggactctgcccaccacacatcctagcttttctccacagaaacacctagagatgttacccagttggcaggctcctccccttccagacgaaccagttgagattttcatcggtatcctgtcagcaggcaaccattttgctgagcgaatggctgtgagaaagacatggatgtctgctgctcagaagttgccgaatgttgtggcccggttttttgttgccctgcatggcaggaacgagattaatgcagagctgaaaaaggaggctgagtttttcggggacattgttattgtgccattcatggatagctatgatttggttgttctcaagacaattgccatatgcgagtatggggtatgtctaagtgctttctttcttgctactatgaagtccctgtaaaacactttgtcactattataatgaacttgtcctctcaggtccatgttgtatatgctagatacataatgaagtgtgatgatgatacttttgttagacttgattcagtaattgctgaagtgaagaaaatccagaacggtgaaagtctctatatagggaacatgaattatcgtcataagccattgcgtgatggtaaatgggctgttacttatgaggaatggccagaagaggattatcccatctatgcaaatggtcctggatatgttatatcctctgatattgcagactccattctatcagaatttttaaaccttaaattaaggcttttcaaaatggaggatgtcagcatgggcatgtgggtcgagcggttcaacagcaccagacttgttaaatacgtccacagcgtcaaattttgtcaatttggatgcatagatgattattacactgcacactaccaatcaccgaggcagatgttgtgtttgtgggacaagctgcaggctggaaaagctcaatgttgcaatatgagatagcaacattggaggtggtggtactggcggtgtttcagctggaaatggaaacagggggaatgggcagcggcctgtaacgactttctgattgagcttgcggcgctcttctttctcgacgtatagacggagttctgtgagcagtatggaacctgcttgggtcttgatttgtaaatgggacgggtagaaagcttagtcaaataactattgcttttggcacttatggctgtggttgcatttataggcaacccagttgtacagatggtagtgtacaagaattttgctgtgctcttaacatggtcataagttatggtttgattagcaggcctacttgtcttaatctggtcataagttatgactttattactggtggacttgtcactatcacgacttcggctctatgactttatgacctttaaccacagttattactactgttcaaaattataattcattttctact

SEQ ID NO: 11485 - DNA, 2805 bp, Zea Mays
gcccccttccccttcctgtccacgtggcatcggcccgccctccctacgccgcccgcgcccgcaagacggggcccagggctctatgccatgcgccgaacgcacgcggccttcttgcgccacgatcacgcaaaatgttacatttccgcacggctttttaaaatcagggaaggcccagattacgttctataggagggaatttcccgtccaatttattaacatatcgggctccggctcggccacttcgtttgcaccccccgctcggccgcctccaccgctgcctcgctccctccgcgcccaccacggagagcacgcgcggcgtgcagcttccctcgcgcgcctcgccttcccgctgctctgtccgttcacctgcgctcctcctcctagggttaggtcacgcgtcgccgtgggccgcggcgcccggcgcaatgcgaaggccgtcgggggccggcgcgccgtgccgcagccgcgcgatccaggtgctcgtggcggtctccttcgcctacgcgctcgccgtgctgctcctcgagtcgccgttcgtgtccacgtccctgctcggggcgggggcgtccgccgcggcttcgcggaagctccacctcgccggcgcgtgggagggcgtgaggcgcgccgtgccggcgcgccccgccaaacacccgcacagggagaccctctcgtcggacgcggggcgaggacgggcgcgccggttggcagggatcgtctctggcctcgagctctgccacctcaactccacccgctccggctcgctacgcaaggtcgccgccgaggctgccgagtcaggggcccgcgtgttctccgacctggaggctctagcgacggccctggcgtcctcgcgtgattcgtcaggggaggaagagaagagcaagtgccctcactcgatcgtcctcagcggcgacgagttccgggagagggggcgggcggtggagctgccgtgcggcctgacgctgggttcgtatatcacggtcgtcgcgacaccgcacgaggcgcaccctgagcgggatcctaagatcacgctgctcagggagggtgaagagccgatcatggtgtcgcagttcatgatggagctgcaggggctcaagacggtggacggcgaggatccgcccaggattctccacttcaacccgcgcctccgcggcgactggagcggcaagccggtgatcgagcagaacacctgctatcgcatgcagtggggcactccgctccgctgcgaaggctggaggtcacgtgccgacgaggagactgtggatgggttggtgaagtgtgagaagtggattcgggatgatgaagggcggtcggaggagtcaaaaacgtcatggtggctgaaccggcttattggccgcacaaagacagtctccgttgattggtcatacccattcgtcgaggaccgcctgtttgttctcactctcactgctgggttcgagggttaccatgtgaatgttgatggacggcatgtgacatcatttccataccgcactggatttgttcttgaggatgctactggcttatcattggatggggaccttgatgtgcaatcagtgtttgcggggactctgcccaccacacatcctagcttttctccacagaaacacctagagatgttacccagttggcaggctcctccccttccagacgaaccagttgagattttcatcggtatcctgtcagcaggcaaccattttgctgagcgaatggctgtgagaaagacatggatgtctgctgctcagaagttgccgaatgttgtggcccggttttttgttgccctgcatggcaggaacgagattaatgcagagctgaaaaaggaggctgagtttttcggggacattgttattgtgccattcatggatagctatgatttggttgttctcaagacaattgccatatgcgagtatgggacttgattcagtaattgctgaagtgaagaaaatccagaacggtgaaagtctctatatagggaacatgaattatcgtcataagccattgcgtgatggtaaatgggctgttacttatgaggaatggccagaagaggattatcccatctatgcaaatggtcctggatatgttatatcctctgatattgcagactccattctatcagaatttttaaaccttaaattaaggcttttcaaaatggaggatgtcagcatgggcatgtgggtcgagcggttcaacagcaccagacttgttaaatacgtccacagcgtcaaattttgtcaatttggatgcatagatgattattacactgcacactaccaatcaccgaggcagatgttgtgtttgtgggacaagctgcaggctggaaaagctcaatgttgcaatatgagatagcaacattggaggtggtggtactgctgaacaggcggtgtttcagctggaaatggaaacagggggaatgggcagcggcctgtaacgactttctgattgagcttgcggcgctcttctttctcgacgtatagacggagttctgtgagcagtatggaacctgcttgggtcttgatttgtaaatgggacgggtagaaagcttagtcaaataactattgcttttggcacttatggctgtggttgcatttataggcaacccagttgtacagatggtagtgtacaagaattttgctgtgctcttaacatggtcataagttatggtttgattagcaggcctacttgtcttaatctggtcataagttatgactttattactggtggacttgtcactatcacgacttcggctctatgactttatgacctttaaccacagttattactactgttcaaaattataattcattttctact

SEQ ID NO: 11486 - DNA, 595 bp, Zea Mays
cggctaccccatctcgcaacaacgcgcgcgtgctcctatccgcatgccgtctgccatgtgggacccaaagaccaggccgtcggcttcaactacttcgaccgaagttgcgggcgaaatcgtcggcaatcccggtcttctcgcgcggccatggcagcattccctggggctcgcttggactcggccactacagctataaaggcgagaccctaccctcgttaccctcctgttgcctcaactccttgtgacgctcctaccaaaacaccacgcaccaggagagcagaagaagaacacgagagagagaaagaacgctgccgcggatccaggggcagggctaaccatcgcaagtcttccggtttgcgccaccaggatgcgacgcctcatgccgtggacaagtcctggtgccatggatcgctagtggagaacctcactgatgttcgctgggccgagtagaaactagggagaccaccaattctgcggttgccacttggggagaccagaattcgccgttggcggccgaccaccacgacggagcttcgatgcgctgtgggccagggtccctacctcatccccgtcgtgcggtcacaaggatttgaag

SEQ ID NO: 11487 - DNA, 639 bp, Zea Mays
cggctaccccatctcgcaacaacgcgcgcgtgctcctatccgcatgccgtctgccatgtgggacccaaagaccaggccgtcggcttcaactacttcgaccgaagttgcgggcgaaatcgtcggcaatcccggtcttctcgcgcggccatggcagcattccctggggctcgcttggactcggccactacagctataaaggcgagaccctaccctcgttaccctcctgttgcctcaactccttgtgacgctcctaccaaaacaccacgcaccaggagagcagaagaagaacacgagagagagaaagaacgctgccgcggatccaggggcagggctaaccatcgcaagtcttccggtttgcgccaccaggatgcgacgcctcatgccgtggacaagtcctggtgccatggatcgctagtggagaacctcactgatgttcgctgggccgagtagaaactagggagaccaccaattctgcggttgccacttggggagaccagaattcgccgttggcggccgaccaccacgacggagcttcgatgcgctgtgggccagggtccctacctcatccccgtcgtgcggtcacaaggatttgaagaatcaccctggtaactggaatctcaagtgccaggcaagttgtgc

SEQ ID NO: 11488 - DNA, 722 bp, Zea Mays
ttccgtttgatacgacgtctccccttgtttctttacccttctgcctcatctaatttcttcctactcgctccctccgcgtcgtccttctcccggcgccggagcaaagcccaccgacgtccgctaagtcatggcaccatcgccgtcgggagcagcgactttggttcgtcagtgtccctgctcccctgcgcgctttgtcccagtgttgcgtggtggggaaggagaaaagtggtggggaaggagaaaaggtaccggtggaagatggcgctgccgcaacgacgaagtggggagcagttagccatggagtgggatgcgcagaggcggaggtcctgaagcatctacagggaacgataatacgatcagctgggcaaggaaactcccactgataaaggtaaagagaaagcttcctcttcaatctcctccaaagagtcatagcttggaagaaccctacagacaataaagcgagcatcaaggtttctgtgcgtccgtgccatcaggagcaggcacacggtgctttacaacaatgctgcattagcttctcccgagagcattctgcgaaagaatttagaattttagagtctgtttcattcgacgtacaacgagggatagaatggatagtcacattttctatgatgtttgtacgagagtcacgcatatacgagataaacaccggaacaatttatgatgatgacgtgatcctaaaaaattaagtggacaatgtcatc

SEQ ID NO: 11489 - DNA, 416 bp, Zea Mays
cggatgcttcccgtgtctctggatacttccgtttgatacgacgtctccccttgtttctttacccttctgcctcatctaatttcttcctactcgctccctccgcgtcgtccttctcccggcgccggagcaaagcccaccgacgtccgctaagtcatggcaccatcgccgtcgggagcagcgactttggttcgtcagtgtccctgctcccctgcgcgctttgtcccagtgttgcgtggtggggaaggagaaaagtggtggggaaggagaaaaggtaccggtggaagatggcgctgccgcaacgacgaagtggggagcagttagccatggagtgggatgcgcagaggcggaggaaactcccactgataaaggtaaagagaaagcttcctcttcaatctcctccaaagagaatggcccag

SEQ ID NO: 11490 - DNA, 631 bp, Zea Mays
cttccgtttgatacgacgtctccccttgtttctttacccttctgcctcatctaatttcttcctactcgctccctccgcgtcgtccttctcccggcgccggagcaaagcccaccgacgtccgctaagtcatggcaccatcgccgtcgggagcagcgactttggttcgtcagtgtccctgctcccctgcgcgctttgtcccagtgttgcgtggtggggaaggagaaaagtggtggggaaggagaaaaggtaccggtggaagatggcgctgccgcaacgacgaagtggggagcagttagccatggagtgggatgcgcagaggcggaggaaactcccactgataaaggtaaagagaaagcttcctcttcaatctcctccaaagaggagctgccgagagatctagccggagacacgagctgtgctgacaaggaggttgtggggctgttcatctcattggtggacctacaggtatgccgagtatgtaccgacataccctgtaaaaccaacgagtgtatgtatattggcagtattcggcataccctgtaaaaagaaaaaaaatatagtgcactgagcagtatgacgtcatgacatgaggctcattaggtcattaagatgtatagcccgagcgacatca

SEQ ID NO: 11491 - DNA, 1238 bp, Zea Mays
ttatgcttcactgaagagttattatgcttctttcctacataaaatttctctcatactatatttataaaaatgaaaatatgctctggagtgataacaacgactttaggtttactatttttagtgttttgcccaaagaatcattttgttttgttttcttcacacaaattcctaaattaccgaatagccaccatacgctgactaaccaacatacactattaaatactgccagaacaacactaaaaaatgatgacacatatcttattacatactccctccattccaaaatataattcgttttagactaatcattaaatcatacatttatcaaataatatatgaatgtattttgcatatatatatctatattcattatcattaaatgaatgtggacggaaaaaataagctagaaaaaactatattttaggacggatgaaatatttcttatattccatatgtatatataaaaggacatatcaacaaccaacatcatgtgattttagtgaccttttaaatacatgtacgtacaactcacccattgctattatttaacgtttgcaggaaactcccactgataaaggtaaagagaaagcttcctcttcaatctcctccaaagaggttcaaacaaggatcatccatattcaaagattccacagaccaaaaagaccaagaatgatttatgcaaccacacgaagctaactgagattcaaccattaaatacattgcaccacctttgttattgatcctacccttttgtaactaaatataatgctcgcaagtataaacaacccttcctatgtagtactaaacaccaagatcagtttatgtgatgatggaccagttttcctatgtggtactaaacactaggatcagtttatgtgatgtaggatcagtttccctatgtggtactaaacacctgtatcagattatgtgatgtaggatcagtttatgtggcgcagctcatatctattttgacatgaaaactatgtatgttatcagtttgtaactaagtacaatgcaaaccttcagatcgtactaactacttattaaaggcatttcatatctactgttcctttttaattttggtaaaggtcatataacccggcgtgcgctaggcgcgcgtcaaccactagttatatagaaatatcgaaactcaaggtcgactttcccggcccaaagtctcagaacaaacccagcgtcgactggccatggtatataccaacacaaatacacccaaacta

SEQ ID NO: 11492 - DNA, 704 bp, Zea Mays
ggagttattatgcttcactgaagagaaactcccactgataaaggtaaagagaaagcttcctcttcaatctcctccaaagaggttcaaacaaggatcatccatattcaaagattccacagaccaaaaagaccaagaatgatttatgcaaccacacgaagctaactgagattcaaccattaaatacattgcaccacctttgttattgatcctacccttttgtaactaaatataatgctcgcaagtataaacaacccttcctatgtagtactaaacaccaagatcagtttatgtgatgatggaccagttttcctatgtggtactaaacactaggatcagtttatgtgatgtaggatcagtttccctatgtggtactaaacacctgtatcagattatgtgatgtaggatcagtttatgtggcgcagctcatatctattttgacatgaaaactatgtatgttatcagtttgtaactaagtacaatgcaaaccttcagatcgtactaactacttattaaaggcatttcatatctactgttcctttttaattttggtaaaggtcatataacccggcgtgcgctaggcgcgcgtcaaccactagttatatagaaatatcgaaactcaaggtcgactttcccggcccaaagtctcagaacaaacccagcgtcgactggccatggtatataccaacacaaatacacccaaacta

SEQ ID NO: 11493 - DNA, 1088 bp, Zea Mays
acgtctccccttgtttctttacccttctgcctcatctaatttcttcctactcgctccctccgcgtcgtccttctcccggcgccggagcaaagcccaccgacgtccgctaagtcatggcaccatcgccgtcgggagcagcgactttggttcgtcagtgtccctgctcccctgcgcgctttgtcccagtgttgcgtggtggggaaggagaaaagtggtggggaaggagaaaaggtaccggtggaagatggcgctgccgcaacgacgaagtggggagcagttagccatggagtgggatgcgcagaggcggaggtgagataaccagagcagaatatgttgaacaacttcttctccatcccatttcccttcatttgcctactcccttccaccgcatacggataggccctcaaggaaactcccactgataaaggtaaagagaaagcttcctcttcaatctcctccaaagaggttcaaacaaggatcatccatattcaaagattccacagaccaaaaagaccaagaatgatttatgcaaccacacgaagctaactgagattcaaccattaaatacattgcaccacctttgttattgatcctacccttttgtaactaaatataatgctcgcaagtataaacaacccttcctatgtagtactaaacaccaagatcagtttatgtgatgatggaccagttttcctatgtggtactaaacactaggatcagtttatgtgatgtaggatcagtttccctatgtggtactaaacacctgtatcagattatgtgatgtaggatcagtttatgtggcgcagctcatatctattttgacatgaaaactatgtatgttatcagtttgtaactaagtacaatgcaaaccttcagatcgtactaactacttattaaaggcatttcatatctactgttcctttttaattttggtaaaggtcatataacccggcgtgcgctaggcgcgcgtcaaccactagttatatagaaatatcgaaactcaaggtcgactttcccggcccaaagtctcagaacaaacccagcgtcgactggccatggtatataccaacacaaatacacccaaacta

SEQ ID NO: 11494 - DNA, 1049 bp, Zea Mays
ttccgtttgatacgacgtctccccttgtttctttacccttctgcctcatctaatttcttcctactcgctccctccgcgtcgtccttctcccggcgccggagcaaagcccaccgacgtccgctaagtcatggcaccatcgccgtcgggagcagcgactttggttcgtcagtgtccctgctcccctgcgcgctttgtcccagtgttgcgtggtggggaaggagaaaagtggtggggaaggagaaaaggtaccggtggaagatggcgctgccgcaacgacgaagtggggagcagttagccatggagtgggatgcgcagaggcggaggtcctgaagcatctacagggaacgataatacgatcagctgggcaaggaaactcccactgataaaggtaaagagaaagcttcctcttcaatctcctccaaagaggttcaaacaaggatcatccatattcaaagattccacagaccaaaaagaccaagaatgatttatgcaaccacacgaagctaactgagattcaaccattaaatacattgcaccacctttgttattgatcctacccttttgtaactaaatataatgctcgcaagtataaacaacccttcctatgtagtactaaacaccaagatcagtttatgtgatgatggaccagttttcctatgtggtactaaacactaggatcagtttatgtgatgtaggatcagtttccctatgtggtactaaacacctgtatcagattatgtgatgtaggatcagtttatgtggcgcagctcatatctattttgacatgaaaactatgtatgttatcagtttgtaactaagtacaatgcaaaccttcagatcgtactaactacttattaaaggcatttcatatctactgttcctttttaattttggtaaaggtcatataacccggcgtgcgctaggcgcgcgtcaaccactagttatatagaaatatcgaaactcaaggtcgactttcccggcccaaagtctcagaacaaacccagcgtcgactggccatggtatataccaacacaaatacacccaaacta

SEQ ID NO: 11495 - DNA, 1069 bp, Zea Mays
gggtacttcctcgtgtctctggataccttccctccgtctccggatgcttcccgtgtctctggatacttccgtttgatacgacgtctccccttgtttctttacccttctgcctcatctaatttcttcctactcgctccctccgcgtcgtccttctcccggcgccggagcaaagcccaccgacgtccgctaagtcatggcaccatcgccgtcgggagcagcgactttggttcgtcagtgtccctgctcccctgcgcgctttgtcccagtgttgcgtggtggggaaggagaaaagtggtggggaaggagaaaaggtaccggtggaagatggcgctgccgcaacgacgaagtggggagcagttagccatggagtgggatgcgcagaggcggaggaaactcccactgataaaggtaaagagaaagcttcctcttcaatctcctccaaagaggttcaaacaaggatcatccatattcaaagattccacagaccaaaaagaccaagaatgatttatgcaaccacacgaagctaactgagattcaaccattaaatacattgcaccacctttgttattgatcctacccttttgtaactaaatataatgctcgcaagtataaacaacccttcctatgtagtactaaacaccaagatcagtttatgtgatgatggaccagttttcctatgtggtactaaacactaggatcagtttatgtgatgtaggatcagtttccctatgtggtactaaacacctgtatcagattatgtgatgtaggatcagtttatgtggcgcagctcatatctattttgacatgaaaactatgtatgttatcagtttgtaactaagtacaatgcaaaccttcagatcgtactaactacttattaaaggcatttcatatctactgttcctttttaattttggtaaaggtcatataacccggcgtgcgctaggcgcgcgtcaaccactagttatatagaaatatcgaaactcaaggtcgactttcccggcccaaagtctcagaacaaacccagcgtcgactggccatggtatataccaacacaaatacacccaaacta

SEQ ID NO: 11496 - DNA, 2351 bp, Zea Mays
atctccataagatttggctggtttttacgttggtttgctggacctaacacaaccctcctcctttaccgggcttgggaccggctatgttgaaacgactcaaggaagtcttccaatcaacataggcggagttaccaagtttatatagaaaagtatcaatatttatggtaccaaataagtaacattaggttgttcattgaatatattttaatattatgggtgtgtttgattcagctgcgagctgtgaaaaagctgatgaaccgcaaagagtcttgcataatgtgcccagagtgcatccaccacaatcaggtgggaaaataaagaaatcaactaaaaacctttgtcaatatagcgatgagtccttaaatggttcaggaagtttggattgttgtcatcaaggccagtcaggaaggcgaaaaaatcaggattacaccactgaccctggaaggaacgatttacctattgctgctcatggaccacaagttgttctcttaggatcagaccgcaggtataatagctattggctcttccttggtccttgtagggaagatgatccagggcatcgtagggtctacttcgagtcctcagaggatggtcactgggaggtgattgattcaccacaggaattactttccttgctatctatcctcgatagcaggggcactagggaagcacatctccttacatcgatggagaagagacaagcctgcctttttgaagccatgaaaaaacatgtggaaggagggaaggcagccaggcttccagcctcatctgattcatactgctcccagacaagtagtggagatggaacttcgcccaagacaagtagtgtggatggagcttcatctgtatcagacattgagaacacttctgttcctacaagcctcaaagatagtaatttggattcatcgtctgccgtagtaattgaaagtgggaggggaggtgatgagaaaatatctatgtgggaacggctgcaagcatttgataaatggatctggacttctttttactccatccttactgctgttaaaagtggcaagaagtcatttaaggagtcactacttcgttgtggaagttgtcatgatctatattggagagatgaaaagcactgcagaatatgccattcaactttcgaggttggttttgatcttgaagaaaaatatgctgtacatgtggcgacgtgcagggagcctgaactttcacatgaggtaccaaatcataaatttctgccatcacagctacaggcacttaaagcagccattcatgctattgaggcctctatgcctgaggcagcttttactggttcttggatgaagtctgctcacaagctgtgggttaagcggctgcgacgaacgtcatcattgccagagcttttgcaggttcttgtcgattttgtaggggcaatggatgttgattggttgtacaaaagttcatctgcgagattgagaacaaatctggatgacatcattgtcgactttcagacaatgccacaaacaacatcagcagttgcactttgggttgtccaattggatgccctcattgcgccttatttggataatgccatggacagctggtgaatgctaggtagcttacaaagatggattcttttgcgtgatgcacaagcaccccgagctgacttctttttctggcaccatctgcaagttttttcttgatgaaagcttttcatctaggtgagacagaacatggggtctgctttgagttcgagaacaagatcttgcgacttgctgtaaagcatggaatatattgttccctcccagcagagcattgcgtcatagacaatgaaaaagttttgttaataatcgttgcttcagatatgtgaaagttttggctttccatgtagcgacacaattgggatgtaagcaatttctgaaacagaccgctgtttgcaggtggtgctgtttgggacttgattaccagctgtgcccttagttttaacggaggggtggttataattttgttccttctatatctgtatgtgctaagttgctcctagtccgtgagagctttctacattaggctatttttgtatgttatgtaaccagtttctattagagtgcagttgtagacatttagaacatgtacaccaatattgtgactgtttgaacaagtgagggaggcatagaagacttcatacggatgaattcatgattagaataaaattgcaccaaaaatcaattttgaaccgttacctttttggtatctcgtatatgttttttttttgtctatgtagtgctagttgataaatttcggatagatgtaaataggaaactgaaactctattcggatagatgtaaatagaaaaatgaaactctatttgtttaaaataagttaga

SEQ ID NO: 11497 - DNA, 2152 bp, Zea Mays
atctccataagatttggctggtttttacgttggtttgctggacctaacacaaccctcctcctttaccgggcttgggaccggctatgttgaaacgactcaaggaagtcttccaatcaacataggcggagttaccaagtttatatagaaaagtatcaatatttatggtaccaaataagtaacattaggttgttcattgaatatattttaatattatgggtgtgtttgattcagctgcgagctgtgaaaaagctgatgaaccgcaaagagtcttgcataatgtgcccagagtgcatccaccacaatcagggaagatgatccagggcatcgtagggtctacttcgagtcctcagaggatggtcactgggaggtgattgattcaccacaggaattactttccttgctatctatcctcgatagcaggggcactagggaagcacatctccttacatcgatggagaagagacaagcctgcctttttgaagccatgaaaaaacatgtggaaggagggaaggcagccaggcttccagcctcatctgattcatactgctcccagacaagtagtggagatggaacttcgcccaagacaagtagtgtggatggagcttcatctgtatcagacattgagaacacttctgttcctacaagcctcaaagatagtaatttggattcatcgtctgccgtagtaattgaaagtgggaggggaggtgatgagaaaatatctatgtgggaacggctgcaagcatttgataaatggatctggacttctttttactccatccttactgctgttaaaagtggcaagaagtcatttaaggagtcactacttcgttgtggaagttgtcatgatctatattggagagatgaaaagcactgcagaatatgccattcaactttcgaggttggttttgatcttgaagaaaaatatgctgtacatgtggcgacgtgcagggagcctgaactttcacatgaggtaccaaatcataaatttctgccatcacagctacaggcacttaaagcagccattcatgctattgaggcctctatgcctgaggcagcttttactggttcttggatgaagtctgctcacaagctgtgggttaagcggctgcgacgaacgtcatcattgccagagcttttgcaggttcttgtcgattttgtaggggcaatggatgttgattggttgtacaaaagttcatctgcgagattgagaacaaatctggatgacatcattgtcgactttcagacaatgccacaaacaacatcagcagttgcactttgggttgtccaattggatgccctcattgcgccttatttggataatgccatggcaagtatgtttttgttcacaatcgcaatgtctaatgacagctggtgaatgctaggtagcttacaaagatggattcttttgcgtgatgcacaagcaccccgagctgacttctttttctggcaccatctgcaagttttttcttgatgaaagcttttcatctaggtgagacagaacatggggtctgctttgagttcgagaacaagatcttgcgacttgctgtaaagcatggaatatattgttccctcccagcagagcattgcgtcatagacaatgaaaaagttttgttaataatcgttgcttcagatatgtgaaagttttggctttccatgtagcgacacaattgggatgtaagcaatttctgaaacagaccgctgtttgcaggtggtgctgtttgggacttgattaccagctgtgcccttagttttaacggaggggtggttataattttgttccttctatatctgtatgtgctaagttgctcctagtccgtgagagctttctacattaggctatttttgtatgttatgtaaccagtttctattagagtgcagttgtagacatttagaacatgtacaccaatattgtgactgtttgaacaagtgagggaggcatagaagacttcatacggatgaattcatgattagaataaaattgcaccaaaaatcaattttgaaccgttacctttttggtatctcgtatatgttttttttttgtctatgtagtgctagttgataaatttcggatagatgtaaataggaaactgaaactctattcggatagatgtaaatagaaaaatgaaactctatttgtttaaaataagttaga

SEQ ID NO: 11498 - DNA, 3863 bp, Zea Mays
atgcctcgcgaccagatggtgaccaatggttttggagcaaaaagggataatgcaggggcaaaaaaatctccccagcaaattcagaggctggagaagttttactctgatgtacagtatccaaagccagaggaaatgggtgagtatgcaacctgtgttggtttgacttacagtcaggtccgtatatggttcaaagagcgaaggagaaaagagaggaggatggagatgggagccattgggtctcagatggaaaggcaatttagtgcacgttccagtggacctagatgcagcagcagttcttcgttttgtaaccaagctcccatctatgacatttcacgttcagagtcggacacctggggtatgagcacggcaggagaggaaagtaaaattctatcacaagttctgtttcccaaggattatatcctgagcaaaattttccgcaaggatggtccacctcttggtagtgaattcgaccccctcccccaaagtgcacatggctgtatcagagacactacatgccatcattcctctgagaaccaaagaactgtgaagaagagaaagatcatagagtcaactaaccagagatctgatgtgtatgagaatactgctcctgtgaggaaacatggaattggcaaaggtctaatgacagtgtggcatgccatgtattcccataacgtgaaatgtcaaagcggtcgaaatttcattgatgaaactggttgcttgaggtctcttagaccgtttgacgattttgatggattagaagatcgcgataatggaaggaagactcaaaatcaaggtatgacacggaaaaagatagtcaaaaggagtaaagttctggtgaatagaaaaaaggtgccgtgtaagagagttactggtccaaaggtgcatcctccaatggcttgccatctttcagttgatgaatcagaatctttagaactacagactgaactagtgactttagtggatgatgaggagctcgagctcagtgaattacaaacagatttacttgccaagtttcctccacaaagtttgaagatgaaaaagctattctctacaaaaccttgggagtcatcacctgaaatggtgaaaaagctttttcagcccacatatattgattggagaattaatcctgacagattatccggctttgggccaaaacagcatttgctgaatcaagaattctttaacaaggagaaaaatcaaatggctaaatatggtttacgtccccgcacactgaaaggagaattgtttgcactgttgtctaaggcaggaagttgtgggttaaaggtttcagtactagccaaatcatctgagattattgatcttaatgtttcgagcccattagaactagagcagttgatatctttagctctctccagtgacatcacattatttgagaagattgcaccttctgcatatcgtctccgtgttgacccccaaattaaaggggaagaagattctatgtcagatagtgatgattctggaagtgttgatgaggatgaggatgctagccgaagtgatgatggatctgatggttcccaaaagttaaaatttcttgagaatgaaagcagacttgctcgaaggaaggagaaaaatgcacatggaagtccaaataaatgtagtgaaattgatgaaagttattcaggtgaaaaatggcttttggcattgatggaaggcgagtattcagatctaagcattgatgagaagttggattgtttggttgctttaatagatgttgtttctggtgctggttctgttccaagacttgaggaaccgcaaagagtcttgcataatgtgcccagagtgcatccaccacaatcaggtgggaaaataaagaaatcaactaaaaacctttgtcaatatagcgatgagtccttaaatggttcaggaagtttggattgttgtcatcaaggccagtcaggaaggcgaaaaaatcaggattacaccactgaccctggaaggaacgatttacctattgctgctcatggaccacaagttgttctcttaggatcagaccgcaggtataatagctattggctcttccttggtccttgtagggaagatgatccagggcatcgtagggtctacttcgagtcctcagaggatggtcactgggaggtgattgattcaccacaggaattactttccttgctatctatcctcgatagcaggggcactagggaagcacatctccttacatcgatggagaagagacaagcctgcctttttgaagccatgaaaaaacatgtggaaggagggaaggcagccaggcttccagcctcatctgattcatactgctcccagacaagtagtggagatggaacttcgcccaagacaagtagtgtggatggagcttcatctgtatcagacattgagaacacttctgttcctacaagcctcaaagatagtaatttggattcatcgtctgccgtagtaattgaaagtgggaggggaggtgatgagaaaatatctatgtgggaacggctgcaagcatttgataaatggatctggacttctttttactccatccttactgctgttaaaagtggcaagaagtcatttaaggagtcactacttcgttgtggaagttgtcatgatctatattggagagatgaaaagcactgcagaatatgccattcaactttcgaggttggttttgatcttgaagaaaaatatgctgtacatgtggcgacgtgcagggagcctgaactttcacatgaggtaccaaatcataaatttctgccatcacagctacaggcacttaaagcagccattcatgctattgaggcctctatgcctgaggcagcttttactggttcttggatgaagtctgctcacaagctgtgggttaagcggctgcgacgaacgtcatcattgccagagcttttgcaggttcttgtcgattttgtaggggcaatggatgttgattggttgtacaaaagttcatctgcgagattgagaacaaatctggatgacatcattgtcgactttcagacaatgccacaaacaacatcagcagttgcactttgggttgtccaattggatgccctcattgcgccttatttggataatgccatggcaactggtgaatgctaggtagcttacaaagatggattcttttgcgtgatgcacaagcaccccgagctgacttctttttctggcaccatctgcaagttttttcttgatgaaagcttttcatctaggtgagacagaacatggggtctgctttgagttcgagaacaagatcttgcgacttgctgtaaagcatggaatatattgttccctcccagcagagcattgcgtcatagacaatgaaaaagttttgttaataatcgttgcttcagatatgtgaaagttttggctttccatgtagcgacacaattgggatgtaagcaatttctgaaacagaccgctgtttgcaggtggtgctgtttgggacttgattaccagctgtgcccttagttttaacggaggggtggttataattttgttccttctatatctgtatgtgctaagttgctcctagtccgtgagagctttctacattaggctatttttgtatgttatgtaaccagtttctattagagtgcagttgtagacatttagaacatgtacaccaatattgtgactgtttgaacaagtgagggaggcatagaagacttcatacggatgaattcatgattagaataaaattgcaccaaaaatcaattttgaaccgttacctttttggtatctcgtatatgttttttttttgtctatgtagtgctagttgataaatttcggatagatgtaaataggaaactgaaactctattcggatagatgtaaatagaaaaatgaaactctatttgtttaaaataagttaga

SEQ ID NO: 11499 - DNA, 4350 bp, Zea Mays
gcagaaatggccgcagtagtgttttggtccctccgccgccccccacggtctaacacacccgcccgctaattcgccgaccagcctgccatcacccgctcgctgcagccgccgcgcccctcccactcaccaacgcggcaacgcccatggcgcccgtctgctgaaaacacccgccgccatgcctcgcgaccagatggtgaccaatggttttggagcaaaaagggataatgcaggggcaaaaaaatctccccagcaaattcagaggctggagaagttttactctgatgtacagtatccaaagccagaggaaatgggtgagtatgcaacctgtgttggtttgacttacagtcaggtccgtatatggttcaaagagcgaaggagaaaagagaggaggatggagatgggagccattgggtctcagatggaaaggcaatttagtgcacgttccagtggacctagatgcagcagcagttcttcgttttgtaaccaagctcccatctatgacatttcacgttcagagtcggacacctggggtatgagcacggcaggagaggaaagtaaaattctatcacaagttctgtttcccaaggattatatcctgagcaaaattttccgcaaggatggtccacctcttggtagtgaattcgaccccctcccccaaagtgcacatggctgtatcagagacactacatgccatcattcctctgagaaccaaagaactgtgaagaagagaaagatcatagagtcaactaaccagagatctgatgtgtatgagaatactgctcctgtgaggaaacatggaattggcaaaggtctaatgacagtgtggcatgccatgtattcccataacgtgaaatgtcaaagcggtcgaaatttcattgatgaaactggttgcttgaggtctcttagaccgtttgacgattttgatggattagaagatcgcgataatggaaggaagactcaaaatcaaggtatgacacggaaaaagatagtcaaaaggagtaaagttctggtgaatagaaaaaaggtgccgtgtaagagagttactggtccaaaggtgcatcctccaatggcttgccatctttcagttgatgaatcagaatctttagaactacagactgaactagtgactttagtggatgatgaggagctcgagctcagtgaattacaaacaggtccgaatccattgagatgttcagctcacctgtcttcaagtggtagacatgactgccccctttgtaaagatttacttgccaagtttcctccacaaagtttgaagatgaaaaagctattctctacaaaaccttgggagtcatcacctgaaatggtgaaaaagctttttcagtattgatgtccaccccttcatatttgatgagtttgtgcaagcattccatgacaaggactcctcgttgttgggggaagtacatgttggtcttctcaagctactgttgttaaaggctgaaataggaagtgatggtgtatttgttccacgatcttctaaagactgcagatttctcagtttcctgaactttgttagggaacaagaattcgatgccaatgtttggatcagatcgttgaatgctcttacatgggttgagatacttcgtcaagtccttgttgcttcaggctttgggccaaaacagcatttgctgaatcaagaattctttaacaaggagaaaaatcaaatggctaaatatggtttacgtccccgcacactgaaaggagaattgtttgcactgttgtctaaggcaggaagttgtgggttaaaggtttcagtactagccaaatcatctgagattattgatcttaatgtttcgagcccattagaactagagcagttgatatctttagctctctccagtgacatcacattatttgagaagattgcaccttctgcatatcgtctccgtgttgacccccaaattaaaggggaagaagattctatgtcagatagtgatgattctggaagtgttgatgaggatgaggatgctagccgaagtgatgatggatctgatggttcccaaaagttaaaatttcttgagaatgaaagcagacttgctcgaaggaaggagaaaaatgcacatggaagtccaaataaatgtagtgaaattgatgaaagttattcaggtgaaaaatggcttttggcattgatggaaggcgagtattcagatctaagcattgatgagaagttggattgtttggttgctttaatagatgttgtttctggtgctggttctgttccaagacttgaggaaccgcaaagagtcttgcataatgtgcccagagtgcatccaccacaatcaggtgggaaaataaagaaatcaactaaaaacctttgtcaatatagcgatgagtccttaaatggttcaggaagtttggattgttgtcatcaaggccagtcaggaaggcgaaaaaatcaggattacaccactgaccctggaaggaacgatttacctattgctgctcatggaccacaagttgttctcttaggatcagaccgcaggtataatagctattggctcttccttggtccttgtagggaagatgatccagggcatcgtagggtctacttcgagtcctcagaggatggtcactgggaggtgattgattcaccacaggaattactttccttgctatctatcctcgatagcaggggcactagggaagcacatctccttacatcgatggagaagagacaagcctgcctttttgaagccatgaaaaaacatgtggaaggagggaaggcagccaggcttccagcctcatctgattcatactgctcccagacaagtagtggagatggaacttcgcccaagacaagtagtgtggatggagcttcatctgtatcagacattgagaacacttctgttcctacaagcctcaaagatagtaatttggattcatcgtctgccgtagtaattgaaagtgggaggggaggtgatgagaaaatatctatgtgggaacggctgcaagcatttgataaatggatctggacttctttttactccatccttactgctgttaaaagtggcaagaagtcatttaaggagtcactacttcgttgtggaagttgtcatgatctatattggagagatgaaaagcactgcagaatatgccattcaactttcgaggttggttttgatcttgaagaaaaatatgctgtacatgtggcgacgtgcagggagcctgaactttcacatgaggtaccaaatcataaatttctgccatcacagctacaggcacttaaagcagccattcatgctattgaggcctctatgcctgaggcagcttttactggttcttggatgaagtctgctcacaagctgtgggttaagcggctgcgacgaacgtcatcattgccagagcttttgcaggttcttgtcgattttgtaggggcaatggatgttgattggttgtacaaaagttcatctgcgagattgagaacaaatctggatgacatcattgtcgactttcagacaatgccacaaacaacatcagcagttgcactttgggttgtccaattggatgccctcattgcgccttatttggataatgccatggcaagacagctggtgaatgctaggtagcttacaaagatggattcttttgcgtgatgcacaagcaccccgagctgacttctttttctggcaccatctgcaagttttttcttgatgaaagcttttcatctaggtgagacagaacatggggtctgctttgagttcgagaacaagatcttgcgacttgctgtaaagcatggaatatattgttccctcccagcagagcattgcgtcatagacaatgaaaaagttttgttaataatcgttgcttcagatatgtgaaagttttggctttccatgtagcgacacaattgggatgtaagcaatttctgaaacagaccgctgtttgcaggtggtgctgtttgggacttgattaccagctgtgcccttagttttaacggaggggtggttataattttgttccttctatatctgtatgtgctaagttgctcctagtccgtgagagctttctacattaggctatttttgtatgttatgtaaccagtttctattagagtgcagttgtagacatttagaacatgtacaccaatattgtgactgtttgaacaagtgagggaggcatagaagacttcatacggatgaattcatgattagaataaaattgcaccaaaaatcaattttgaaccgttacctttttggtatctcgtatatgttttttttttgtctatgtagtgctagttgataaatttcggatagatgtaaataggaaactgaaactctattcggatagatgtaaatagaaaaatgaaactctatttgtttaaaataagttaga

SEQ ID NO: 11500 - DNA, 3837 bp, Zea Mays
gcagaaatggccgcagtagtgttttggtccctccgccgccccccacggtctaacacacccgcccgctaattcgccgaccagcctgccatcacccgctcgctgcagccgccgcgcccctcccactcaccaacgcggcaacgcccatggcgcccgtctgctgaaaacacccgccgccatgcctcgcgaccagatggtgaccaatggttttggagcaaaaagggataatgcaggggcaaaaaaatctccccagcaaattcagaggctggagaagttttactctgatgtacagtatccaaagccagaggaaatgggtgagtatgcaacctgtgttggtttgacttacagtcaggtccgtatatggttcaaagagcgaaggagaaaagagaggaggatggagatgggagccattgggtctcagatggaaaggcaatttagtgcacgttccagtggacctagatgcagcagcagttcttcgttttgtaaccaagctcccatctatgacatttcacgttcagagtcggacacctggggtatgagcacggcaggagaggaaagtaaaattctatcacaagttctgtttcccaaggattatatcctgagcaaaattttccgcaaggatggtccacctcttggtagtgaattcgaccccctcccccaaagtgcacatggctgtatcagagacactacatgccatcattcctctgagaaccaaagaactgtgaagaagagaaagatcatagagtcaactaaccagagatctgatgtgtatgagaatactgctcctgtgaggaaacatggaattggcaaaggtctaatgacagtgtggcatgccatgtattcccataacgtgaaatgtcaaagcggtcgaaatttcattgatgaaactggttgcttgaggtctcttagaccgtttgacgattttgatggattagaagatcgcgataatggaaggaagactcaaaatcaaggtatgacacggaaaaagatagtcaaaaggagtaaagttctggtgaatagaaaaaaggtgccgtgtaagagagttactggtccaaaggtgcatcctccaatggcttgccatctttcagttgatgaatcagaatctttagaactacagactgaactagtgactttagtggatgatgaggagctcgagctcagtgaattacaaacaggtccgaatccattgagatgttcagctcacctgtcttcaagtggtagacatgactgccccctttgtaaagatttacttgccaagtttcctccacaaagtttgaagatgaaaaagctattctctacaaaaccttgggagtcatcacctgaaatggtgaaaaagctttttcagattatccggctttgggccaaaacagcatttgctgaatcaagaattctttaacaaggagaaaaatcaaatggctaaatatggtttacgtccccgcacactgaaaggagaattgtttgcactgttgtctaaggcaggaagttgtgggttaaaggtttcagtactagccaaatcatctgagattattgatcttaatgtttcgagcccattagaactagagcagttgatatctttagctctctccagtgacatcacattatttgagaagattgcaccttctgcatatcgtctccgtgttgacccccaaattaaaggggaagaagattctatgtcagatagtgatgattctggaagtgttgatgaggatgaggatgctagccgaagtgatgatggatctgatggttcccaaaagttaaaatttcttgagaatgaaagcagacttgctcgaaggaaggagaaaaatgcacatggaagtccaaataaatgtagtgaaattgatgaaagttattcaggtgaaaaatggcttttggcattgatggaaggcgagtattcagatctaagcattgatgagaagttggattgtttggttgctttaatagatgttgtttctggtgctggttctgttccaagacttgaggaaccgcaaagagtcttgcataatgtgcccagagtgcatccaccacaatcagggaagatgatccagggcatcgtagggtctacttcgagtcctcagaggatggtcactgggaggtgattgattcaccacaggaattactttccttgctatctatcctcgatagcaggggcactagggaagcacatctccttacatcgatggagaagagacaagcctgcctttttgaagccatgaaaaaacatgtggaaggagggaaggcagccaggcttccagcctcatctgattcatactgctcccagacaagtagtggagatggaacttcgcccaagacaagtagtgtggatggagcttcatctgtatcagacattgagaacacttctgttcctacaagcctcaaagatagtaatttggattcatcgtctgccgtagtaattgaaagtgggaggggaggtgatgagaaaatatctatgtgggaacggctgcaagcatttgataaatggatctggacttctttttactccatccttactgctgttaaaagtggcaagaagtcatttaaggagtcactacttcgttgtggaagttgtcatgatctatattggagagatgaaaagcactgcagaatatgccattcaactttcgaggttggttttgatcttgaagaaaaatatgctgtacatgtggcgacgtgcagggagcctgaactttcacatgaggtaccaaatcataaatttctgccatcacagctacaggcacttaaagcagccattcatgctattgaggcctctatgcctgaggcagcttttactggttcttggatgaagtctgctcacaagctgtgggttaagcggctgcgacgaacgtcatcattgccagagcttttgcaggttcttgtcgattttgtaggggcaatggatgttgattggttgtacaaaagttcatctgcgagattgagaacaaatctggatgacatcattgtcgactttcagacaatgccacaaacaacatcagcagttgcactttgggttgtccaattggatgccctcattgcgccttatttggataatgccatggcaactggtgaatgctaggtagcttacaaagatggattcttttgcgtgatgcacaagcaccccgagctgacttctttttctggcaccatctgcaagttttttcttgatgaaagcttttcatctaggtgagacagaacatggggtctgctttgagttcgagaacaagatcttgcgacttgctgtaaagcatggaatatattgttccctcccagcagagcattgcgtcatagacaatgaaaaagttttgttaataatcgttgcttcagatatgtgaaagttttggctttccatgtagcgacacaattgggatgtaagcaatttctgaaacagaccgctgtttgcaggtggtgctgtttgggacttgattaccagctgtgcccttagttttaacggaggggtggttataattttgttccttctatatctgtatgtgctaagttgctcctagtccgtgagagctttctacattaggctatttttgtatgttatgtaaccagtttctattagagtgcagttgtagacatttagaacatgtacaccaatattgtgactgtttgaacaagtgagggaggcatagaagacttcatacggatgaattcatgattagaataaaattgcaccaaaaatcaattttgaaccgttacctttttggtatctcgtatatgttttttttttgtctatgtagtgctagttgataaatttcggatagatgtaaataggaaactgaaactctattcggatagatgtaaatagaaaaatgaaactctatttgtttaaaataagttaga

SEQ ID NO: 11501 - DNA, 4008 bp, Zea Mays
gcagaaatggccgcagtagtgttttggtccctccgccgccccccacggtctaacacacccgcccgctaattcgccgaccagcctgccatcacccgctcgctgcagccgccgcgcccctcccactcaccaacgcggcaacgcccatggcgcccgtctgctgaaaacacccgccgccatgcctcgcgaccagatggtgaccaatggttttggagcaaaaagggataatgcaggggcaaaaaaatctccccagcaaattcagaggctggagaagttttactctgatgtacagtatccaaagccagaggaaatgggtgagtatgcaacctgtgttggtttgacttacagtcaggtccgtatatggttcaaagagcgaaggagaaaagagaggaggatggagatgggagccattgggtctcagatggaaaggcaatttagtgcacgttccagtggacctagatgcagcagcagttcttcgttttgtaaccaagctcccatctatgacatttcacgttcagagtcggacacctggggtatgagcacggcaggagaggaaagtaaaattctatcacaagttctgtttcccaaggattatatcctgagcaaaattttccgcaaggatggtccacctcttggtagtgaattcgaccccctcccccaaagtgcacatggctgtatcagagacactacatgccatcattcctctgagaaccaaagaactgtgaagaagagaaagatcatagagtcaactaaccagagatctgatgtgtatgagaatactgctcctgtgaggaaacatggaattggcaaaggtctaatgacagtgtggcatgccatgtattcccataacgtgaaatgtcaaagcggtcgaaatttcattgatgaaactggttgcttgaggtctcttagaccgtttgacgattttgatggattagaagatcgcgataatggaaggaagactcaaaatcaaggtatgacacggaaaaagatagtcaaaaggagtaaagttctggtgaatagaaaaaaggtgccgtgtaagagagttactggtccaaaggtgcatcctccaatggcttgccatctttcagttgatgaatcagaatctttagaactacagactgaactagtgactttagtggatgatgaggagctcgagctcagtgaattacaaacagatttacttgccaagtttcctccacaaagtttgaagatgaaaaagctattctctacaaaaccttgggagtcatcacctgaaatggtgaaaaagctttttcagattatccggctttgggccaaaacagcatttgctgaatcaagaattctttaacaaggagaaaaatcaaatggctaaatatggtttacgtccccgcacactgaaaggagaattgtttgcactgttgtctaaggcaggaagttgtgggttaaaggtttcagtactagccaaatcatctgagattattgatcttaatgtttcgagcccattagaactagagcagttgatatctttagctctctccagtgacatcacattatttgagaagattgcaccttctgcatatcgtctccgtgttgacccccaaattaaaggggaagaagattctatgtcagatagtgatgattctggaagtgttgatgaggatgaggatgctagccgaagtgatgatggatctgatggttcccaaaagttaaaatttcttgagaatgaaagcagacttgctcgaaggaaggagaaaaatgcacatggaagtccaaataaatgtagtgaaattgatgaaagttattcaggtgaaaaatggcttttggcattgatggaaggcgagtattcagatctaagcattgatgagaagttggattgtttggttgctttaatagatgttgtttctggtgctggttctgttccaagacttgaggaaccgcaaagagtcttgcataatgtgcccagagtgcatccaccacaatcaggtgggaaaataaagaaatcaactaaaaacctttgtcaatatagcgatgagtccttaaatggttcaggaagtttggattgttgtcatcaaggccagtcaggaaggcgaaaaaatcaggattacaccactgaccctggaaggaacgatttacctattgctgctcatggaccacaagttgttctcttaggatcagaccgcaggtataatagctattggctcttccttggtccttgtagggaagatgatccagggcatcgtagggtctacttcgagtcctcagaggatggtcactgggaggtgattgattcaccacaggaattactttccttgctatctatcctcgatagcaggggcactagggaagcacatctccttacatcgatggagaagagacaagcctgcctttttgaagccatgaaaaaacatgtggaaggagggaaggcagccaggcttccagcctcatctgattcatactgctcccagacaagtagtggagatggaacttcgcccaagacaagtagtgtggatggagcttcatctgtatcagacattgagaacacttctgttcctacaagcctcaaagatagtaatttggattcatcgtctgccgtagtaattgaaagtgggaggggaggtgatgagaaaatatctatgtgggaacggctgcaagcatttgataaatggatctggacttctttttactccatccttactgctgttaaaagtggcaagaagtcatttaaggagtcactacttcgttgtggaagttgtcatgatctatattggagagatgaaaagcactgcagaatatgccattcaactttcgaggttggttttgatcttgaagaaaaatatgctgtacatgtggcgacgtgcagggagcctgaactttcacatgaggtaccaaatcataaatttctgccatcacagctacaggcacttaaagcagccattcatgctattgaggcctctatgcctgaggcagcttttactggttcttggatgaagtctgctcacaagctgtgggttaagcggctgcgacgaacgtcatcattgccagagcttttgcaggttcttgtcgattttgtaggggcaatggatgttgattggttgtacaaaagttcatctgcgagattgagaacaaatctggatgacatcattgtcgactttcagacaatgccacaaacaacatcagcagttgcactttgggttgtccaattggatgccctcattgcgccttatttggataatgccatggcaagacagctggtgaatgctaggtagcttacaaagatggattcttttgcgtgatgcacaagcaccccgagctgacttctttttctggcaccatctgcaagttttttcttgatgaaagcttttcatctaggtgagacagaacatggggtctgctttgagttcgagaacaagatcttgcgacttgctgtaaagcatggaatatattgttccctcccagcagagcattgcgtcatagacaatgaaaaagttttgttaataatcgttgcttcagatatgtgaaagttttggctttccatgtagcgacacaattgggatgtaagcaatttctgaaacagaccgctgtttgcaggtggtgctgtttgggacttgattaccagctgtgcccttagttttaacggaggggtggttataattttgttccttctatatctgtatgtgctaagttgctcctagtccgtgagagctttctacattaggctatttttgtatgttatgtaaccagtttctattagagtgcagttgtagacatttagaacatgtacaccaatattgtgactgtttgaacaagtgagggaggcatagaagacttcatacggatgaattcatgattagaataaaattgcaccaaaaatcaattttgaaccgttacctttttggtatctcgtatatgttttttttttgtctatgtagtgctagttgataaatttcggatagatgtaaataggaaactgaaactctattcggatagatgtaaatagaaaaatgaaactctatttgtttaaaataagttaga

SEQ ID NO: 11502 - DNA, 4313 bp, Zea Mays
gcagaaatggccgcagtagtgttttggtccctccgccgccccccacggtctaacacacccgcccgctaattcgccgaccagcctgccatcacccgctcgctgcagccgccgcgcccctcccactcaccaacgcggcaacgcccatggcgcccgtctgctgaaaacacccgccgccatgcctcgcgaccagatggtgaccaatggttttggagcaaaaagggataatgcaggggcaaaaaaatctccccagcaaattcagaggctggagaagttttactctgatgtacagtatccaaagccagaggaaatgggtgagtatgcaacctgtgttggtttgacttacagtcaggtccgtatatggttcaaagagcgaaggagaaaagagaggaggatggagatgggagccattgggtctcagatggaaaggcaatttagtgcacgttccagtggacctagatgcagcagcagttcttcgttttgtaaccaagctcccatctatgacatttcacgttcagagtcggacacctggggtatgagcacggcaggagaggaaagtaaaattctatcacaagttctgtttcccaaggattatatcctgagcaaaattttccgcaaggatggtccacctcttggtagtgaattcgaccccctcccccaaagtgcacatggctgtatcagagacactacatgccatcattcctctgagaaccaaagaactgtgaagaagagaaagatcatagagtcaactaaccagagatctgatgtgtatgagaatactgctcctgtgaggaaacatggaattggcaaaggtctaatgacagtgtggcatgccatgtattcccataacgtgaaatgtcaaagcggtcgaaatttcattgatgaaactggttgcttgaggtctcttagaccgtttgacgattttgatggattagaagatcgcgataatggaaggaagactcaaaatcaaggtatgacacggaaaaagatagtcaaaaggagtaaagttctggtgaatagaaaaaaggtgccgtgtaagagagttactggtccaaaggtgcatcctccaatggcttgccatctttcagttgatgaatcagaatctttagaactacagactgaactagtgactttagtggatgatgaggagctcgagctcagtgaattacaaacagatttacttgccaagtttcctccacaaagtttgaagatgaaaaagctattctctacaaaaccttgggagtcatcacctgaaatggtgaaaaagctttttcagattatccggtatgtatacactcattttggcagtattgatgtccaccccttcatatttgatgagtttgtgcaagcattccatgacaaggactcctcgttgttgggggaagtacatgttggtcttctcaagctactgttgttaaaggctgaaataggaagtgatggtgtatttgttccacgatcttctaaagactgcagatttctcagtttcctgaactttgttagggaacaagaattcgatgccaatgtttggatcagatcgttgaatgctcttacatgggttgagatacttcgtcaagtccttgttgcttcaggctttgggccaaaacagcatttgctgaatcaagaattctttaacaaggagaaaaatcaaatggctaaatatggtttacgtccccgcacactgaaaggagaattgtttgcactgttgtctaaggcaggaagttgtgggttaaaggtttcagtactagccaaatcatctgagattattgatcttaatgtttcgagcccattagaactagagcagttgatatctttagctctctccagtgacatcacattatttgagaagattgcaccttctgcatatcgtctccgtgttgacccccaaattaaaggggaagaagattctatgtcagatagtgatgattctggaagtgttgatgaggatgaggatgctagccgaagtgatgatggatctgatggttcccaaaagttaaaatttcttgagaatgaaagcagacttgctcgaaggaaggagaaaaatgcacatggaagtccaaataaatgtagtgaaattgatgaaagttattcaggtgaaaaatggcttttggcattgatggaaggcgagtattcagatctaagcattgatgagaagttggattgtttggttgctttaatagatgttgtttctggtgctggttctgttccaagacttgaggaaccgcaaagagtcttgcataatgtgcccagagtgcatccaccacaatcaggtgggaaaataaagaaatcaactaaaaacctttgtcaatatagcgatgagtccttaaatggttcaggaagtttggattgttgtcatcaaggccagtcaggaaggcgaaaaaatcaggattacaccactgaccctggaaggaacgatttacctattgctgctcatggaccacaagttgttctcttaggatcagaccgcaggtataatagctattggctcttccttggtccttgtagggaagatgatccagggcatcgtagggtctacttcgagtcctcagaggatggtcactgggaggtgattgattcaccacaggaattactttccttgctatctatcctcgatagcaggggcactagggaagcacatctccttacatcgatggagaagagacaagcctgcctttttgaagccatgaaaaaacatgtggaaggagggaaggcagccaggcttccagcctcatctgattcatactgctcccagacaagtagtggagatggaacttcgcccaagacaagtagtgtggatggagcttcatctgtatcagacattgagaacacttctgttcctacaagcctcaaagatagtaatttggattcatcgtctgccgtagtaattgaaagtgggaggggaggtgatgagaaaatatctatgtgggaacggctgcaagcatttgataaatggatctggacttctttttactccatccttactgctgttaaaagtggcaagaagtcatttaaggagtcactacttcgttgtggaagttgtcatgatctatattggagagatgaaaagcactgcagaatatgccattcaactttcgaggttggttttgatcttgaagaaaaatatgctgtacatgtggcgacgtgcagggagcctgaactttcacatgaggtaccaaatcataaatttctgccatcacagctacaggcacttaaagcagccattcatgctattgaggcctctatgcctgaggcagcttttactggttcttggatgaagtctgctcacaagctgtgggttaagcggctgcgacgaacgtcatcattgccagagcttttgcaggttcttgtcgattttgtaggggcaatggatgttgattggttgtacaaaagttcatctgcgagattgagaacaaatctggatgacatcattgtcgactttcagacaatgccacaaacaacatcagcagttgcactttgggttgtccaattggatgccctcattgcgccttatttggataatgccatggcaagacagctggtgaatgctaggtagcttacaaagatggattcttttgcgtgatgcacaagcaccccgagctgacttctttttctggcaccatctgcaagttttttcttgatgaaagcttttcatctaggtgagacagaacatggggtctgctttgagttcgagaacaagatcttgcgacttgctgtaaagcatggaatatattgttccctcccagcagagcattgcgtcatagacaatgaaaaagttttgttaataatcgttgcttcagatatgtgaaagttttggctttccatgtagcgacacaattgggatgtaagcaatttctgaaacagaccgctgtttgcaggtggtgctgtttgggacttgattaccagctgtgcccttagttttaacggaggggtggttataattttgttccttctatatctgtatgtgctaagttgctcctagtccgtgagagctttctacattaggctatttttgtatgttatgtaaccagtttctattagagtgcagttgtagacatttagaacatgtacaccaatattgtgactgtttgaacaagtgagggaggcatagaagacttcatacggatgaattcatgattagaataaaattgcaccaaaaatcaattttgaaccgttacctttttggtatctcgtatatgttttttttttgtctatgtagtgctagttgataaatttcggatagatgtaaataggaaactgaaactctattcggatagatgtaaatagaaaaatgaaactctatttgtttaaaataagttaga

SEQ ID NO: 11503 - DNA, 4309 bp, Zea Mays
gcagaaatggccgcagtagtgttttggtccctccgccgccccccacggtctaacacacccgcccgctaattcgccgaccagcctgccatcacccgctcgctgcagccgccgcgcccctcccactcaccaacgcggcaacgcccatggcgcccgtctgctgaaaacacccgccgccatgcctcgcgaccagatggtgaccaatggttttggagcaaaaagggataatgcaggggcaaaaaaatctccccagcaaattcagaggctggagaagttttactctgatgtacagtatccaaagccagaggaaatgggtgagtatgcaacctgtgttggtttgacttacagtcaggtccgtatatggttcaaagagcgaaggagaaaagagaggaggatggagatgggagccattgggtctcagatggaaaggcaatttagtgcacgttccagtggacctagatgcagcagcagttcttcgttttgtaaccaagctcccatctatgacatttcacgttcagagtcggacacctggggtatgagcacggcaggagaggaaagtaaaattctatcacaagttctgtttcccaaggattatatcctgagcaaaattttccgcaaggatggtccacctcttggtagtgaattcgaccccctcccccaaagtgcacatggctgtatcagagacactacatgccatcattcctctgagaaccaaagaactgtgaagaagagaaagatcatagagtcaactaaccagagatctgatgtgtatgagaatactgctcctgtgaggaaacatggaattggcaaaggtctaatgacagtgtggcatgccatgtattcccataacgtgaaatgtcaaagcggtcgaaatttcattgatgaaactggttgcttgaggtctcttagaccgtttgacgattttgatggattagaagatcgcgataatggaaggaagactcaaaatcaaggtatgacacggaaaaagatagtcaaaaggagtaaagttctggtgaatagaaaaaaggtgccgtgtaagagagttactggtccaaaggtgcatcctccaatggcttgccatctttcagttgatgaatcagaatctttagaactacagactgaactagtgactttagtggatgatgaggagctcgagctcagtgaattacaaacagatttacttgccaagtttcctccacaaagtttgaagatgaaaaagctattctctacaaaaccttgggagtcatcacctgaaatggtgaaaaagctttttcagattatccggtatgtatacactcattttggcagtattgatgtccaccccttcatatttgatgagtttgtgcaagcattccatgacaaggactcctcgttgttgggggaagtacatgttggtcttctcaagctactgttgttaaaggctgaaataggaagtgatggtgtatttgttccacgatcttctaaagactgcagatttctcagtttcctgaactttgttagggaacaagaattcgatgccaatgtttggatcagatcgttgaatgctcttacatgggttgagatacttcgtcaagtccttgttgcttcaggctttgggccaaaacagcatttgctgaatcaagaattctttaacaaggagaaaaatcaaatggctaaatatggtttacgtccccgcacactgaaaggagaattgtttgcactgttgtctaaggcaggaagttgtgggttaaaggtttcagtactagccaaatcatctgagattattgatcttaatgtttcgagcccattagaactagagcagttgatatctttagctctctccagtgacatcacattatttgagaagattgcaccttctgcatatcgtctccgtgttgacccccaaattaaaggggaagaagattctatgtcagatagtgatgattctggaagtgttgatgaggatgaggatgctagccgaagtgatgatggatctgatggttcccaaaagttaaaatttcttgagaatgaaagcagacttgctcgaaggaaggagaaaaatgcacatggaagtccaaataaatgtagtgaaattgatgaaagttattcaggtgaaaaatggcttttggcattgatggaaggcgagtattcagatctaagcattgatgagaagttggattgtttggttgctttaatagatgttgtttctggtgctggttctgttccaagacttgaggaaccgcaaagagtcttgcataatgtgcccagagtgcatccaccacaatcaggtgggaaaataaagaaatcaactaaaaacctttgtcaatatagcgatgagtccttaaatggttcaggaagtttggattgttgtcatcaaggccagtcaggaaggcgaaaaaatcaggattacaccactgaccctggaaggaacgatttacctattgctgctcatggaccacaagttgttctcttaggatcagaccgcaggtataatagctattggctcttccttggtccttgtagggaagatgatccagggcatcgtagggtctacttcgagtcctcagaggatggtcactgggaggtgattgattcaccacaggaattactttccttgctatctatcctcgatagcaggggcactagggaagcacatctccttacatcgatggagaagagacaagcctgcctttttgaagccatgaaaaaacatgtggaaggagggaaggcagccaggcttccagcctcatctgattcatactgctcccagacaagtagtggagatggaacttcgcccaagacaagtagtgtggatggagcttcatctgtatcagacattgagaacacttctgttcctacaagcctcaaagatagtaatttggattcatcgtctgccgtagtaattgaaagtgggaggggaggtgatgagaaaatatctatgtgggaacggctgcaagcatttgataaatggatctggacttctttttactccatccttactgctgttaaaagtggcaagaagtcatttaaggagtcactacttcgttgtggaagttgtcatgatctatattggagagatgaaaagcactgcagaatatgccattcaactttcgaggttggttttgatcttgaagaaaaatatgctgtacatgtggcgacgtgcagggagcctgaactttcacatgaggtaccaaatcataaatttctgccatcacagctacaggcacttaaagcagccattcatgctattgaggcctctatgcctgaggcagcttttactggttcttggatgaagtctgctcacaagctgtgggttaagcggctgcgacgaacgtcatcattgccagagcttttgcaggttcttgtcgattttgtaggggcaatggatgttgattggttgtacaaaagttcatctgcgagattgagaacaaatctggatgacatcattgtcgactttcagacaatgccacaaacaacatcagcagttgcactttgggttgtccaattggatgccctcattgcgccttatttggataatgccatggacagctggtgaatgctaggtagcttacaaagatggattcttttgcgtgatgcacaagcaccccgagctgacttctttttctggcaccatctgcaagttttttcttgatgaaagcttttcatctaggtgagacagaacatggggtctgctttgagttcgagaacaagatcttgcgacttgctgtaaagcatggaatatattgttccctcccagcagagcattgcgtcatagacaatgaaaaagttttgttaataatcgttgcttcagatatgtgaaagttttggctttccatgtagcgacacaattgggatgtaagcaatttctgaaacagaccgctgtttgcaggtggtgctgtttgggacttgattaccagctgtgcccttagttttaacggaggggtggttataattttgttccttctatatctgtatgtgctaagttgctcctagtccgtgagagctttctacattaggctatttttgtatgttatgtaaccagtttctattagagtgcagttgtagacatttagaacatgtacaccaatattgtgactgtttgaacaagtgagggaggcatagaagacttcatacggatgaattcatgattagaataaaattgcaccaaaaatcaattttgaaccgttacctttttggtatctcgtatatgttttttttttgtctatgtagtgctagttgataaatttcggatagatgtaaataggaaactgaaactctattcggatagatgtaaatagaaaaatgaaactctatttgtttaaaataagttaga

SEQ ID NO: 11504 - DNA, 4313 bp, Zea Mays
gcagctcagccacgaatagcagaaatggccgcagtagtgttttggtccctccgccgccccccacggtctaacacacccgcccgctaattcgccgaccagcctgccatcacccgctcgctgcagccgccgcgcccctcccactcaccaacgcggcaacgcccatggcgcccgtctgctgaaaacacccgccgccatgcctcgcgaccagatggtgaccaatggttttggagcaaaaagggataatgcaggggcaaaaaaatctccccagcaaattcagaggctggagaagttttactctgatgtacagtatccaaagccagaggaaatgggtgagtatgcaacctgtgttggtttgacttacagtcaggtccgtatatggttcaaagagcgaaggagaaaagagaggaggatggagatgggagccattgggtctcagatggaaaggcaatttagtgcacgttccagtggacctagatgcagcagcagttcttcgttttgtaaccaagctcccatctatgacatttcacgttcagagtcggacacctggggtatgagcacggcaggagaggaaagtaaaattctatcacaagttctgtttcccaaggattatatcctgagcaaaattttccgcaaggatggtccacctcttggtagtgaattcgaccccctcccccaaagtgcacatggctgtatcagagacactacatgccatcattcctctgagaaccaaagaactgtgaagaagagaaagatcatagagtcaactaaccagagatctgatgtgtatgagaatactgctcctgtgaggaaacatggaattggcaaaggtctaatgacagtgtggcatgccatgtattcccataacgtgaaatgtcaaagcggtcgaaatttcattgatgaaactggttgcttgaggtctcttagaccgtttgacgattttgatggattagaagatcgcgataatggaaggaagactcaaaatcaaggtatgacacggaaaaagatagtcaaaaggagtaaagttctggtgaatagaaaaaaggtgccgtgtaagagagttactggtccaaaggtgcatcctccaatggcttgccatctttcagttgatgaatcagaatctttagaactacagactgaactagtgactttagtggatgatgaggagctcgagctcagtgaattacaaacaggtccgaatccattgagatgttcagctcacctgtcttcaagtggtagacatgactgccccctttgtaaagatttacttgccaagtttcctccacaaagtttgaagatgaaaaagctattctctacaaaaccttgggagtcatcacctgaaatggtgaaaaagctttttcaggactcctcgttgttgggggaagtacatgttggtcttctcaagctactgttgttaaaggctgaaataggaagtgatggtgtatttgttccacgatcttctaaagactgcagatttctcagtttcctgaactttgttagggaacaagaattcgatgccaatgtttggatcagatcgttgaatgctcttacatgggttgagatacttcgtcaagtccttgttgcttcaggctttgggccaaaacagcatttgctgaatcaagaattctttaacaaggagaaaaatcaaatggctaaatatggtttacgtccccgcacactgaaaggagaattgtttgcactgttgtctaaggcaggaagttgtgggttaaaggtttcagtactagccaaatcatctgagattattgatcttaatgtttcgagcccattagaactagagcagttgatatctttagctctctccagtgacatcacattatttgagaagattgcaccttctgcatatcgtctccgtgttgacccccaaattaaaggggaagaagattctatgtcagatagtgatgattctggaagtgttgatgaggatgaggatgctagccgaagtgatgatggatctgatggttcccaaaagttaaaatttcttgagaatgaaagcagacttgctcgaaggaaggagaaaaatgcacatggaagtccaaataaatgtagtgaaattgatgaaagttattcaggtgaaaaatggcttttggcattgatggaaggcgagtattcagatctaagcattgatgagaagttggattgtttggttgctttaatagatgttgtttctggtgctggttctgttccaagacttgaggaaccgcaaagagtcttgcataatgtgcccagagtgcatccaccacaatcaggtgggaaaataaagaaatcaactaaaaacctttgtcaatatagcgatgagtccttaaatggttcaggaagtttggattgttgtcatcaaggccagtcaggaaggcgaaaaaatcaggattacaccactgaccctggaaggaacgatttacctattgctgctcatggaccacaagttgttctcttaggatcagaccgcaggtataatagctattggctcttccttggtccttgtagggaagatgatccagggcatcgtagggtctacttcgagtcctcagaggatggtcactgggaggtgattgattcaccacaggaattactttccttgctatctatcctcgatagcaggggcactagggaagcacatctccttacatcgatggagaagagacaagcctgcctttttgaagccatgaaaaaacatgtggaaggagggaaggcagccaggcttccagcctcatctgattcatactgctcccagacaagtagtggagatggaacttcgcccaagacaagtagtgtggatggagcttcatctgtatcagacattgagaacacttctgttcctacaagcctcaaagatagtaatttggattcatcgtctgccgtagtaattgaaagtgggaggggaggtgatgagaaaatatctatgtgggaacggctgcaagcatttgataaatggatctggacttctttttactccatccttactgctgttaaaagtggcaagaagtcatttaaggagtcactacttcgttgtggaagttgtcatgatctatattggagagatgaaaagcactgcagaatatgccattcaactttcgaggttggttttgatcttgaagaaaaatatgctgtacatgtggcgacgtgcagggagcctgaactttcacatgaggtaccaaatcataaatttctgccatcacagctacaggcacttaaagcagccattcatgctattgaggcctctatgcctgaggcagcttttactggttcttggatgaagtctgctcacaagctgtgggttaagcggctgcgacgaacgtcatcattgccagagcttttgcaggttcttgtcgattttgtaggggcaatggatgttgattggttgtacaaaagttcatctgcgagattgagaacaaatctggatgacatcattgtcgactttcagacaatgccacaaacaacatcagcagttgcactttgggttgtccaattggatgccctcattgcgccttatttggataatgccatggcaagacagctggtgaatgctaggtagcttacaaagatggattcttttgcgtgatgcacaagcaccccgagctgacttctttttctggcaccatctgcaagttttttcttgatgaaagcttttcatctaggtgagacagaacatggggtctgctttgagttcgagaacaagatcttgcgacttgctgtaaagcatggaatatattgttccctcccagcagagcattgcgtcatagacaatgaaaaagttttgttaataatcgttgcttcagatatgtgaaagttttggctttccatgtagcgacacaattgggatgtaagcaatttctgaaacagaccgctgtttgcaggtggtgctgtttgggacttgattaccagctgtgcccttagttttaacggaggggtggttataattttgttccttctatatctgtatgtgctaagttgctcctagtccgtgagagctttctacattaggctatttttgtatgttatgtaaccagtttctattagagtgcagttgtagacatttagaacatgtacaccaatattgtgactgtttgaacaagtgagggaggcatagaagacttcatacggatgaattcatgattagaataaaattgcaccaaaaatcaattttgaaccgttacctttttggtatctcgtatatgttttttttttgtctatgtagtgctagttgataaatttcggatagatgtaaataggaaactgaaactctattcggatagatgtaaatagaaaaatgaaactctatttgtttaaaataagttaga

SEQ ID NO: 11505 - DNA, 4102 bp, Zea Mays
aaaaagtgcagctcagccacgaatagcagaaatggccgcagtagtgttttggtccctccgccgccccccacggtctaacacacccgcccgctaattcgccgaccagcctgccatcacccgctcgctgcagccgccgcgcccctcccactcaccaacgcggcaacgcccatggcgcccgtctgctgaaaacacccgccgccatgcctcgcgaccagatggtgaccaatggttttggagcaaaaagggataatgcaggggcaaaaaaatctccccagcaaattcagaggctggagaagttttactctgatgtacagtatccaaagccagaggaaatgggtgagtatgcaacctgtgttggtttgacttacagtcaggtccgtatatggttcaaagagcgaaggagaaaagagaggaggatggagatgggagccattgggtctcagatggaaaggcaatttagtgcacgttccagtggacctagatgcagcagcagttcttcgttttgtaaccaagctcccatctatgacatttcacgttcagagtcggacacctggggtatgagcacggcaggagaggaaagtaaaattctatcacaagttctgtttcccaaggattatatcctgagcaaaattttccgcaaggatggtccacctcttggtagtgaattcgaccccctcccccaaagtgcacatggctgtatcagagacactacatgccatcattcctctgagaaccaaagaactgtgaagaagagaaagatcatagagtcaactaaccagagatctgatgtgtatgagaatactgctcctgtgaggaaacatggaattggcaaaggtctaatgacagtgtggcatgccatgtattcccataacgtgaaatgtcaaagcggtcgaaatttcattgatgaaactggttgcttgaggtctcttagaccgtttgacgattttgatggattagaagatcgcgataatggaaggaagactcaaaatcaaggtatgacacggaaaaagatagtcaaaaggagtaaagttctggtgaatagaaaaaaggtgccgtgtaagagagttactggtccaaaggtgcatcctccaatggcttgccatctttcagttgatgaatcagaatctttagaactacagactgaactagtgactttagtggatgatgaggagctcgagctcagtgaattacaaacaggtccgaatccattgagatgttcagctcacctgtcttcaagtggtagacatgactgccccctttgtaaagatttacttgccaagtttcctccacaaagtttgaagatgaaaaagctattctctacaaaaccttgggagtcatcacctgaaatggtgaaaaagctttttcagattatccggctttgggccaaaacagcatttgctgaatcaagaattctttaacaaggagaaaaatcaaatggctaaatatggtttacgtccccgcacactgaaaggagaattgtttgcactgttgtctaaggcaggaagttgtgggttaaaggtttcagtactagccaaatcatctgagattattgatcttaatgtttcgagcccattagaactagagcagttgatatctttagctctctccagtgacatcacattatttgagaagattgcaccttctgcatatcgtctccgtgttgacccccaaattaaaggggaagaagattctatgtcagatagtgatgattctggaagtgttgatgaggatgaggatgctagccgaagtgatgatggatctgatggttcccaaaagttaaaatttcttgagaatgaaagcagacttgctcgaaggaaggagaaaaatgcacatggaagtccaaataaatgtagtgaaattgatgaaagttattcaggtgaaaaatggcttttggcattgatggaaggcgagtattcagatctaagcattgatgagaagttggattgtttggttgctttaatagatgttgtttctggtgctggttctgttccaagacttgaggaaccgcaaagagtcttgcataatgtgcccagagtgcatccaccacaatcaggtgggaaaataaagaaatcaactaaaaacctttgtcaatatagcgatgagtccttaaatggttcaggaagtttggattgttgtcatcaaggccagtcaggaaggcgaaaaaatcaggattacaccactgaccctggaaggaacgatttacctattgctgctcatggaccacaagttgttctcttaggatcagaccgcaggtataatagctattggctcttccttggtccttgtagggaagatgatccagggcatcgtagggtctacttcgagtcctcagaggatggtcactgggaggtgattgattcaccacaggaattactttccttgctatctatcctcgatagcaggggcactagggaagcacatctccttacatcgatggagaagagacaagcctgcctttttgaagccatgaaaaaacatgtggaaggagggaaggcagccaggcttccagcctcatctgattcatactgctcccagacaagtagtggagatggaacttcgcccaagacaagtagtgtggatggagcttcatctgtatcagacattgagaacacttctgttcctacaagcctcaaagatagtaatttggattcatcgtctgccgtagtaattgaaagtgggaggggaggtgatgagaaaatatctatgtgggaacggctgcaagcatttgataaatggatctggacttctttttactccatccttactgctgttaaaagtggcaagaagtcatttaaggagtcactacttcgttgtggaagttgtcatgatctatattggagagatgaaaagcactgcagaatatgccattcaactttcgaggttggttttgatcttgaagaaaaatatgctgtacatgtggcgacgtgcagggagcctgaactttcacatgaggtaccaaatcataaatttctgccatcacagctacaggcacttaaagcagccattcatgctattgaggcctctatgcctgaggcagcttttactggttcttggatgaagtctgctcacaagctgtgggttaagcggctgcgacgaacgtcatcattgccagagcttttgcaggttcttgtcgattttgtaggggcaatggatgttgattggttgtacaaaagttcatctgcgagattgagaacaaatctggatgacatcattgtcgactttcagacaatgccacaaacaacatcagcagttgcactttgggttgtccaattggatgccctcattgcgccttatttggataatgccatggcaagacagctggtgaatgctaggtagcttacaaagatggattcttttgcgtgatgcacaagcaccccgagctgacttctttttctggcaccatctgcaagttttttcttgatgaaagcttttcatctaggtgagacagaacatggggtctgctttgagttcgagaacaagatcttgcgacttgctgtaaagcatggaatatattgttccctcccagcagagcattgcgtcatagacaatgaaaaagttttgttaataatcgttgcttcagatatgtgaaagttttggctttccatgtagcgacacaattgggatgtaagcaatttctgaaacagaccgctgtttgcaggtggtgctgtttgggacttgattaccagctgtgcccttagttttaacggaggggtggttataattttgttccttctatatctgtatgtgctaagttgctcctagtccgtgagagctttctacattaggctatttttgtatgttatgtaaccagtttctattagagtgcagttgtagacatttagaacatgtacaccaatattgtgactgtttgaacaagtgagggaggcatagaagacttcatacggatgaattcatgattagaataaaattgcaccaaaaatcaattttgaaccgttacctttttggtatctcgtatatgttttttttttgtctatgtagtgctagttgataaatttcggatagatgtaaataggaaactgaaactctattcggatagatgtaaatagaaaaatgaaactctatttgtttaaaataagttaga

SEQ ID NO: 11506 - DNA, 4137 bp, Zea Mays
aaaaagtgcagctcagccacgaatagcagaaatggccgcagtagtgttttggtccctccgccgccccccacggtctaacacacccgcccgctaattcgccgaccagcctgccatcacccgctcgctgcagccgccgcgcccctcccactcaccaacgcggcaacgcccatggcgcccgtctgctgaaaacacccgccgccatgcctcgcgaccagatggtgaccaatggttttggagcaaaaagggataatgcaggggcaaaaaaatctccccagcaaattcagaggctggagaagttttactctgatgtacagtatccaaagccagaggaaatgggtgagtatgcaacctgtgttggtttgacttacagtcaggtccgtatatggttcaaagagcgaaggagaaaagagaggaggatggagatgggagccattgggtctcagatggaaaggcaatttagtgcacgttccagtggacctagatgcagcagcagttcttcgttttgtaaccaagctcccatctatgacatttcacgttcagagtcggacacctggggtatgagcacggcaggagaggaaagtaaaattctatcacaagttctgtttcccaaggattatatcctgagcaaaattttccgcaaggatggtccacctcttggtagtgaattcgaccccctcccccaaagtgcacatggctgtatcagagacactacatgccatcattcctctgagaaccaaagaactgtgaagaagagaaagatcatagagtcaactaaccagagatctgatgtgtatgagaatactgctcctgtgaggaaacatggaattggcaaaggtctaatgacagtgtggcatgccatgtattcccataacgtgaaatgtcaaagcggtcgaaatttcattgatgaaactggttgcttgaggtctcttagaccgtttgacgattttgatggattagaagatcgcgataatggaaggaagactcaaaatcaaggtatgacacggaaaaagatagtcaaaaggagtaaagttctggtgaatagaaaaaaggtgccgtgtaagagagttactggtccaaaggtgcatcctccaatggcttgccatctttcagttgatgaatcagaatctttagaactacagactgaactagtgactttagtggatgatgaggagctcgagctcagtgaattacaaacaggtccgaatccattgagatgttcagctcacctgtcttcaagtggtagacatgactgccccctttgtaaagatttacttgccaagtttcctccacaaagtttgaagatgaaaaagctattctctacaaaaccttgggagtcatcacctgaaatggtgaaaaagctttttcagcccacatatattgattggagaattaatcctgacagattatccggctttgggccaaaacagcatttgctgaatcaagaattctttaacaaggagaaaaatcaaatggctaaatatggtttacgtccccgcacactgaaaggagaattgtttgcactgttgtctaaggcaggaagttgtgggttaaaggtttcagtactagccaaatcatctgagattattgatcttaatgtttcgagcccattagaactagagcagttgatatctttagctctctccagtgacatcacattatttgagaagattgcaccttctgcatatcgtctccgtgttgacccccaaattaaaggggaagaagattctatgtcagatagtgatgattctggaagtgttgatgaggatgaggatgctagccgaagtgatgatggatctgatggttcccaaaagttaaaatttcttgagaatgaaagcagacttgctcgaaggaaggagaaaaatgcacatggaagtccaaataaatgtagtgaaattgatgaaagttattcaggtgaaaaatggcttttggcattgatggaaggcgagtattcagatctaagcattgatgagaagttggattgtttggttgctttaatagatgttgtttctggtgctggttctgttccaagacttgaggaaccgcaaagagtcttgcataatgtgcccagagtgcatccaccacaatcaggtgggaaaataaagaaatcaactaaaaacctttgtcaatatagcgatgagtccttaaatggttcaggaagtttggattgttgtcatcaaggccagtcaggaaggcgaaaaaatcaggattacaccactgaccctggaaggaacgatttacctattgctgctcatggaccacaagttgttctcttaggatcagaccgcaggtataatagctattggctcttccttggtccttgtagggaagatgatccagggcatcgtagggtctacttcgagtcctcagaggatggtcactgggaggtgattgattcaccacaggaattactttccttgctatctatcctcgatagcaggggcactagggaagcacatctccttacatcgatggagaagagacaagcctgcctttttgaagccatgaaaaaacatgtggaaggagggaaggcagccaggcttccagcctcatctgattcatactgctcccagacaagtagtggagatggaacttcgcccaagacaagtagtgtggatggagcttcatctgtatcagacattgagaacacttctgttcctacaagcctcaaagatagtaatttggattcatcgtctgccgtagtaattgaaagtgggaggggaggtgatgagaaaatatctatgtgggaacggctgcaagcatttgataaatggatctggacttctttttactccatccttactgctgttaaaagtggcaagaagtcatttaaggagtcactacttcgttgtggaagttgtcatgatctatattggagagatgaaaagcactgcagaatatgccattcaactttcgaggttggttttgatcttgaagaaaaatatgctgtacatgtggcgacgtgcagggagcctgaactttcacatgaggtaccaaatcataaatttctgccatcacagctacaggcacttaaagcagccattcatgctattgaggcctctatgcctgaggcagcttttactggttcttggatgaagtctgctcacaagctgtgggttaagcggctgcgacgaacgtcatcattgccagagcttttgcaggttcttgtcgattttgtaggggcaatggatgttgattggttgtacaaaagttcatctgcgagattgagaacaaatctggatgacatcattgtcgactttcagacaatgccacaaacaacatcagcagttgcactttgggttgtccaattggatgccctcattgcgccttatttggataatgccatggcaagacagctggtgaatgctaggtagcttacaaagatggattcttttgcgtgatgcacaagcaccccgagctgacttctttttctggcaccatctgcaagttttttcttgatgaaagcttttcatctaggtgagacagaacatggggtctgctttgagttcgagaacaagatcttgcgacttgctgtaaagcatggaatatattgttccctcccagcagagcattgcgtcatagacaatgaaaaagttttgttaataatcgttgcttcagatatgtgaaagttttggctttccatgtagcgacacaattgggatgtaagcaatttctgaaacagaccgctgtttgcaggtggtgctgtttgggacttgattaccagctgtgcccttagttttaacggaggggtggttataattttgttccttctatatctgtatgtgctaagttgctcctagtccgtgagagctttctacattaggctatttttgtatgttatgtaaccagtttctattagagtgcagttgtagacatttagaacatgtacaccaatattgtgactgtttgaacaagtgagggaggcatagaagacttcatacggatgaattcatgattagaataaaattgcaccaaaaatcaattttgaaccgttacctttttggtatctcgtatatgttttttttttgtctatgtagtgctagttgataaatttcggatagatgtaaataggaaactgaaactctattcggatagatgtaaatagaaaaatgaaactctatttgtttaaaataagttaga

SEQ ID NO: 11507 - DNA, 4408 bp, Zea Mays
gaaaaagtgcagctcagccacgaatagcagaaatggccgcagtagtgttttggtccctccgccgccccccacggtctaacacacccgcccgctaattcgccgaccagcctgccatcacccgctcgctgcagccgccgcgcccctcccactcaccaacgcggcaacgcccatggcgcccgtctgctgaaaacacccgccgccatgcctcgcgaccagatggtgaccaatggttttggagcaaaaagggataatgcaggggcaaaaaaatctccccagcaaattcagaggctggagaagttttactctgatgtacagtatccaaagccagaggaaatgggtgagtatgcaacctgtgttggtttgacttacagtcaggtccgtatatggttcaaagagcgaaggagaaaagagaggaggatggagatgggagccattgggtctcagatggaaaggcaatttagtgcacgttccagtggacctagatgcagcagcagttcttcgttttgtaaccaagctcccatctatgacatttcacgttcagagtcggacacctggggtatgagcacggcaggagaggaaagtaaaattctatcacaagttctgtttcccaaggattatatcctgagcaaaattttccgcaaggatggtccacctcttggtagtgaattcgaccccctcccccaaagtgcacatggctgtatcagagacactacatgccatcattcctctgagaaccaaagaactgtgaagaagagaaagatcatagagtcaactaaccagagatctgatgtgtatgagaatactgctcctgtgaggaaacatggaattggcaaaggtctaatgacagtgtggcatgccatgtattcccataacgtgaaatgtcaaagcggtcgaaatttcattgatgaaactggttgcttgaggtctcttagaccgtttgacgattttgatggattagaagatcgcgataatggaaggaagactcaaaatcaaggtatgacacggaaaaagatagtcaaaaggagtaaagttctggtgaatagaaaaaaggtgccgtgtaagagagttactggtccaaaggtgcatcctccaatggcttgccatctttcagttgatgaatcagaatctttagaactacagactgaactagtgactttagtggatgatgaggagctcgagctcagtgaattacaaacaggtccgaatccattgagatgttcagctcacctgtcttcaagtggtagacatgactgccccctttgtaaagatttacttgccaagtttcctccacaaagtttgaagatgaaaaagctattctctacaaaaccttgggagtcatcacctgaaatggtgaaaaagctttttcagattatccggtatgtatacactcattttggcagtattgatgtccaccccttcatatttgatgagtttgtgcaagcattccatgacaaggactcctcgttgttgggggaagtacatgttggtcttctcaagctactgttgttaaaggctgaaataggaagtgatggtgtatttgttccacgatcttctaaagactgcagatttctcagtttcctgaactttgttagggaacaagaattcgatgccaatgtttggatcagatcgttgaatgctcttacatgggttgagatacttcgtcaagtccttgttgcttcaggctttgggccaaaacagcatttgctgaatcaagaattctttaacaaggagaaaaatcaaatggctaaatatggtttacgtccccgcacactgaaaggagaattgtttgcactgttgtctaaggcaggaagttgtgggttaaaggtttcagtactagccaaatcatctgagattattgatcttaatgtttcgagcccattagaactagagcagttgatatctttagctctctccagtgacatcacattatttgagaagattgcaccttctgcatatcgtctccgtgttgacccccaaattaaaggggaagaagattctatgtcagatagtgatgattctggaagtgttgatgaggatgaggatgctagccgaagtgatgatggatctgatggttcccaaaagttaaaatttcttgagaatgaaagcagacttgctcgaaggaaggagaaaaatgcacatggaagtccaaataaatgtagtgaaattgatgaaagttattcaggtgaaaaatggcttttggcattgatggaaggcgagtattcagatctaagcattgatgagaagttggattgtttggttgctttaatagatgttgtttctggtgctggttctgttccaagacttgaggaaccgcaaagagtcttgcataatgtgcccagagtgcatccaccacaatcaggtgggaaaataaagaaatcaactaaaaacctttgtcaatatagcgatgagtccttaaatggttcaggaagtttggattgttgtcatcaaggccagtcaggaaggcgaaaaaatcaggattacaccactgaccctggaaggaacgatttacctattgctgctcatggaccacaagttgttctcttaggatcagaccgcaggtataatagctattggctcttccttggtccttgtagggaagatgatccagggcatcgtagggtctacttcgagtcctcagaggatggtcactgggaggtgattgattcaccacaggaattactttccttgctatctatcctcgatagcaggggcactagggaagcacatctccttacatcgatggagaagagacaagcctgcctttttgaagccatgaaaaaacatgtggaaggagggaaggcagccaggcttccagcctcatctgattcatactgctcccagacaagtagtggagatggaacttcgcccaagacaagtagtgtggatggagcttcatctgtatcagacattgagaacacttctgttcctacaagcctcaaagatagtaatttggattcatcgtctgccgtagtaattgaaagtgggaggggaggtgatgagaaaatatctatgtgggaacggctgcaagcatttgataaatggatctggacttctttttactccatccttactgctgttaaaagtggcaagaagtcatttaaggagtcactacttcgttgtggaagttgtcatgatctatattggagagatgaaaagcactgcagaatatgccattcaactttcgaggttggttttgatcttgaagaaaaatatgctgtacatgtggcgacgtgcagggagcctgaactttcacatgaggtaccaaatcataaatttctgccatcacagctacaggcacttaaagcagccattcatgctattgaggcctctatgcctgaggcagcttttactggttcttggatgaagtctgctcacaagctgtgggttaagcggctgcgacgaacgtcatcattgccagagcttttgcaggttcttgtcgattttgtaggggcaatggatgttgattggttgtacaaaagttcatctgcgagattgagaacaaatctggatgacatcattgtcgactttcagacaatgccacaaacaacatcagcagttgcactttgggttgtccaattggatgccctcattgcgccttatttggataatgccatggcaagacagctggtgaatgctaggtagcttacaaagatggattcttttgcgtgatgcacaagcaccccgagctgacttctttttctggcaccatctgcaagttttttcttgatgaaagcttttcatctaggtgagacagaacatggggtctgctttgagttcgagaacaagatcttgcgacttgctgtaaagcatggaatatattgttccctcccagcagagcattgcgtcatagacaatgaaaaagttttgttaataatcgttgcttcagatatgtgaaagttttggctttccatgtagcgacacaattgggatgtaagcaatttctgaaacagaccgctgtttgcaggtggtgctgtttgggacttgattaccagctgtgcccttagttttaacggaggggtggttataattttgttccttctatatctgtatgtgctaagttgctcctagtccgtgagagctttctacattaggctatttttgtatgttatgtaaccagtttctattagagtgcagttgtagacatttagaacatgtacaccaatattgtgactgtttgaacaagtgagggaggcatagaagacttcatacggatgaattcatgattagaataaaattgcaccaaaaatcaattttgaaccgttacctttttggtatctcgtatatgttttttttttgtctatgtagtgctagttgataaatttcggatagatgtaaataggaaactgaaactctattcggatagatgtaaatagaaaaatgaaactctatttgtttaaaataagttaga

SEQ ID NO: 11508 - DNA, 4403 bp, Zea Mays
gaaaaagtgcagctcagccacgaatagcagaaatggccgcagtagtgttttggtccctccgccgccccccacggtctaacacacccgcccgctaattcgccgaccagcctgccatcacccgctcgctgcagccgccgcgcccctcccactcaccaacgcggcaacgcccatggcgcccgtctgctgaaaacacccgccgccatgcctcgcgaccagatggtgaccaatggttttggagcaaaaagggataatgcaggggcaaaaaaatctccccagcaaattcagaggctggagaagttttactctgatgtacagtatccaaagccagaggaaatgggtgagtatgcaacctgtgttggtttgacttacagtcaggtccgtatatggttcaaagagcgaaggagaaaagagaggaggatggagatgggagccattgggtctcagatggaaaggcaatttagtgcacgttccagtggacctagatgcagcagcagttcttcgttttgtaaccaagctcccatctatgacatttcacgttcagagtcggacacctggggtatgagcacggcaggagaggaaagtaaaattctatcacaagttctgtttcccaaggattatatcctgagcaaaattttccgcaaggatggtccacctcttggtagtgaattcgaccccctcccccaaagtgcacatggctgtatcagagacactacatgccatcattcctctgagaaccaaagaactgtgaagaagagaaagatcatagagtcaactaaccagagatctgatgtgtatgagaatactgctcctgtgaggaaacatggaattggcaaaggtctaatgacagtgtggcatgccatgtattcccataacgtgaaatgtcaaagcggtcgaaatttcattgatgaaactggttgcttgaggtctcttagaccgtttgacgattttgatggattagaagatcgcgataatggaaggaagactcaaaatcaaggtatgacacggaaaaagatagtcaaaaggagtaaagttctggtgaatagaaaaaaggtgccgtgtaagagagttactggtccaaaggtgcatcctccaatggcttgccatctttcagttgatgaatcagaatctttagaactacagactgaactagtgactttagtggatgatgaggagctcgagctcagtgaattacaaacaggtccgaatccattgagatgttcagctcacctgtcttcaagtggtagacatgactgccccctttgtaaagatttacttgccaagtttcctccacaaagtttgaagatgaaaaagctattctctacaaaaccttgggagtcatcacctgaaatggtgaaaaagctttttcagattatccggtatgtatacactcattttggcagtattgatgtccaccccttcatatttgatgagtttgtgcaagcattccatgacaaggactcctcgttgttgggggaagtacatgttggtcttctcaagctactgttgttaaaggctgaaataggaagtgatggtgtatttgttccacgatcttctaaagactgcagatttctcagtttcctgaactttgttagggaacaagaattcgatgccaatgtttggatcagatcgttgaatgctcttacatgggttgagatacttcgtcaagtccttgttgcttcaggctttgggccaaaacagcatttgctgaatcaagaattctttaacaaggagaaaaatcaaatggctaaatatggtttacgtccccgcacactgaaaggagaattgtttgcactgttgtctaaggcaggaagttgtgggttaaaggtttcagtactagccaaatcatctgagattattgatcttaatgtttcgagcccattagaactagagcagttgatatctttagctctctccagtgacatcacattatttgagaagattgcaccttctgcatatcgtctccgtgttgacccccaaattaaaggggaagaagattctatgtcagatagtgatgattctggaagtgttgatgaggatgaggatgctagccgaagtgatgatggatctgatggttcccaaaagttaaaatttcttgagaatgaaagcagacttgctcgaaggaaggagaaaaatgcacatggaagtccaaataaatgtagtgaaattgatgaaagttattcaggtgaaaaatggcttttggcattgatggaaggcgagtattcagatctaagcattgatgagaagttggattgtttggttgctttaatagatgttgtttctggtgctggttctgttccaagacttgaggaaccgcaaagagtcttgcataatgtgcccagagtgcatccaccacaatcaggtgggaaaataaagaaatcaactaaaaacctttgtcaatatagcgatgagtccttaaatggttcaggaagtttggattgttgtcatcaaggccagtcaggaaggcgaaaaaatcaggattacaccactgaccctggaaggaacgatttacctattgctgctcatggaccacaagttgttctcttaggatcagaccgcaggtataatagctattggctcttccttggtccttgtagggaagatgatccagggcatcgtagggtctacttcgagtcctcagaggatggtcactgggaggtgattgattcaccacaggaattactttccttgctatctatcctcgatagcaggggcactagggaagcacatctccttacatcgatggagaagagacaagcctgcctttttgaagccatgaaaaaacatgtggaaggagggaaggcagccaggcttccagcctcatctgattcatactgctcccagacaagtagtggagatggaacttcgcccaagacaagtagtgtggatggagcttcatctgtatcagacattgagaacacttctgttcctacaagcctcaaagatagtaatttggattcatcgtctgccgtagtaattgaaagtgggaggggaggtgatgagaaaatatctatgtgggaacggctgcaagcatttgataaatggatctggacttctttttactccatccttactgctgttaaaagtggcaagaagtcatttaaggagtcactacttcgttgtggaagttgtcatgatctatattggagagatgaaaagcactgcagaatatgccattcaactttcgaggttggttttgatcttgaagaaaaatatgctgtacatgtggcgacgtgcagggagcctgaactttcacatgaggtaccaaatcataaatttctgccatcacagctacaggcacttaaagcagccattcatgctattgaggcctctatgcctgaggcagcttttactggttcttggatgaagtctgctcacaagctgtgggttaagcggctgcgacgaacgtcatcattgccagagcttttgcaggttcttgtcgattttgtaggggcaatggatgttgattggttgtacaaaagttcatctgcgagattgagaacaaatctggatgacatcattgtcgactttcagacaatgccacaaacaacatcagcagttgcactttgggttgtccaattggatgccctcattgcgccttatttggataatgccatggcaactggtgaatgctaggtagcttacaaagatggattcttttgcgtgatgcacaagcaccccgagctgacttctttttctggcaccatctgcaagttttttcttgatgaaagcttttcatctaggtgagacagaacatggggtctgctttgagttcgagaacaagatcttgcgacttgctgtaaagcatggaatatattgttccctcccagcagagcattgcgtcatagacaatgaaaaagttttgttaataatcgttgcttcagatatgtgaaagttttggctttccatgtagcgacacaattgggatgtaagcaatttctgaaacagaccgctgtttgcaggtggtgctgtttgggacttgattaccagctgtgcccttagttttaacggaggggtggttataattttgttccttctatatctgtatgtgctaagttgctcctagtccgtgagagctttctacattaggctatttttgtatgttatgtaaccagtttctattagagtgcagttgtagacatttagaacatgtacaccaatattgtgactgtttgaacaagtgagggaggcatagaagacttcatacggatgaattcatgattagaataaaattgcaccaaaaatcaattttgaaccgttacctttttggtatctcgtatatgttttttttttgtctatgtagtgctagttgataaatttcggatagatgtaaataggaaactgaaactctattcggatagatgtaaatagaaaaatgaaactctatttgtttaaaataagttaga

SEQ ID NO: 11509 - DNA, 2334 bp, Zea Mays
gaaaaagtgcagctcagccacgaatagcagaaatggccgcagtagtgttttggtccctccgccgccccccacggtctaacacacccgcccgctaattcgccgaccagcctgccatcacccgctcgctgcagccgccgcgcccctcccactcaccaacgcggcaacgcccatggcgcccgtctgctgaaaacacccgccgccatgcctcgcgaccagatggtgaccaatggttttggagcaaaaagggataatgcaggggcaaaaaaatctccccagcaaattcagaggctggagaagttttactctgatgtacagtatccaaagccagaggaaatgggtgagtatgcaacctgtgttggtttgacttacagtcaggtccgtatatggttcaaagagcgaaggagaaaagagaggaggatggagatgggagccattgggtctcagatggaaaggcaatttagtgcacgttccagtggacctagatgcagcagcagttcttcgttttgtaaccaagctcccatctatgacatttcacgttcagagtcggacacctggggtatgagcacggcaggagaggaaagtaaaattctatcacaagttctgtttcccaaggattatatcctgagcaaaattttccgcaaggatggtccacctcttggtagtgaattcgaccccctcccccaaagtgcacatggctgtatcagagacactacatgccatcattcctctgagaaccaaagaactgtgaagaagagaaagatcatagagtcaactaaccagagatctgatgtgtatgagaatactgctcctgtgaggaaacatggaattggcaaaggtctaatgacagtgtggcatgccatgtattcccataacgtgaaatgtcaaagcggtcgaaatttcattgatgaaactggttgcttgaggtctcttagaccgtttgacgattttgatggattagaagatcgcgataatggaaggaagactcaaaatcaaggtatgacacggaaaaagatagtcaaaaggagtaaagttctggtgaatagaaaaaaggtgccgtgtaagagagttactggtccaaaggtgcatcctccaatggcttgccatctttcagttgatgaatcagaatctttagaactacagactgaactagtgactttagtggatgatgaggagctcgagctcagtgaattacaaacaggtccgaatccattgagatgttcagctcacctgtcttcaagtggtagacatgactgccccctttgtaaagatttacttgccaagtttcctccacaaagtttgaagatgaaaaagctattctctacaaaaccttgggagtcatcacctgaaatggtgaaaaagctttttcagattatccggtatgtatacactcattttggcagtattgatgtccaccccttcatatttgatgagtttgtgcaagcattccatgacaaggactcctcgttgttgggggaagtacatgttggtcttctcaagctactgttgttaaaggctgaaataggaagtgatggtgtatttgttccacgatcttctaaagactgcagatttctcagtttcctgaactttgttagggaacaagaattcgatgccaatgtttggatcagatcgttgaatgctcttacatgggttgagatacttcgtcaagtccttgttgcttcaggctttgggccaaaacagcatttgctgaatcaagaattctttaacaaggagaaaaatcaaatggctaaatatggtttacgtccccgcacactgaaaggagaattgtttgcactgttgtctaaggcaggaagttgtgggttaaaggtttcagtactagccaaatcatctgagattattgatcttaatgtttcgagcccattagaactagagcagttgatatctttagctctctccagtgacatcacattatttgagaagattgcaccttctgcatatcgtctccgtgttgacccccaaattaaaggggaagaagattctatgtcagatagtgatgattctggaagtgttgatgaggatgaggatgctagccgaagtgatgatggatctgatggttcccaaaagttaaaatttcttgagaatgaaagcagacttgctcgaaggaaggagaaaaatgcacatggaagtccaaataaatgtagtgaaattgatgaaagttattcaggtgaaaaatggcttttggcattgatggaaggcgagtattcagatctaagcattgatgagaagttggattgtttggttgctttaatagatgttgtttctggtgctggttctgttccaagacttgagaagccggttcaaaaggttgaatgaaac

SEQ ID NO: 11510 - DNA, 3038 bp, Zea Mays
aaaaagtgcagctcagccacgaatagcagaaatggccgcagtagtgttttggtccctccgccgccccccacggtctaacacacccgcccgctaattcgccgaccagcctgccatcacccgctcgctgcagccgccgcgcccctcccactcaccaacgcggcaacgcccatggcgcccgtctgctgaaaacacccgccgccatgcctcgcgaccagatggtgaccaatggttttggagcaaaaagggataatgcaggggcaaaaaaatctccccagcaaattcagaggctggagaagttttactctgatgtacagtatccaaagccagaggaaatgggtgagtatgcaacctgtgttggtttgacttacagtcaggtccgtatatggttcaaagagcgaaggagaaaagagaggaggatggagatgggagccattgggtctcagatggaaaggcaatttagtgcacgttccagtggacctagatgcagcagcagttcttcgttttgtaaccaagctcccatctatgacatttcacgttcagagtcggacacctggggtatgagcacggcaggagaggaaagtaaaattctatcacaagttctgtttcccaaggattatatcctgagcaaaattttccgcaaggatggtccacctcttggtagtgaattcgaccccctcccccaaagtgcacatggctgtatcagagacactacatgccatcattcctctgagaaccaaagaactgtgaagaagagaaagatcatagagtcaactaaccagagatctgatgtgtatgagaatactgctcctgtgaggaaacatggaattggcaaaggtctaatgacagtgtggcatgccatgtattcccataacgtgaaatgtcaaagcggtcgaaatttcattgatgaaactggttgcttgaggtctcttagaccgtttgacgattttgatggattagaagatcgcgataatggaaggaagactcaaaatcaaggtatgacacggaaaaagatagtcaaaaggagtaaagttctggtgaatagaaaaaaggtgccgtgtaagagagttactggtccaaaggtgcatcctccaatggcttgccatctttcagttgatgaatcagaatctttagaactacagactgaactagtgactttagtggatgatgaggagctcgagctcagtgaattacaaacaggtccgaatccattgagatgttcagctcacctgtcttcaagtggtagacatgactgccccctttgtaaagatttacttgccaagtttcctccacaaagtttgaagatgaaaaagctattctctacaaaaccttgggagtcatcacctgaaatggtgaaaaagctttttcaggtctccttctgaagcatctggatgaagttgacaacaagaatgatttaccctgggtgcatctcatctggaacccctactacacaaattgataacattccacttacttggcttgttctggtgggatgtaatgttatacttcaacttattcagtggaccttttttcctgctcaataggagatggaacaactgtttaatctggactggcgtatagaatggcatgcaattgcaaatgcaacaaaatttccttaaactcttccctctttggtgaagaatggatccatgctgcagcattgggtgccgccttctgcatcggatgttagaattatttagattatccggtatgtatacactcattttggcagtattgatgtccaccccttcatatttgatgagtttgtgcaagcattccatgacaaggactcctcgttgttgggggaagtacatgttggtcttctcaagctactgttgttaaaggctgaaataggaagtgatggtgtatttgttccacgatcttctaaagactgcagatttctcagtttcctgaactttgttagggaacaagaattcgatgccaatgtttggatcagatcgttgaatgctcttacatgggttgagatacttcgtcaagtccttgttgcttcaggctttgggccaaaacagcatttgctgaatcaagaattctttaacaaggagaaaaatcaaatggctaaatatggtttacgtccccgcacactgaaaggagaattgtttgcactgttgtctaaggcaggaagttgtgggttaaaggtttcagtactagccaaatcatctgagattattgatcttaatgtttcgagcccattagaactagagcagttgatatctttagctctctccagtgacatcacattatttgagaagattgcaccttctgcatatcgtctccgtgttgacccccaaattaaaggggaagaagattctatgtcagatagtgatgattctggaagtgttgatgaggatgaggatgctagccgaagtgatgatggatctgatggttcccaaaagttaaaatttcttgagaatgaaagcagacttgctcgaaggaaggagaaaaatgcacatggaagtccaaataaatgtagtgaaattgatgaaagttattcaggtgaaaaatggcttttggcattgatggaaggcgagtattcagatctaagcattgatgagaagttggattgtttggttgctttaatagatgttgtttctggtgctggttctgttccaagacttgaggtagtccaggggtggcttagggcaggaaggaccaccgaaatgtcgctcggcttgcacgagctggcgagtgagggtgttcacagcactgcactcctgttcctaagtgagggcagcagcccactcgtgcttctggacagtggtggccttggcagccacaagagctgcaacaagggtggagtgggcagcaacgatgtcaggggaaggagcagtagtcgacggagtgaggtgaaggggagcaacaaccatcgcaacaatggggctaagagcggcaacacctaggcctgtagcagcacacagcggggaggtggcatctgcgagagcaacagggtcggtgcccaggccttgttcaccggagagcggcgcgcccagggcaccaaggctagcagttgattggatacccag

SEQ ID NO: 11511 - DNA, 1365 bp, Zea Mays
gcagaaatggccgcagtagtgttttggtccctccgccgccccccacggtctaacacacccgcccgctaattcgccgaccagcctgccatcacccgctcgctgcagccgccgcgcccctcccactcaccaacgcggcaacgcccatggcgcccgtctgctgaaaacacccgccgccatgcctcgcgaccagatggtgaccaatggttttggagcaaaaagggataatgcaggggcaaaaaaatctccccagcaaattcagaggctggagaagttttactctgatgtacagtatccaaagccagaggaaatgggtgagtatgcaacctgtgttggtttgacttacagtcaggtccgtatatggttcaaagagcgaaggagaaaagagaggaggatggagatgggagccattgggtctcagatggaaaggcaatttagtgcacgttccagtggacctagatgcagcagcagttcttcgttttgtaaccaagctcccatctatgacatttcacgttcagagtcggacacctggggtatgagcacggcaggagaggaaagtaaaattctatcacaagttctgtttcccaaggattatatcctgagcaaaattttccgcaaggatggtccacctcttggtagtgaattcgaccccctcccccaaagtgcacatggctgtatcagagacactacatgccatcattcctctgagaaccaaagaactgtgaagaagagaaagatcatagagtcaactaaccagagatctgatgtgtatgagaatactgctcctgtgaggaaacatggaattggcaaaggtctaatgacagtgtggcatgccatgtattcccataacgtgaaatgtcaaagcggtcgaaatttcattgatgaaactggttgcttgaggtctcttagaccgtttgacgattttgatggattagaagatcgcgataatggaaggaagactcaaaatcaaggtatgacacggaaaaagatagtcaaaaggagtaaagttctggtgaatagaaaaaaggtgccgtgtaagagagttactggtccaaaggtgcatcctccaatggcttgccatctttcagttgatgaatcagaatctttagaactacagactgaactagtgactttagtggatgatgaggagctcgagctcagtgaattacaaacaggtccgaatccattgagatgttcagctcacctgtcttcaagtggtagacatgactgccccctttgtaaagatttacttgccaagtttcctccacaaagtttgaagatgaaaaagctattctctacaaaaccttgggagtcatcacctgaaatggtgaaaaagctttttcaggagatggaacaactgtttaatct

SEQ ID NO: 11512 - DNA, 1315 bp, Zea Mays
gcagaaatggccgcagtagtgttttggtccctccgccgccccccacggtctaacacacccgcccgctaattcgccgaccagcctgccatcacccgctcgctgcagccgccgcgcccctcccactcaccaacgcggcaacgcccatggcgcccgtctgctgaaaacacccgccgccatgcctcgcgaccagatggtgaccaatggttttggagcaaaaagggataatgcaggggcaaaaaaatctccccagcaaattcagaggctggagaagttttactctgatgtacagtatccaaagccagaggaaatgggtgagtatgcaacctgtgttggtttgacttacagtcaggtccgtatatggttcaaagagcgaaggagaaaagagaggaggatggagatgggagccattgggtctcagatggaaaggcaatttagtgcacgttccagtggacctagatgcagcagcagttcttcgttttgtaaccaagctcccatctatgacatttcacgttcagagtcggacacctggggtatgagcacggcaggagaggaaagtaaaattctatcacaagttctgtttcccaaggattatatcctgagcaaaattttccgcaaggatggtccacctcttggtagtgaattcgaccccctcccccaaagtgcacatggctgtatcagagacactacatgccatcattcctctgagaaccaaagaactgtgaagaagagaaagatcatagagtcaactaaccagagatctgatgtgtatgagaatactgctcctgtgaggaaacatggaattggcaaaggtctaatgacagtgtggcatgccatgtattcccataacgtgaaatgtcaaagcggtcgaaatttcattgatgaaactggttgcttgaggtctcttagaccgtttgacgattttgatggattagaagatcgcgataatggaaggaagactcaaaatcaaggtatgacacggaaaaagatagtcaaaaggagtaaagttctggtgaatagaaaaaaggtgccgtgtaagagagttactggtccaaaggtgcatcctccaatggcttgccatctttcagttgatgaatcagaatctttagaactacagactgaactagtgactttagtggatgatgaggagctcgagctcagtgaattacaaacagatttacttgccaagtttcctccacaaagtttgaagatgaaaaagctattctctacaaaaccttgggagtcatcacctgaaatggtgaaaaagctttttcaggtctccttctgaagcatctggatgaagttgacaacaagaatg

SEQ ID NO: 11513 - DNA, 1360 bp, Zea Mays
gtcaatctctcccctcctctacggactacgaggctggagcacaagttgctggacaatatcttctctgtgctgtcatgcgttgtctccgtgcccttctacacgggattcctccctctcctcttctggagtggacacggcaggctggctaggcagatgaccctcctcatggctttctgtgactacctcggcaactctgtcaaggatatagtgtcagccgctcggccgtgctctcctcctgtaagacgagtgacggctacagaagacgagaaggaaaatgccatggaatatgggcttccatcatcgcatgctctcaataccgtttgtttgacgggatatttactacactacatcctcacgtttggagaacatggtagtgttacagttgctgcgggtttatctctagctttcttgcttgtcatgctagttggcatcgcgaggatatatctgggtatgcacagcttgaccgacgttgttgctggaattggttttggcgtcgtcatccttgcgttctggttggctgttcatgaccgtgtcgatgccttcgttgtctccggggaaaatgttgcgaccttctgggcaggcctttctctgttgctgtgctttgcgtacccgaagccggagttccctactcctagcttcgaataccacacagcattcaacggggttgctttcggaatcgtgtacggcatccagcaaacatacttccacttccacacccctgacgccccggtcgtcttcagcgccgagctgcccctgctcacgttcgccgggcgcgtcctcgtcgggatcccgaccatcctggccgtgaaattctgcagcaaggcgctgtccaagtggctgctgcccgtggtgtgcagcaccctgggcatccccaccgtgtcgtcctgctacgtcccggccctgagagccgacagcggcagcggcagcggcaagaacaggcagggccccgggcacctgcagcggctgctgttctcccacttcccccggaaggcgtacgacgtggacacgggcatcaggttcgtccagtacgccagcctcgcgtggtccgtggttgacttggtaccggccatgttcgcccatctgaatctgtagccagctgcgtagaatttctgcttctcttttcgatgagctcccaatgcggccccctcctgctcgtaagacatggatcagcttacgaggctgtaaatccgattgtctggctggctggcttctccttctcgtatcgtatgtacctagctgttctcaccaggggtgttgtttctatgcaagtttgtgtgtgtagtaagtagcaaccagtagtattgattgatgatggatagctgagacattcttgacgtcaaagggatgccttttcttgcct

SEQ ID NO: 11514 - DNA, 2763 bp, Zea Mays
gcccgagcctgcgactgctcggcttccgcgcggcgcgcacagaaacggacgctacaggggggcagcagcgcaggcggcagtccggctgcagagcgagaaacccgcaagaggcgatcgctagccgcgagcgcgggcggccaccatggcggcgagcgcgagggggagcgtgtgggagatccagccgcgcgacgtggaggccgcggggctcgccgcagccgacgcggccgcgttccacgccgcgctccgctccgccgcgggctcggcagccgcctccggggacgccgtgtgggcggccgtggccgcggcgggggtgctgcggccggagcacccgcacgcgctccaccagctcgtctactactccgcctacgccgggtgggaccgcgccgcccggggcccgccgccgtactggttcccgtcaccaactgactgtaagcaaacgaacctggggagattgatggaagtaaatggaccaaagctgttaggatcatcatacagggatcctatatcaagttttaaccacttttacaggttttccgtagagaaccaagaggtctactggtcaatggtgctaaagcaactcgcagtcaagtttaaacaagaaccaatgtcaattctaagtacgtcagatagatcaaagaaaggggggacatggcttcaaggtgcagtgctcaacatcgctgagtgctgtctgttgccttgtccttccctgaagaggacagatgacagtacagctatcatttggagggatgaaggccttgatgattatccagtgaaccgaatgtcactgaaggagcttcgcagtcaagtgataactgtcgcacatgccttagatgccatatttgagaagggggacccgattgcaatagacacgcctatgacatgcaatgcagtcatcatatatttggcgatcatccttggtggttttgttgttgtatctatagcagatagttttgcacctcaggagattggtagtcgtatgggtgtctccaaagcaaaggcaatttttacccaggatttcattgttagaggagggaagaaagttccattgtacagccgtgtcatacaagggacttcatctaaagctgttgtgattcctgcaattggagattctcttggaattatgctaagggatggtgatatgtcctggaaagattttctttctcacgctgctggaaggtcatcttcatattctccagtttatcaatctgtggatgcactaactaatatactattttcttcaggaacaaccggggagccaaaagcaataccgtggacacaactttctcccataagatgtgcatccgatacctgggcacatttggatgttcgtccgtgtgacataggttgctggcctactaatctgggctgggttatgggaccaataatcatctactcatgctttctgactggggcaactttggctttataccatggatctccacttggacgcgatttctgcaaatttgtacaggatgctggtgtgactgtattaggaagtgtgcctagcttggtgaagtcatggaaagctgggaactgcgctgaagggcttgactggaccaaaatcagagtactaggcacaacgggggaggcttctgatattgatgacaacctgtggctaacttcgcgtgcctcatacaagcccattgttgagtgctgtggaggcacagagttggcatcctcatacattcaagggagtcttctgcgaccgcaggcctttggagcttttagtggcgcatcaatgtccactgggtttgtcatacttgatgaacagggaactcccctgatgatataccttgctctggagaagtgggtctcttccctttgtattttggtgctactgatcggcttctcaacgctgatcatgacaaggtttacttcgatggaatgcccatttataaaggaaggcaactcagacgacatggagatataatccagaggacagtaggcgggtactatattgtacagggaagggcggatgacaccatgaacctcggtggaattaagaccagttcagtagagatagaacgggtgtgcaacagagctgacgagtgtctgctagaaacagcagcagttagcatcaaaccttccggtgggggaccagaacatctagccatcttggcggtgctaaaagatagatcggcccagtacgacgtgaatcttctcaagaggaagttccagactgccattcagaagaacctcaatcctctcttcaaggtgagctatgtcaaagtcgtcgctgagttcccgagaacggcttcgaacaagctgctgagaagggttctgagggatcagctcgcgcaggaactctcaaatcgcagcaagctatgacctttgagactgttctgcctttgtttcagcatcaaagctatcgattttcttgttccatttcaataaagcactgcttcaatgaaggaagcataccaagatgatcctacaaattccccccgcccctgtaaaacttcaaatctggttgtccttttgaaaagggaaccgtagtccagagaacgtttgtaaaggtctgtacattttatctgatcgttacagtgctgatgaacaaactaggcgcatgcatagttgtgtcacttagtatgtaccaatcggtggtaattgcatcgaatcatttgctgcgatttttttttatcttgcgagacaagtgggagtcagtgcttcgttgtatcgtactgtttgaacgtctatcacctagttaacctcgtttgtgacatgtgagaggatataggttctggaatgcagagctgctgtgag

SEQ ID NO: 11515 - DNA, 2739 bp, Zea Mays
gcccgagcctgcgactgctcggcttccgcgcggcgcgcacagaaacggacgctacaggggggcagcagcgcaggcggcagtccggctgcagagcgagaaacccgcaagaggcgatcgctagccgcgagcgcgggcggccaccatggcggcgagcgcgagggggagcgtgtgggagatccagccgcgcgacgtggaggccgcggggctcgccgcagccgacgcggccgcgttccacgccgcgctccgctccgccgcgggctcggcagccgcctccggggacgccgtgtgggcggccgtggccgcggcgggggtgctgcggccggagcacccgcacgcgctccaccagctcgtctactactccgcctacgccgggtgggaccgcgccgcccggggcccgccgccgtactggttcccgtcaccaactgactgtaagcaaacgaacctggggagattgatggaagtaaatggaccaaagctgttaggatcatcatacagggatcctatatcaagttttaaccacttttacaggttttccgtagagaaccaagaggtctactggtcaatggtgctaaagcaactcgcagtcaagtttaaacaagaaccaatgtcaattctaagtacgtcagatagatcaaagaaaggggggacatggcttcaaggtgcagtgctcaacatcgctgagtgctgtctgttgccttgtccttccctgaagaggacagatgacagtacagctatcatttggagggatgaaggccttgatgattatccagtgaaccgaatgtcactgaaggagcttcgcagtcaagtgataactgtcgcacatgccttagatgccatatttgagaagggggacccgattgcaatagacacgcctatgacatgcaatgcagtcatcatatatttggcgatcatccttggtggttttgttgttgtatctatagcagatagttttgcacctcaggagattggtagtcgtatgggtgtctccaaagcaaaggcaatttttacccaggatttcattgttagaggagggaagaaagttccattgtacagccgtgtcatacaagggacttcatctaaagctgttgtgattcctgcaattggagattctcttggaattatgctaagggatggtgatatgtcctggaaagattttctttctcacgctgctggaaggtcatcttcatattctccagtttatcaatctgtggatgcactaactaatatactattttcttcaggaacaaccggggagccaaaagcaataccgtggacacaactttctcccataagatgtgcatccgatacctgggcacatttggatgttcgtccgtgtgacataggttgctggcctactaatctgggctgggttatgggaccaataatcatctactcatgctttctgactggggcaactttggctttataccatggatctccacttggacgcgatttctgcaaatttgtacaggatgctggtgtgactgtattaggaagtgtgcctagcttggtgaagtcatggaaagctgggaactgcgctgaagggcttgactggaccaaaatcagagtactaggcacaacgggggaggcttctgatattgatgacaacctgtggctaacttcgcgtgcctcatacaagcccattgttgagtgctgtggaggcacagagttggcatcctcatacattcaagggagtcttctgcgaccgcaggcctttggagcttttagtggcgcatcaatgtccactgggtttgtcatacttgatgaacagggaactccgtattgggtctcttccctttgtattttggtgctactgatcggcttctcaacgctgatcatgacaaggtttacttcgatggaatgcccatttataaaggaaggcaactcagacgacatggagatataatccagaggacagtaggcgggtactatattgtacagggaagggcggatgacaccatgaacctcggtggaattaagaccagttcagtagagatagaacgggtgtgcaacagagctgacgagtgtctgctagaaacagcagcagttagcatcaaaccttccggtgggggaccagaacatctagccatcttggcggtgctaaaagatagatcggcccagtacgacgtgaatcttctcaagaggaagttccagactgccattcagaagaacctcaatcctctcttcaaggtgagctatgtcaaagtcgtcgctgagttcccgagaacggcttcgaacaagctgctgagaagggttctgagggatcagctcgcgcaggaactctcaaatcgcagcaagctatgacctttgagactgttctgcctttgtttcagcatcaaagctatcgattttcttgttccatttcaataaagcactgcttcaatgaaggaagcataccaagatgatcctacaaattccccccgcccctgtaaaacttcaaatctggttgtccttttgaaaagggaaccgtagtccagagaacgtttgtaaaggtctgtacattttatctgatcgttacagtgctgatgaacaaactaggcgcatgcatagttgtgtcacttagtatgtaccaatcggtggtaattgcatcgaatcatttgctgcgatttttttttatcttgcgagacaagtgggagtcagtgcttcgttgtatcgtactgtttgaacgtctatcacctagttaacctcgtttgtgacatgtgagaggatataggttctggaatgcagagctgctgtgag

SEQ ID NO: 11516 - DNA, 2759 bp, Zea Mays
gcccgagcctgcgactgctcggcttccgcgcggcgcgcacagaaacggacgctacaggggggcagcagcgcaggcggcagtccggctgcagagcgagaaacccgcaagaggcgatcgctagccgcgagcgcgggcggccaccatggcggcgagcgcgagggggagcgtgtgggagatccagccgcgcgacgtggaggccgcggggctcgccgcagccgacgcggccgcgttccacgccgcgctccgctccgccgcgggctcggcagccgcctccggggacgccgtgtgggcggccgtggccgcggcgggggtgctgcggccggagcacccgcacgcgctccaccagctcgtctactactccgcctacgccgggtgggaccgcgccgcccggggcccgccgccgtactggttcccgtcaccaactgactgtaagcaaacgaacctggggagattgatggaagtaaatggaccaaagctgttaggatcatcatacagggatcctatatcaagttttaaccacttttacaggttttccgtagagaaccaagaggtctactggtcaatggtgctaaagcaactcgcagtcaagtttaaacaagaaccaatgtcaattctaagtacgtcagatagatcaaagaaaggggggacatggcttcaaggtgcagtgctcaacatcgctgagtgctgtctgttgccttgtccttccctgaagaggacagatgacagtacagctatcatttggagggatgaaggccttgatgattatccagtgaaccgaatgtcactgaaggagcttcgcagtcaagtgataactgtcgcacatgccttagatgccatatttgagaagggggacccgattgcaatagacacgcctatgacatgcaatgcagtcatcatatatttggcgatcatccttggtggttttgttgttgtatctatagcagatagttttgcacctcaggagattggtagtcgtatgggtgtctccaaagcaaaggcaatttttacccaggatttcattgttagaggagggaagaaagttccattgtacagccgtgtcatacaagggacttcatctaaagctgttgtgattcctgcaattggagattctcttggaattatgctaagggatggtgatatgtcctggaaagattttctttctcacgctgctggaaggtcatcttcatattctccagtttatcaatctgtggatgcactaactaatatactattttcttcaggaacaaccggggagccaaaagcaataccgtggacacaactttctcccataagatgtgcatccgatacctgggcacatttggatgttcgtccgtgtgacataggttgctggcctactaatctgggctgggttatgggaccaataatcatctactcatgctttctgactggggcaactttggctttataccatggatctccacttggacgcgatttctgcaaatttgtacaggatgctggtgtgactgtattaggaagtgtgcctagcttggtgaagtcatggaaagctgggaactgcgctgaagggcttgactggaccaaaatcagagtactaggcacaacgggggaggcttctgatattgatgacaacctgtggctaacttcgcgtgcctcatacaagcccattgttgagtgctgtggaggcacagagttggcatcctcatacattcaagggagtcttctgcgaccgcaggcctttggagcttttagtggcgcatcaatgtccactgggtttgtcatacttgatgaacagggaactccgtatcctgatgatataccttgctctggagaagtgggtctcttccctttgtattttggtgctactgatcggcttctcaacgctgatcatgacaaggtttacttcgatggaatgcccatttataaaggaaggacgacatggagatataatccagaggacagtaggcgggtactatattgtacagggaagggcggatgacaccatgaacctcggtggaattaagaccagttcagtagagatagaacgggtgtgcaacagagctgacgagtgtctgctagaaacagcagcagttagcatcaaaccttccggtgggggaccagaacatctagccatcttggcggtgctaaaagatagatcggcccagtacgacgtgaatcttctcaagaggaagttccagactgccattcagaagaacctcaatcctctcttcaaggtgagctatgtcaaagtcgtcgctgagttcccgagaacggcttcgaacaagctgctgagaagggttctgagggatcagctcgcgcaggaactctcaaatcgcagcaagctatgacctttgagactgttctgcctttgtttcagcatcaaagctatcgattttcttgttccatttcaataaagcactgcttcaatgaaggaagcataccaagatgatcctacaaattccccccgcccctgtaaaacttcaaatctggttgtccttttgaaaagggaaccgtagtccagagaacgtttgtaaaggtctgtacattttatctgatcgttacagtgctgatgaacaaactaggcgcatgcatagttgtgtcacttagtatgtaccaatcggtggtaattgcatcgaatcatttgctgcgatttttttttatcttgcgagacaagtgggagtcagtgcttcgttgtatcgtactgtttgaacgtctatcacctagttaacctcgtttgtgacatgtgagaggatataggttctggaatgcagagctgctgtgag

SEQ ID NO: 11517 - DNA, 767 bp, Zea Mays
gttggatggcaacataccgcctatccacctgcgctcttcccgttccccaactgcaacatcctctatctctctctctctctctctccctctctacctgccccgttcctcaccagtctcttccgccggcgtcgacgagagctgcgctaggtgatctcgactgcttcctcgccccccatggcgacggcgctcaaatcgttcctgaacagccccgtcggccccaagaccacccacttctggggccctgtcgccaactggggcttcgtcatcgcgggtttggttgacatgaacaagcctcctgaaatgatatctggcaatatgacagcagccatgtgtgtgtattctggactctttatgaggtttgcatggatggtacagccccgaaattatttgcttctggcatgccatgcttccaatgaaagcgtccagctctatcagttatctcgctgggctaggtctcaggggtacctggagaagaaagaaccagaggccaaacagtaaagaggaaaaatacaatgactcaaagaagttcctaccacgaagatcagtcattgcgaaattttgctccggtcgctcggcaatgtcatcctggattcgaatatatgtaaatattgattgaaaaaaaatccatctttggtcacaatgtaccttttagacttagataaaattacaaaattcaagatagaaattgacaataagatgtttggttcaccccctccccccagcacaaatgcttggtttcttcggttctaaactgtgttgagttttct

SEQ ID NO: 11518 - DNA, 1261 bp, Zea Mays
gttgtcctctctctctccaccgttggatggcaacataccgcctatccacctgcgctcttcccgttccccaactgcaacatcctctatctctctctctctctctctccctctctacctgccccgttcctcaccagtctcttccgccggcgtcgacgagagctgcgctaggtgatctcgactgcttcctcgccccccatggcgacggcgctcaaatcgttcctgaacagccccgtcggccccaagaccacccacttctggggccctgtcgccaactggggcttcgtcatcgcgggtttggttgacatgaacaagcctcctgaaatgatatctggcaatatgacagcagccatgtgtgtgtattctggactctttatgaggtttgcatggatggtacagccccgaaattatttgcttctggcatgccatgcttccaatgaaagcgtccagctctatcagttatctcgctgggctaggtctcaggggtacctggagaagaaagaaccagaggccaaacagtaaagagggtatccaacactgcagtcatttgttcaataaagaaaatatgctgtggaaaacattcattctgttgccaatgcagttttttttgtatgtttgcaaaatatgctgaggaaatttcatgatacctagcgcagttacaagtgtctgcttacttttatgtgcatttgtcaagacacatttgttttttacattgctgccttcctactatttggcactatttattttacctggctcatccgctcatgtgcccaaaatgcttagtaaaataaattcatgttcacttatacaacacaattccagattttattcaagtcaaggaatattttgacgttctgttcctagaccgaacgaaatacttagaatataatattctaattaattcctattatacaaaaagtccagatagactgaacaaaaagggcttcatttctattttccaatttggcaaatcacatatttgtttccttcgtatgaacagaaaaatacaatgactcaaagaagttcctaccacgaagatcagtcattgcgaaattttgctccggtcgctcggcaatgtcatcctggattcgaatatatgtaaatattgattgaaaaaaaatccatctttggtcacaatgtaccttttagacttagataaaattacaaaattcaagatagaaattgacaataagatgtttggttcaccccctccccccagcacaaatgcttggtttcttcggttctaaactgtgttgagttttct

SEQ ID NO: 11519 - DNA, 2179 bp, Zea Mays
ctagttcaagccagtagtgaaagccgccgggcagggcggcagtataaactagtgatagccactagtggtagtggcgtctgggtctctatatatgtacgtctgccatcatcccatccctatccccccgatcactctttcactctactccaaccactccgcggaatcgtaccttacccagccttcttcctcgtcgccgggctcgccgccagccatgtcggcggcgttcaaggcgttcctgaatagcccagtgggccccaagacgacccacttctggggacccgtctccaactggggcatcatcctcgcggaacacagaaaaatgaagtccggcacaaactaggcccgtgcgcgccatgcgtgagttgctgaggcaaccaatcacgtagactgtgaatgaacgctcactacagagtacagacgcaccatacaatagctccacaaaactctgcagcccactgttgacacttgacagcgccgacagaatctcttcttttattttaatccttttattttaattcatcatctcctttaatttgccttcttcaacaagcgtcttttggacttccattattacgtaccgtttgatttacatattggtaacgtaatggataatctatcgacgaaaccaattgtatattatttgatgaaatcactctcttatcaaggaacgaattatttgctcatccggtctgaaagtatctgacatccaatccaaaaaagaaaaagaaataaaatgttgtcccatgctaggatgcaagttgcaacccaaataatagaactccaatcattgatactcagtctgatagctcatatgtgtcttacctctacgctctgtaagttgttttaggggtggaacatgaaacaggacatttctccccccaaaccgtcctcttatcccatgtagattggatgagattgaaatagattataaatgattttgacttggctaggatttaaacatactaaatctcacccaatccatatggattgggaggaaaacgaacaaaccctacaaagggcactaccccaagtgtcttttaaacatcttgtttgattttaaacatacaaatgtaatatcctgcattgtttttaaatgttatctggatttaaataaaatgaaatggctttgctaacttttcactaaagcttctaactatgaaataattttaaaagcacaatatctgattcacacttgtttccgttcactattaggtgtgtttgattctcctcactaaagtttagtcaatgtcaaatcaggcatttgaatgacgattacaaatattaaatatagcctaatcataaaactaaatatatagatacaaggttaaatgatgagataaatttgttaaccatagttaattcatgattagtaaatatttaccaattaggcttaatagattcattttacagtttagttcttatctatataattagttttgtaattagaatatatttaatatttctatctagcatcaaaacatctaatgtgtcgtggactaaaatttagtggagtatccaaacaccacctcaggatttaacgcttggcgttgcattacaattacacaactaatgaaccctgaggatttcttttaatatacatacatatatattttgcagagcgtggcagacacgaaaaagcctcctgagatgatatccggcaacatgacaggagtgttgtgcgtgtactctgcgctcttcgtcaggttcgcgtggatggtgcgacctcggaactatttcctcatggtaacccacagctgcaacgagtgcgttcagctctaccagctgtcgcgctgggctagggcgcaggggttctttgagaagaaagaagaggagaggcccaagagcgaagattgaccgacggcccggccctaaaccatacaatactacaatgtgctcggttgtaccacaaaggcaatatttgatgcatgtattgtaacgtgaaaaaaagcctcggttatacatgttgtaggttcatctgcggatattgaactatgaatttccgagcataaagcatcaatttccactgccgtcgtttctcccacatttaaattatataaaaaactaaaattatacataaatgaggatttgaattatgactattgattctaaatcgttcctcccacattcaagttataaaaaaactaaaattagacataaatgatgatttgaattatgatta

SEQ ID NO: 11520 - DNA, 1161 bp, Zea Mays
ctgtcgactccatcggggaacacagaaaaatgaagtccggcacaaactaggcccgtgcgcgccatgcgtgagttgctgaggcaaccaatcacgtagactgtgaatgaacgctcactacagagtacagacgcaccatacaatagctccacaaaactctgcagcccactgttgacacttgacagcgccgacagaatctcttcttttattttaatccttttattttaattcatcatctcctttaatttgccttcttcaacaagcgtcttttggacttccattattacgtaccgtttgatttacatattggtaacgtaatggataatctatcgacgaaaccaattgtatattatttgatgaaatcactctcttatcaaggaacgaattatttgctcatccggtctgaaagtatctgacatccaatccaaaaaagaaaaagaaataaaatgttgtcccatgctaggatgcaagttgcaacccaaataatagaactccaatcattgatactcagtctgatagctcatatgtgtcttacctctacgctctgtaagttgttttaggggtggaacatgaaacaggacatttctccccccaaaccgtcctcttatcccatgtagattggatgagattgaaatagattataaatgattttgacttggctaggatttaaacatactaaatctcacccaatccatatggattgggaggaaaacgaacaaaccctacaaagggcactaccccaagtgtcttttaaacatcttgtttgattttaaacatacaaatgtaatatcctgcattgtttttaaatgttatctggatttaaataaaatgaaatggctttgctaacttttcactaaagcttctaactatgaaataattttaaaagcacaatatctgattcacacttgtttccgttcactattaggtgtgtttgattctcctcactaaagtttagtcaatgtcaaatcaggcatttgaatgacgattacaaatattaaatatagcctaatcataaaactaaatatatagatacaaggttaaatgatgagataaatttgttaaccatagttaattcatgattagtaaatatttaccaattaggcttaatagattcattttacagtttagttcttatctatataattagttttgtaattagaatat

SEQ ID NO: 11521 - DNA, 1381 bp, Zea Mays
gttcttcgatatcagaaattaggatatcgatttaggtatatggacaaggtgtctgaaggtactaagtgagatggataagaagaaagggaccgatggcaccgaaccaggaccagctccatctcgtgccgtcgacagatttggttttataaagccagaacaaggcaattcacctgatggaattccaaaaggcaagtctatacatgagcgtgaaagggaggaaagaaggataagaaaatggaggaagatgataggtgttggtggtaatgactggaagcattatgttagaaggaaccctcatgtggttaaaaggcgaataaggaaaggaattcctgattgtctcagaggacttgtttggcagttgatttcaggcagtcgggacctcttactaatgaacccaggggtttacgagacactggtgatatatgagacatcggcctctgaattggaaattattcgtgacatatcacgcacatttccatctcatatattctttcaacaaaggcatggtccaggccaaagatcattgtataacattttgaaagcatattctgtctatgacagggatgttggatatgtgcagggaatgggatttttagctgggctgctgcttctttatatgagtgaggaggatgcattctggttattagtcgcgttgctaaagggagctgtccatgcaccaatggaaggcttgtatcaggctggtttgccgcttgtgcagcaatatttgtctcagtttgagaaattagttattgagctcatgccaaaattgggacaacactttgttgaagaaatgataaacccaagcatgtatgcaagtcaatggtttatcacagttttctcatattccttcccatttcatctaactcttagagtttgggatgtgtttctttatgagggtattaaggttgtattccaagttggattggctctattgagactctgtcacgatgatttagtcaaattaccttttgagaaactgctctatgccttgagaaatttccctgaggaagcgacagatccagatgtattattgccgcttgccttttcatttaaggtatcgagtcgtctcgaggagcttcagaaggagtatcagaagcgacaggagggcaccagtgaaacttcaagcggcgagcggctacagcccctcgtatcgaagacgatgagcagggtcggtagccgtgttgtgtcgaacttaacgaccgctgacagaaaatgacagacacgttctcttgtttgtttgtaactcgcatgtacactgtacagaaagaacggccttataatccatccatctaacagtatttgttttgcgtttctgtcaccattgcatttgcttttataatcctggatcgcaggaacaaaaaaggaacgtatttgaattgac

SEQ ID NO: 11522 - DNA, 1477 bp, Zea Mays
cgggtaggcaaattgagtagctatggattgtcaagaggattgcgcttgcgcgatcggactatcggagtatgctttgtttaacatgttcctttagctgatccttccggtcttggggaaggatatcgatttaggtatatggacaaggtgtctgaaggtactaagtgagatggataagaagaaagggaccgatggcaccgaaccaggaccagctccatctcgtgccgtcgacagatttggttttataaagccagaacaaggcaattcacctgatggaattccaaaaggcaagtctatacatgagcgtgaaagggaggaaagaaggataagaaaatggaggaagatgataggtgttggtggtaatgactggaagcattatgttagaaggaaccctcatgtggttaaaaggcgaataaggaaaggaattcctgattgtctcagaggacttgtttggcagttgatttcaggcagtcgggacctcttactaatgaacccaggggtttacgagacactggtgatatatgagacatcggcctctgaattggaaattattcgtgacatatcacgcacatttccatctcatatattctttcaacaaaggcatggtccaggccaaagatcattgtataacattttgaaagcatattctgtctatgacagggatgttggatatgtgcagggaatgggatttttagctgggctgctgcttctttatatgagtgaggaggatgcattctggttattagtcgcgttgctaaagggagctgtccatgcaccaatggaaggcttgtatcaggctggtttgccgcttgtgcagcaatatttgtctcagtttgagaaattagttattgagctcatgccaaaattgggacaacactttgttgaagaaatgataaacccaagcatgtatgcaagtcaatggtttatcacagttttctcatattccttcccatttcatctaactcttagagtttgggatgtgtttctttatgagggtattaaggttgtattccaagttggattggctctattgagactctgtcacgatgatttagtcaaattaccttttgagaaactgctctatgccttgagaaatttccctgaggaagcgacagatccagatgtattattgccgcttgccttttcatttaaggtatcgagtcgtctcgaggagcttcagaaggagtatcagaagcgacaggagggcaccagtgaaacttcaagcggcgagcggctacagcccctcgtatcgaagacgatgagcagggtcggtagccgtgttgtgtcgaacttaacgaccgctgacagaaaatgacagacacgttctcttgtttgtttgtaactcgcatgtacactgtacagaaagaacggccttataatccatccatctaacagtatttgttttgcgtttctgtcaccattgcatttgcttttataatcctggatcgcaggaacaaaaaaggaacgtatttgaattgac

SEQ ID NO: 11523 - DNA, 2107 bp, Zea Mays
cccgatccgaatgctgccgatggcttgtcgcgttctcgtcgggggcgtcgggtctcggggattctgtgttgtcatggtccttgtggattcctagggttggggtggttattcggctgtgggcgggaggcgccccttcgcttgcaaattttttggaatccatgcttgcagggaggagggctgaggagcgtagggccgagggggcatcgggtaggcaaattgagtagctatggattgtcaagaggattgcgcttgcgcgatcggactatcggagtatgctttgtttaacatgttcctttagctgatccttccggtcttggggaaggatatcgatttaggtatatggacaaggtgtctgaaggtactaagtgagatggataagaagaaagggaccgatggcaccgaaccaggaccagctccatctcgtgccgtcgacagatttggttttataaagccagaacaaggcaattcacctgatggaattccaaaaggcaagtctatacatgagcgtgaaaggtatgacctgccatacaagatatgtattatcggaatgcagtgggctgtatgatatattagggtcgttgtatcttgtttctaccgatttgatatgttagtcgattccaataggtggttgttaagaccatcctagattccattttcttctttctagcagctcttactacatttctacgcataagattggatcttagctttgccagcacttactggtggaatggttctaatacattagactgcttcactgataaacacacctttttattactaccttactcatgcctccgacaccatattaccattctttcccccgtatcagactatttacttgtgtaaatcagttattgtcttacttcaccttcctatttctctaaataaactaccttacaagtgcttttattctatttcttttttatgttgctatagggaggaaagaaggataagaaaatggaggaagatgataggtgttggtggtaatgactggaagcattatgttagaaggaaccctcatgtggttaaaaggcgaataaggaaaggaattcctgattgtctcagaggacttgtttggcagttgatttcaggcagtcgggacctcttactaatgaacccaggggtttacgagacactggtgatatatgagacatcggcctctgaattggaaattattcgtgacatatcacgcacatttccatctcatatattctttcaacaaaggcatggtccaggccaaagatcattgtataacattttgaaagcatattctgtctatgacagggatgttggatatgtgcagggaatgggatttttagctgggctgctgcttctttatatgagtgaggaggatgcattctggttattagtcgcgttgctaaagggagctgtccatgcaccaatggaaggcttgtatcaggctggtttgccgcttgtgcagcaatatttgtctcagtttgagaaattagttattgagctcatgccaaaattgggacaacactttgttgaagaaatgataaacccaagcatgtatgcaagtcaatggtttatcacagttttctcatattccttcccatttcatctaactcttagagtttgggatgtgtttctttatgagggtattaaggttgtattccaagttggattggctctattgagactctgtcacgatgatttagtcaaattaccttttgagaaactgctctatgccttgagaaatttccctgaggaagcgacagatccagatgtattattgccgcttgccttttcatttaaggtatcgagtcgtctcgaggagcttcagaaggagtatcagaagcgacaggagggcaccagtgaaacttcaagcggcgagcggctacagcccctcgtatcgaagacgatgagcagggtcggtagccgtgttgtgtcgaacttaacgaccgctgacagaaaatgacagacacgttctcttgtttgtttgtaactcgcatgtacactgtacagaaagaacggccttataatccatccatctaacagtatttgttttgcgtttctgtcaccattgcatttgcttttataatcctggatcgcaggaacaaaaaaggaacgtatttgaattgac

SEQ ID NO: 11524 - DNA, 1517 bp, Zea Mays
cgggccacgtcacgtcacaagctcgcgaagcacggcacggccgcggacacgaccgggtcccttccgcgtccgggtcgcggtcgccgaagaaccctcgctcgagaccgaagaagacaaaatcgcatctcctcgcctcctcccctcctcccgagatccgggcaaagcgcgccgcgcgagaaccaggatatcgatttaggtatatggacaaggtgtctgaaggtactaagtgagatggataagaagaaagggaccgatggcaccgaaccaggaccagctccatctcgtgccgtcgacagatttggttttataaagccagaacaaggcaattcacctgatggaattccaaaagggaggaaagaaggataagaaaatggaggaagatgataggtgttggtggtaatgactggaagcattatgttagaaggaaccctcatgtggttaaaaggcgaataaggaaaggaattcctgattgtctcagaggacttgtttggcagttgatttcaggcagtcgggacctcttactaatgaacccaggggtttacgagacactggtgatatatgagacatcggcctctgaattggaaattattcgtgacatatcacgcacatttccatctcatatattctttcaacaaaggcatggtccaggccaaagatcattgtataacattttgaaagcatattctgtctatgacagggatgttggatatgtgcagggaatgggatttttagctgggctgctgcttctttatatgagtgaggaggatgcattctggttattagtcgcgttgctaaagggagctgtccatgcaccaatggaaggcttgtatcaggctggtttgccgcttgtgcagcaatatttgtctcagtttgagaaattagttattgagctcatgccaaaattgggacaacactttgttgaagaaatgataaacccaagcatgtatgcaagtcaatggtttatcacagttttctcatattccttcccatttcatctaactcttagagtttgggatgtgtttctttatgagggtattaaggttgtattccaagttggattggctctattgagactctgtcacgatgatttagtcaaattaccttttgagaaactgctctatgccttgagaaatttccctgaggaagcgacagatccagatgtattattgccgcttgccttttcatttaaggtatcgagtcgtctcgaggagcttcagaaggagtatcagaagcgacaggagggcaccagtgaaacttcaagcggcgagcggctacagcccctcgtatcgaagacgatgagcagggtcggtagccgtgttgtgtcgaacttaacgaccgctgacagaaaatgacagacacgttctcttgtttgtttgtaactcgcatgtacactgtacagaaagaacggccttataatccatccatctaacagtatttgttttgcgtttctgtcaccattgcatttgcttttataatcctggatcgcaggaacaaaaaaggaacgtatttgaattgac

SEQ ID NO: 11525 - DNA, 1987 bp, Zea Mays
ggatccccgtcccccgtaacgggccacgtcacgtcacaagctcgcgaagcacggcacggccgcggacacgaccgggtcccttccgcgtccgggtcgcggtcgccgaagaaccctcgctcgagaccgaagaagacaaaatcgcatctcctcgcctcctcccctcctcccgagatccgggcaaagcgcgccgcgcgagaaccaggatatcgatttaggtatatggacaaggtgtctgaaggtactaagtgagatggataagaagaaagggaccgatggcaccgaaccaggaccagctccatctcgtgccgtcgacagatttggttttataaagccagaacaaggcaattcacctgatggaattccaaaaggcaagtctatacatgagcgtgaaaggtatgacctgccatacaagatatgtattatcggaatgcagtgggctgtatgatatattagggtcgttgtatcttgtttctaccgatttgatatgttagtcgattccaataggtggttgttaagaccatcctagattccattttcttctttctagcagctcttactacatttctacgcataagattggatcttagctttgccagcacttactggtggaatggttctaatacattagactgcttcactgataaacacacctttttattactaccttactcatgcctccgacaccatattaccattctttcccccgtatcagactatttacttgtgtaaatcagttattgtcttacttcaccttcctatttctctaaataaactaccttacaagtgcttttattctatttcttttttatgttgctatagggaggaaagaaggataagaaaatggaggaagatgataggtgttggtggtaatgactggaagcattatgttagaaggaaccctcatgtggttaaaaggcgaataaggaaaggaattcctgattgtctcagaggacttgtttggcagttgatttcaggcagtcgggacctcttactaatgaacccaggggtttacgagacactggtgatatatgagacatcggcctctgaattggaaattattcgtgacatatcacgcacatttccatctcatatattctttcaacaaaggcatggtccaggccaaagatcattgtataacattttgaaagcatattctgtctatgacagggatgttggatatgtgcagggaatgggatttttagctgggctgctgcttctttatatgagtgaggaggatgcattctggttattagtcgcgttgctaaagggagctgtccatgcaccaatggaaggcttgtatcaggctggtttgccgcttgtgcagcaatatttgtctcagtttgagaaattagttattgagctcatgccaaaattgggacaacactttgttgaagaaatgataaacccaagcatgtatgcaagtcaatggtttatcacagttttctcatattccttcccatttcatctaactcttagagtttgggatgtgtttctttatgagggtattaaggttgtattccaagttggattggctctattgagactctgtcacgatgatttagtcaaattaccttttgagaaactgctctatgccttgagaaatttccctgaggaagcgacagatccagatgtattattgccgcttgccttttcatttaaggtatcgagtcgtctcgaggagcttcagaaggagtatcagaagcgacaggagggcaccagtgaaacttcaagcggcgagcggctacagcccctcgtatcgaagacgatgagcagggtcggtagccgtgttgtgtcgaacttaacgaccgctgacagaaaatgacagacacgttctcttgtttgtttgtaactcgcatgtacactgtacagaaagaacggccttataatccatccatctaacagtatttgttttgcgtttctgtcaccattgcatttgcttttataatcctggatcgcaggaacaaaaaaggaacgtatttgaattgac

SEQ ID NO: 11526 - DNA, 587 bp, Zea Mays
gagtttttgttgaggagaagtcattcacatatctgtatcaggaaggagatactgtgactcttatggagcctgaaacgtttgagcaacttgaagtttcgaaggaactgtttggcaaagctgctgcatacctaaaagatgaaatgaaagtgaatctacaatactttgatggccggccaatgtctgggacagttcctcaacgagtgacttgcactgttgttgaagcacaaccaaatacaaaagggctaactgctcaaccacagcaccaccttttattgaagcgggtgagaatattgtaatcagtacagccgatgattcttatatgacgagagcgtaaggggtatcgtggatgacgttttgttctaccaaatggggatcgattacaatgtggctaccagaataattttatttacactcagttgtggagttgccgtaaacagtgagccttggcggacaccaaccaagaacttttagttcttcgctaataacccacacattttgtactcacatgtcttttcgttttgttcctcacttcaaatatttatgcaacagaatccattcatggcaaaccgtggaatcttttttgggga

SEQ ID NO: 11527 - DNA, 2165 bp, Zea Mays
gaggagcaaccggctgcctgcctgtcagtcctgtctggtgtgtgcaccgcgcgtccgcgcgtccgcctggctgccttcgtctcgcccagaacgcgtaggcgcagcaacaaactaggaagcaacacccagctgcctcggcgcaacccgtcctcttctactccagaggcacctcggcatccgccgaccggtttccgagaggtttgctggagtgcaccagcggtggggcagcaaatctgtaactgacacacgatgaatcaggaggcgaaggactcgaggccctcaaggtctcccagcgagccaaacctcttcctgcaatggggcagccggaagaggctgcgatgcgtcaagacgcgtgacgatggctcgccatcgccgtcgccgtctgaaggtcttagacgcgccataccccgtgctactaggcccctccttggagctgacattgcggcattccggcgccctagcacctttaaccgcaggaaatcagattcactagtgaacgagtacaggcactcgatggcgctatcgctggagaaggacaagtattacacaacgaggggttcaccgttcgatggaaacgggttcgactttggtagcatagctgaggagaagggaaccaccgcgttgcctagattcttcgtagcattgtcgaacaaggagaaggaggaggacttcatggcaatgaagggctgcaagctgccacagaggccaaagaagcggcccaagctgatgcagaagtgcttgcttgtaatgctcactccactgattcagtctatggtgagcccaggagcttggttatcagatttgtcgcatgagagatatgaagttagagagaagaagagttctaaaaagagagctagaggcttgaaggctttgaccatggagagtgattcagagtagaggtcgaggcaaatgaatttttgggcttgacttcagctggtggcaaaaaactgtagtttaggtggcactgcctgctgcttatcagacaaacctcagcatctaatttggtgctatgagtgctctgatcaagatctattgatgtcaacagcaaagagcatgttagattcctgatctagtgggaaacctgcagctccatctgtgggcacctttgtgagaaacaatggaagctggatagtggatacagtatatggtttctcaaaattatatagggaggaatgttcagccgttcagaaacaatgaaagctggatgttggctgagaatcaatgaattatgatgtttaattgtcataaacttgtagctgtaagatctatggtgaatacagaacactcaatcaagactgatcaatggcgctccctcccaaatcctaatagcgctctatagccgccaaccgccaccggctccgctctcggccggcctccccagtccgcaccacctacccccacgctccagtcccgggcgctgctccgcctccgctcctctccctcctccctccccccgcgcggaaccggatccaagcgagtccggcctggaggagaatatttgtgtttatgcacaccccaacgttgactcctctaaaatgcccggcagagagaaaaactggtgatgtcagatgggcattttattaaggagccaacttagggtgtgcgtaaaccctaaatattctcttggtggtggtggaaaccctagctgtcgaatccgccgccggcgagacggctgccgcccaggcgcctcagcggaagaaagagacgctccatgagctgctctcgaggcacaagacaaaattgaagtgaagtataatttggaacgaatctactgtagcacgcgggcgagagaagaaggccatagctagagggggatcatagctgcactgctgctggtaggcttttagcctcgaagtatcagggtctcagtggatgccaaactgggaccaatcagaaccacactgctggactggtcgtcctacggctggtgaaatttcttgaaagacattttgctactattttggtgataggtatgttttgtttttgctgacgctgaaagatttgtattagtactgaataggttatgggcatgtttggttcagcttttttctgattcgcttttccgagaatctagctgtgagtagaatctggctgtgtagagaatctgagtatcattaggattacatgcggaggaagataaagttgtccatggggctcaggatcta

SEQ ID NO: 11528 - DNA, 2138 bp, Zea Mays
gaggagcaaccggctgcctgcctgtcagtcctgtctggtgtgtgcaccgcgcgtccgcgcgtccgcctggctgccttcgtctcgcccagaacgcgtaggcgcagcaacaaactaggaagcaacacccagctgcctcggcgcaacccgtcctcttctactccagaggcacctcggcatccgccgaccggtttccgagaggtttgctggagtgcaccagcggtggggcagcaaatctgtaactgacacacgatgaatcaggaggcgaaggactcgaggccctcaaggtctcccagcgagccaaacctcttcctgcaatggggcagccggaagaggctgcgatgcgtcaagacgcgtgacgatggctcgccatcgccgtcgccgtctgaaggtcttagacgcgccataccccgtgctactaggcccctccttggagctgacattgcggcattccggcgccctagcacctttaaccgcaggaaatcagattcactagtgaacgagtacaggcactcgatggcgctatcgctggagaaggacaagtattacacaacgaggggttcaccgttcgatggaaacgggttcgactttggtagcatagctgaggagaagggaaccaccgcgttgcctagattcttcgtagcattgtcgaacaaggagaaggaggaggacttcatggcaatgaagggctgcaagctgccacagaggccaaagaagcggcccaagctgatgcagaagtgcttgcttatggtgagcccaggagcttggttatcagatttgtcgcatgagagatatgaagttagagagaagaagagttctaaaaagagagctagaggcttgaaggctttgaccatggagagtgattcagagtagaggtcgaggcaaatgaatttttgggcttgacttcagctggtggcaaaaaactgtagtttaggtggcactgcctgctgcttatcagacaaacctcagcatctaatttggtgctatgagtgctctgatcaagatctattgatgtcaacagcaaagagcatgttagattcctgatctagtgggaaacctgcagctccatctgtgggcacctttgtgagaaacaatggaagctggatagtggatacagtatatggtttctcaaaattatatagggaggaatgttcagccgttcagaaacaatgaaagctggatgttggctgagaatcaatgaattatgatgtttaattgtcataaacttgtagctgtaagatctatggtgaatacagaacactcaatcaagactgatcaatggcgctccctcccaaatcctaatagcgctctatagccgccaaccgccaccggctccgctctcggccggcctccccagtccgcaccacctacccccacgctccagtcccgggcgctgctccgcctccgctcctctccctcctccctccccccgcgcggaaccggatccaagcgagtccggcctggaggagaatatttgtgtttatgcacaccccaacgttgactcctctaaaatgcccggcagagagaaaaactggtgatgtcagatgggcattttattaaggagccaacttagggtgtgcgtaaaccctaaatattctcttggtggtggtggaaaccctagctgtcgaatccgccgccggcgagacggctgccgcccaggcgcctcagcggaagaaagagacgctccatgagctgctctcgaggcacaagacaaaattgaagtgaagtataatttggaacgaatctactgtagcacgcgggcgagagaagaaggccatagctagagggggatcatagctgcactgctgctggtaggcttttagcctcgaagtatcagggtctcagtggatgccaaactgggaccaatcagaaccacactgctggactggtcgtcctacggctggtgaaatttcttgaaagacattttgctactattttggtgataggtatgttttgtttttgctgacgctgaaagatttgtattagtactgaataggttatgggcatgtttggttcagcttttttctgattcgcttttccgagaatctagctgtgagtagaatctggctgtgtagagaatctgagtatcattaggattacatgcggaggaagataaagttgtccatggggctcaggatcta

SEQ ID NO: 11529 - DNA, 2309 bp, Zea Mays
gaggagcaaccggctgcctgcctgtcagtcctgtctggtgtgtgcaccgcgcgtccgcgcgtccgcctggctgccttcgtctcgcccagaacgcgtaggcgcagcaacaaactaggaagcaacacccagctgcctcggcgcaacccgtcctcttctactccagaggcacctcggcatccgccgaccggtttccgagaggtttgctggagtgcaccagcggtggggcagcaaatctgtaactgtacgcaccacttctttcccgtccccattcttctgggatttgggagctctcttctccggtttggatttcggagtccgtctcgtcttggggttggactgagtgcgctcgtcctgtgaatctggatcctgggcaccagtcgcgttggtgtagctggagcctggagccggaaaggacacacgatgaatcaggaggcgaaggactcgaggccctcaaggtctcccagcgagccaaacctcttcctgcaatggggcagccggaagaggctgcgatgcgtcaagacgcgtgacgatggctcgccatcgccgtcgccgtctgaaggtcttagacgcgccataccccgtgctactaggcccctccttggagctgacattgcggcattccggcgccctagcacctttaaccgcaggaaatcagattcactagtgaacgagtacaggcactcgatggcgctatcgctggagaaggacaagtattacacaacgaggggttcaccgttcgatggaaacgggttcgactttggtagcatagctgaggagaagggaaccaccgcgttgcctagattcttcgtagcattgtcgaacaaggagaaggaggaggacttcatggcaatgaagggctgcaagctgccacagaggccaaagaagcggcccaagctgatgcagaagtgcttgcttatggtgagcccaggagcttggttatcagatttgtcgcatgagagatatgaagttagagagaagaagagttctaaaaagagagctagaggcttgaaggctttgaccatggagagtgattcagagtagaggtcgaggcaaatgaatttttgggcttgacttcagctggtggcaaaaaactgtagtttaggtggcactgcctgctgcttatcagacaaacctcagcatctaatttggtgctatgagtgctctgatcaagatctattgatgtcaacagcaaagagcatgttagattcctgatctagtgggaaacctgcagctccatctgtgggcacctttgtgagaaacaatggaagctggatagtggatacagtatatggtttctcaaaattatatagggaggaatgttcagccgttcagaaacaatgaaagctggatgttggctgagaatcaatgaattatgatgtttaattgtcataaacttgtagctgtaagatctatggtgaatacagaacactcaatcaagactgatcaatggcgctccctcccaaatcctaatagcgctctatagccgccaaccgccaccggctccgctctcggccggcctccccagtccgcaccacctacccccacgctccagtcccgggcgctgctccgcctccgctcctctccctcctccctccccccgcgcggaaccggatccaagcgagtccggcctggaggagaatatttgtgtttatgcacaccccaacgttgactcctctaaaatgcccggcagagagaaaaactggtgatgtcagatgggcattttattaaggagccaacttagggtgtgcgtaaaccctaaatattctcttggtggtggtggaaaccctagctgtcgaatccgccgccggcgagacggctgccgcccaggcgcctcagcggaagaaagagacgctccatgagctgctctcgaggcacaagacaaaattgaagtgaagtataatttggaacgaatctactgtagcacgcgggcgagagaagaaggccatagctagagggggatcatagctgcactgctgctggtaggcttttagcctcgaagtatcagggtctcagtggatgccaaactgggaccaatcagaaccacactgctggactggtcgtcctacggctggtgaaatttcttgaaagacattttgctactattttggtgataggtatgttttgtttttgctgacgctgaaagatttgtattagtactgaataggttatgggcatgtttggttcagcttttttctgattcgcttttccgagaatctagctgtgagtagaatctggctgtgtagagaatctgagtatcattaggattacatgcggaggaagataaagttgtccatggggctcaggatcta

SEQ ID NO: 11530 - DNA, 1592 bp, Zea Mays
atggaggcgagcgccgccaccgccatagcgacgacgacgacgacgacgttctggtggcctgccgcaccgacccccgcgccgttggcattgggcgcaggcgcggtcgtggcgtcgggcgtgctgctgccgcccgaggccgacgacgcgccggtcgtctcggtggtggggctgggggtcgccgccgccgagcctgctgctgagcgcgcggagggcgccggggaaggggcgtcagaggagcgcgtcttgaggacgcggacgttgagcttctggcccgcggcgcagtggccgggcacgccgcagatgaagaagcggtggccggggctcttgatgacgatcttgtcgtcgcccgagctgtgcgtggcgatcggcgtcgagttggtgcagctgtcgtagtcggccttcttcacctccagcacgttgtggatgcccggcgggtacgtgaactctgcacgcgcgggcggcgattccatcagctcagttcatgctcgctcgtcgtcacaacagacgacgtgctcttttttggtagcgcgtgatgatcttcgatgccacaatggccacgcaaagaacagaaacagaagaagcaaaagtgactggaatgaggggaaaaaaaacgcgcggccgggcatatcatgtaggcaaaggacgccggtgctcccatgtgcaaaatgtatccaacccatccgtccaatatccaacggtgtaccgggtattttttaatgaacaacactaacgtggagagcgtgggaggacttatttgcaaaaatgtcataacacattaacaccgttggatacagaacggatgagttagatgcattttgcgcatgggaacaccgacgtcctttgcctacaggatatgctctcaaaaaaaaacatgcttgcaccctactcatgattgaaattttgccaaagttcattcgctttacaactaatgtgttgacagtagtatactgatatacatgcatatggtggttgcatctagatgatagttcggcaattgatggtactatcctttctttagcatatcttcatgataaccatgcatatggtcctcggttacgctaatccatcgagtatagacaacctgattttaattagcaaatactgggaaaaaaggagtctcagattaagactggatctatggtatatatagtcatgcacaagatagcgagctgtgaagttcaggcagtgctctccgacagatctagcaggcaatgagcataaaggcagaattcccgttgccattgccatggctaaaggcttaaagcgagactcttcatctaaacgcgcgaagacaggtagcaggacatgttgtaaagtagtgacggtgaccaatgctacttctgctgcatcaacgaagaatttcagtaaacatgcatgaagcagattgcagattatatgaggaccgtgcagcgtgtatacgtacgtaaatgatcaactggagcaagactgacaaaaattaagaaaaggaagtgtagctatagcacaaatggatggctgctttgagcaagagagatctaattattaagatggaacttgcctatggtgtctccgacacggaagttcttcttggaagtccagtcggtgtagttgac

SEQ ID NO: 11531 - DNA, 5543 bp, Zea Mays
ttgctagctccattgccgccacttgtccatgctctgctgctcctccttgcctataaacagacgcccttggcctcatcctctctctctccccccacaatgtcgtcgcccctcccctgcctctccctcctccgcgcccggcaccgccatgaccaagcagcagctaggtctgcgtgcgtgtgcaaatggagagaagggatgcgttggagaagaagatggaaagagcatggtcgtgccgcccagtgcttgccggggcgcgctagcgacttgtgcccatggcctggccggcggccggtgtcctctgttgccaagcgttctctgttgccggagaagaaatgtgcgtgcgttctgaaggaagaagaagacccctttgggtctatgacgtgtgggcccaaggcagggaccgagagatgatgatcgagccagtgatgtggtgccaaccacaagatgcagttggtggacgacctgaagactgatggacttacccagttgatgctcgccaagcgagtacccccccagcaaacactacctaagtgttaaattaaaggcaagccccggttttatgcataaccgttattgtatgttattttactacacttaatgtttgtaggcttgtactgtgcacttaagtgtaggagttgactgaaaccctagttgcatgaactcaggttcccttttgagatggatactagtatgctaggtcgagtagctgctttactaattagggatcttggtagaagtcgagtgatttttctagcactcgcgcgaggtcatgaattggttgtatccactttgataacagaatggtgatggtctgtggacacgagtccatggggacgcgtggtctacgagatgaaaattggaataaggattaacgtgcggatacctgtgtcaagcgtttgaacgtactaaacacataccgagaaatatggtaaatcggtaagcctagtacctgagtgaacctgcccgcagacatatcccctcacgcgacctgagacgtggtctcccattccggttatggtgggtacaagtgcggtcactgcacgacggcagtcggggtcagtgaggcattgtacgccaaggcggtgagccctgatctgttgccagggaatcgacggggacggttgatgtgtgtggggacggagtgccttgccacgtcgtgtgtttaggtttaccttgcaaggataaaaactcgattcgaatcgtctgcttctcgcagctaatgagactgcttgatccattgtactgcattgagtaataagtggaaatgaggtgactggcaaaagatgttgattgataaaatgtttgataccatgtatgaatagctaggtacacatctagtataaaggattctactaaaacttgaaaagctaaaacttgattttagactcagctagtgcttttggcaaaccaaacccctcagccaaacagctgcatgtctagaggtagaggagtagactcctcacaccgggtaagtctagctgagtattagtatactcagccttgcttgtggcataatttttgcaggttcccttagggtgattggttgctggtgtgacttggcctccatccctgccaccgggatagacggtcgagtgggttattgcttccgcaggagaggaccaggaggagtagtgtggccagacttcgccatgttactcggttcttctccgttagttatttccgctgcattaaaatttatggttattatttttgaaactctgataatgtaatcactaatgatacttattaaatttgtggtattatgttttattgtatttctctgtgcctcaccttcgtgtgagctagtggtattcgatcctggtaagtggctttatcggactagatccgagggactgacagattattcctgtttaagtgtgttgctgcccttaagggtgcgacttgggcacttaagctggaataattcgggcggttccgccacagttttgcgccttatgcaattgggaacccaacatacaccaatgttgagggaccaaatatgcctatcgagggatgtaatatgcatgtagagggatcaaatatgggtattgaggggaaaatggtatgtgagacacaacaccactaccaagactgatcacgttatgccaggtgttactaatgatttctttgggcacaaagacgtgggtcaagacgacgtcgaagtttaggttggtaaaagaaaacaagtgaacttttttcgtagcaaaattgcattattattctgagtcatcaacattatttatgaaagtatggaggctttagaggagaccgcaacataacatttttacgaagagtctaagggttgtacccaaaaatcacaatattgtgatctgttatttagttgttgatactttaaggtcaattcagttagtctgatgttagcttcaacgagtgttattagttctagcaaaactccttctagaggagaacaaagtgtatgctaacatgtaatgtacaaagaagctagcgagttcgttgattatgggtatcgaaaagatccacgtgtgtaggaactattgtatcctatattgaggtgaggattatgaaggcttacagagatgtctaaattatagtgctaatagatacaagacgaacaaagattatctcgggaaagagaatggagcctctgatgaagacctccagttagtagtattataatgttctaaaaccagtagatttttttgtaaaaatcctagaaacttcgcccaagtgtatttgatgcccaggataatgaacaaagatcttttgccttttttcttgtcacatttttattagagttaaatgcattgtagcccatgtacttgtcaagagatgtcatttaggtatacgaactttggaaatacatttatgggtccttaaatttattaagtggcataccgcagtggtcggtatgatccaaagatgaacttatcatttaccatttttacaagttcttagcatgtttaagggatccagaaatgcattttcaaagtttgtggatctaagtgacatacttaacatttaactccttttattatatcaaaaaagtttaaatgcatcaatagcaaggaaatgcatgaactatgtttaggatcattttacatacatgatgactctcttgtacatgtgattttattttagaatgtgaacatcattactccgttagtattacctgttctctaagtatcatacagtgacgttcaggttggctatagcaaataaacatatactccctccgttcttttttatttgtctcattttagttcaaaaataaactagttggtgacaaatattcgaaaaccgaggtaatatgtgattggttagctgtaccgtctcgtcccgcgtcaccacgtgcgttgactttatctgagtttgtgtttggttgcctgcacgtgtgaagtgcaggctgtatagacagacataaaataagttatattggttgcatccacacgtacgcctaaaacagtcgtacgtggttggccaggctcacgcgagattatacgcgtgggtacggtcatccaatcaggcgtatatgtaccaagtaccggattgcatcatcatcgacacgtagatatatgttgctacggggcaattatatcggttccacggatgcctaactgaattttgttgtcactgccgtgggggctctcatgctccaatcttcatggagtccactccacagaatcagatggacatggatttgcttcccatgccaattgcaacgagaaaggaaacatgtttgagaattttcgtcatgaaaaacctgcaggtggactcgattcagcagttaatcagttcgggcacatttatctccttgcgatcatggctgaagaatctgagggccggatccatctatgtctgcacgtatgggtcatggcgtgtctgcaagcatgcacactctactgcacatatctgctgccaaccaaactctcccgcgttgttcttcttcacaagcaacgcatgcaactctcttcagcgcgcctatataaacggccgtgggcatgcagcttactcactcaccaccaggtcaccatccaatccagcaaccagcaccagcaccaacctgagcaagccttgcaaaaagagctgcactatatccatcgattctgttctgatcttgttcgctagcttgagtgttcagcccgggctgcaagcctgcaactaaccacctgcactgcagcgtgattagctctacaaatcgcatccagcgggaagctgatgaagcttgtgtacatggtgaccctcctaccgttgctcttcatgtccggcgttcttgaggctgcaggagcgggcaatgacagctcggctgacggcacgaacggcaacttgcacagctctggcaccagcagacccgccgccgcgcccaggggaaggtcgctgcaagcatcgcagagcagcgtgtacagcgtcgaccgctacggtgcccgtggcgacgggaggaacgatgacacgcgggcgctggaaatggcgtggaaggcggcgtgcgcctcgccacggccggccgtcgtgctcgtccctgacggcaggcgttacctgctgaagctcctcaccctccgcggcccgtgcaagtccagcgtcacgctcacggtgaagggcactctggttgcatcgccaaaccgggcggattggagcgacaatgacaggaggcactggatcgtgttccggagcatcgacaagctcaccgtcaacggcggtggcgccatcgatggcaacggcgagaaatggtggcctcactcgtgcaagatcaacaaggctctcccttgcaaggaggctccgacggctctgtcattccactactgcgtcgacctgaaagtggaggatctgaaaatcgtgaacagccaacagatacacatgtcagtcgaggattctgcaaatgcgctgctggcgcggttgtccatcacagcgcctggcaccagccctaacactgacggcatccacatcactcgcagcaaagatgtacgcgtcacagactgcaagatcaagacaggggacgactgcatgtcaatcgagaacgggactcacaacctccatgtctccaaagttaactgtggtccagggcatgggatcagcatcggaagcctaggagacgacaactcaagagcagaagtctccggcatcaccatagattcagtgcaactacacggcacaaccaacggagcacgcatcaagacgtaccagggaggcagcggatacgccaaggacatcacgttccaaaatatggttatgtacgacgtcaagaacccgataatcatcgaccagaactactgcgacaaggctaagccatgcggagaacaagagtcagcagtgcaggtcagcggtgtcgtcttcaagaacattagagggacgaccagtaccaaggacgccatcaagatgaactgcagtgagaacgtcccatgccaaggcattaccttgcagaacatcgacccgctggacgtcgttaaaggtgtcctcgtactatccgtcgaggttgcggacgatgccgaggcctgccttcttactcccgctgctgctccgccccagcctgagtgcccagaccgagcacgccgggcggcggcgagcattcc

SEQ ID NO: 11532 - DNA, 4273 bp, Zea Mays
ctgtcctgtggtccccgtccaccccaccgctaatcccattccccacctggcctcccccacgcgaaaactaacagccaaaaccaaggacagatcaactccaacctcgcaagcgaatccaaaattacccagcaaaatcccggggtttatcactcaatcaccgatcgctaaaccccggcaccacgcaagcaaggtggtaacacgccgatccaatccgcacggcattgcctcgtgtgcgcgtccccccaccccaccccaccccgtcgccgtctcgtcggtgccgcgtcccttttcccctcccccctccgtcgccgcctcgagcgagctccaccacttgctcctgcgcgaggtgaacactgggttagggccactgccaccgctgggctgcctctgcttctgcctctcccgccagcgcgcgagcccgggggcgattcggcgccggcacgcgggaggggaagccgaggaatgcggtgagtcggcgggggtccggcgtttgtgaactcgtggagggctcggattggtgcgccatggacggcggcgacgccacgaattcggggaagcatgtggccgggcaggtgtgccagatctgcggcgacggcgtgggcaccgcggcggacggcgacctcttcaccgcctgcgacgtctgcggcttccccgtgtgccgcccatgctacgagtacgagcgcaaggacggcacccaggcgtgcccgcagtgcaagactaagtacaagcgccacaaaggtatggccaaccgccgccatttccaccgatttccatgtactccaggttgagtgcagcaggctaggctgcaacagccactgaaatcaagcaggtagttgtgttttaatcgctaggaacaggtaatagttcagtgtttggcaaatttattcagattctcaccgtaagctagctctctcagtgaactgtactcgaattgtagtttcgagtcacattgccgccaagagccacaagagtggaattctttggcttcaaccgaggctgaatcttattctttactcaatcgtgttctgttgttcagggagcccaccagtacacggtgaggaaaatgaggatgtggatgctgacgatgtgagtgactacaactaccaagcatctggcaaccaggatcagaagcaaaagattgctgagagaatgctcacctggcggacaaactcacgtggcagtgatattggcctggctaagtatgacagcggtgaaattgggcatgggaagtatgacagtggtgagatccctcgtggatatatcccgtcactaactcatagccagatctcaggagagattcctggagcttcccctgatcatatgatgtctcctgttgggaacattggcaggcgtggacatcaatttccttatgtaaatcattctccaaacccatcgagggagttctccggtagccttggcaatgttgcatggaaagagagggtggatggatggaaaatgaaggataaaggtgcaattcctatgaccaatggaacaagcattgctccatcagaagggcgtggagttgctgatattgatgcttctactgattataacatggaagatgccttactgaatgatgaaactcggcaacctctatctagaaaagtgccaattccttcatccagaataaatccgtacagaatggtcattgtgctacgtttggctgttctatgcatattcttgcgctaccgtatcacacatcctgtgaacaatgcatatccactgtggcttttatccgtcatatgtgagatctggtttgctttgtcctggattttggatcagttcccaaagtggtccccaatcaaccgtgaaacataccttgatagactggctttaaggtatgaccgagaaggtgaaccatctcaattagctcctgttgatatctttgtcagtactgtggatcctatgaaggagcctcctcttgtcactgcaaatactgtgctttccatccttgctgtcgattatccggttgacaaggtatcttgctatgtttcggatgatggagctgctatgctgacttttgatgctctctctgaaacttcagagtttgctagaaaatgggttccgttctgtaagaagtacaacatagagcctagggctccggaatggtactttgctcagaaaattgattacttgaaagacaaagttcaaacttcatttgtgaaagaacgccgggccatgaagagagaatatgaagaattcaaagttcgtatcaatggtcttgtagccaatgcacaaaaagttcccgaggagggatggatcatgcaagatggtacaccttggcctgggaacaatactagggaccatcctggaatgattcaggttttcctgggtcacagtggagggcttgacgttgaaggcaatgaacttcctcgtttggtttatgtgtctcgtgaaaaacgtcctggattccaacatcacaagaaggctggtgccatgaatgcacttgttcgtgtatcagctgtccttactaatgggcaatacatgttgaatcttgactgtgaccactacatcaataatagcaaggctcttcgagaagctatgtgcttccttatggacccaaacctaggaaggaatgtctgttatgtccaatttcctcagaggtttgatggtattgataggaatgaccgatatgcaaacaggaacactgtgtttttcgatattaacttgagaggtcttgacggcattcaagggccagtttatgtgggaactggttgtgtgtttaacagaacggccttatatggttatgagcctccagtcaagaaaaaaaagccaggcttcttctcttcgctttgtgggggaaggaaaaagacgtcaaaatctaagaagagctcggaaaagaagaagtcacatagacacgcagacagttctgtaccagtatttaatctcgaagatatagaggaagggattgaaggttctcagtttgatgatgagaaatcgctgattatgtctcaaatgagcttggagaagagatttggccagtccagtgtttttgtagcctctactctgatggaatatggcggtgttccacaatctgcaactccagagtctcttctgaaagaagctattcatgtcatcagctgtggctatgaggacaaaactgactggggaactgagattgggtggatctatggttctgttacagaagacattctcaccggattcaagatgcatgctcgaggctggcgatcaatctactgcatgcctaagcgaccagctttcaagggatctgctcctatcaacctttcggatcgtttgaatcaagtgcttcggtgggctcttggttccattgaaattcttttcagcaggcattgtcccatatgcagtttgtcttctcactgggaagttcatcatcccaaagattagtaacctagagagtgtttggtttatatcgctctttatctcaatctttgccactggtatccttgagatgaggtggagtggtgttggcattgatgaatggtggaggaacgagcagttctgggtcattggtggtatttctgcgcatttatttgccgtcttccagggtctcctgaaggtgcttgctggtatcgacacgagcttcactgtcacctctaaggccactgacgaagaaggtgattttgccgagctctacatgttcaagtggacaacgcttctgatcccaccaaccactattttgatcatcaacctggtcggcgtggtcgctggcatttcctacgcaatcaatagcggttaccagtcatggggacctcttttcgggaagctcttctttgcgttctgggtgattgtccacctgtaccccttcctcaagggcctcatggggaagcagaaccgcacgccgaccattgtcgttgtctgggctatcctccttgcgtcgatcttttccctgatgtgggttcgtatcgatccattcaccacccgggtcactggtcctgatatcgcgaaatgtggcatcaactgctaggatgagctgaagataattaaagagtggaactagacgcattgtgcatcgtaagttatcagtgggtggctctttttatagtatggtaggaacttggtcgggagacgttaattacatatgctatatgtacctccgctggtctttatccgtaagttaatatatatactgctttgagaattatgtatgggcaacaggttgtttacttgattttgtgtgtacatatttaaatgtctctgccaatatcaaatgcattaaccatgaagtatcaattgtcgttgcgtttccaaaaaaaaaaaaccgaatgctacaccaaccaattaacaaacacaa

SEQ ID NO: 11533 - DNA, 1262 bp, Zea Mays
acaggtacgtgtcaaggtgtcagtgtcacccgcgcgcgccaatgcaaatggacgacgagcctcccatcacttcacttgacccggccagctcgggttgcccatcccatccgcctctccttgataaactccgtggtccgcagccaccgagccgagcccggcacagacgctactggcacgcacgcaccagcaccacaccacatgcatggtggagcctagcacgggcagctagctcccggccggcgacgtgacgaccaccaccaccacatgttgcatgagcagcaggcaccgccaccgccatccatcaaccccgacgacgacggcggccgcgatgtcgaggtcaccacgttccgcgacatccaccctctgacgcccgacgcgccgccgcccgcctccgcgtcctgggacacggccagccaccgctccttgtcgtcgtccgacgaccagcagtacatgacgatgagccgcgagttcacggccatggtcgccgccggggcgaccatgcagaccggcggctacgacggcgccgccgaccagctcaccagcatcggcgaggacgagctggaggagaccaacccgctggccatcgtccccgacagccaccccatcgccacgccagccaggtcaagaaggaggaggtggagaccaaggtcacggcctggcagacggccgaggtcgccaagatcaacaaccgcttcaagagggaggatgtggtcatcaacggctgggagaccgagcaggtggagaaggcctccgcgtggctcaagaagatcgagaggaagctggacgagcagcgcgccaaggtgctggagctcgccaacttcatgaaggccgtcggcagggtgcccaccaagcgctccttcttctagccagccgactacccccgtctctccctgcctgcgtgtgatcgatgtacgctcgctgctgcatccgagaacctaactgtaaagaaaaaaaaactgtaagctgtatacgtactgcgcctgctggttcccctgtgatgtctgtcagtgtcatccatcacagggtgccagttgttctcttctctttcttttcttttctcttctcttggcttgtatatcggatccatatatgctggtggtgcttgaacgaactgttgttgtttgcttaaccgtgcaaacatatacagtggtatatacactacattcagaacccaatactgcaactgttgttagagctgctacgtacttacttgtgcagagaacagagtatacgggcacgtcgtcacatcactgcgaataggg

SEQ ID NO: 11534 - DNA, 2020 bp, Zea Mays
ccgaggatctcgtcagtcgtcacgaaatctccatggctggagcacgcgagaggccaggatatctcgccggagtaacaagggtagaaacatctccggcgtgccacgtgtcagccctttccacggcactacaatacacttatacaccccaggtccccagccgcgcccgcgctatataaagctcccgccccccattcccttcccctcctcccccagccccaggtagtagcttagctagcgtgataatcaccgcgctaaactgatcatatatacacagcaattggcgtgtgacaggacagaggaggagggggcaggctggtaatatctagcaaaagtacaagcgttcctccagtggcgtccagcgctatatagttcgctgtccggcgtcctttccgaccgagcgcgagcgatgacggtgacgccgaggattacggtgtgggatgggcggctggtggcgcacgggcggagcgtcctcgccggcgtgccggacaacatcgtgctcacgcacgcctccggggcggggctggtcgacggcgccttcgtcggcgccacggccgccgagcccagcagcatgcacgtcttcaccttcggcaccctccgggacctgcggttcgtgtgctgcttccggttcaagctgtggtggatgacccagcgcatgggcacctccggccgcgacgtcccgctggagacgcagttcatgctcctggagtgcggcccgggcgacggccacggcgacggcgacgcggcggtgtacgtggcgatgctgccgctgctggagggccagttccgggcggcgctgcagggcaacgaccgcgacgagctggagatcaccctcgagagcggggacaaggcggtgcagactgcgcaggggacctgcatgctgtacgtgcacgccgggaccaaccctttcgacaccatcactcaggcggtcaaggtggtggagagacacatgcagacgttccatcacagggagaagaaaaagctgccgtcgttcgtggactggttcggctggtgcacgtgggacgccttctacaccgacgtcaccgccgagagcgtcaagcaaggcctcaagagcttggcggacggcggcacgccgccgcggttcctgatcatcgacgacgggtggcagcagatcggcagcgagaacaaggaggagtccgccaacgccgtcgtccaggaaggggcgcagttcgccagtaggctgacggggatcaaggagaacgccaagttccagaagaagacgaagacgaaggagagcggcggcggcggcggcgagcagcaggcgcaaacgccgggcctgaagctgctggtggaggaggcgaagcgcgagcacggcgtcaggtacgtgtacgtgtggcacgccatggcggggtactggggcggcgtgaagccggcggcggaggggatggagcactacgagagcgcgctggcgtacccggtgcagtcgccgggtgtgatgggcaaccagccggacatcgtcatggactcgctgtccgtgctgggcctggggctggtgcacccgcgcagggcgctgagcttctacgacgagctgcactcgtacctcgcctcctgcggcgtcgacggcgtcaaggtggacgtgcagaacatcatcgagacgctcggcgccgggcacggcggccgggtcgcgctcacccgcgcctaccaccgcgcgctcgaggactccgtggcgcgcaacttccccgacaacggctgcatctcctgcatgtgccacaacaccgacatgctctacagcgcgcgccagaccgccgtcgtgcgcgcctccgacgacttctacccgcgggacccggcgtcgcacaccgtccacgtctcctccgtcgcctacaacaccctcttcctcggcgagttcatgcagcccgactgggacatgttccatagcctgcacccggcggcggactaccacggcgcggcgagggcaatcggcggctgcccgatatacgtcagacctctctctcagtctttgatttcaggcatctagtatgctgaagacgttgcaagatggtag

SEQ ID NO: 11535 - DNA, 2530 bp, Zea Mays
ccgaggatctcgtcagtcgtcacgaaatctccatggctggagcacgcgagaggccaggatatctcgccggagtaacaagggtagaaacatctccggcgtgccacgtgtcagccctttccacggcactacaatacacttatacaccccaggtccccagccgcgcccgcgctatataaagctcccgccccccattcccttcccctcctcccccagccccaggtagtagcttagctagcgtgataatcaccgcgctaaactgatcatatatacacagcaattggcgtgtgacaggacagaggaggagggggcaggctggtaatatctagcaaaagtacaagcgttcctccagtggcgtccagcgctatatagttcgctgtccggcgtcctttccgaccgagcgcgagcgatgacggtgacgccgaggattacggtgtgggatgggcggctggtggcgcacgggcggagcgtcctcgccggcgtgccggacaacatcgtgctcacgcacgcctccggggcggggctggtcgacggcgccttcgtcggcgccacggccgccgagcccagcagcatgcacgtcttcaccttcggcaccctccgggacctgcggttcgtgtgctgcttccggttcaagctgtggtggatgacccagcgcatgggcacctccggccgcgacgtcccgctggagacgcagttcatgctcctggagtgcggcccgggcgacggccacggcgacggcgacgcggcggtgtacgtggcgatgctgccgctgctggagggccagttccgggcggcgctgcagggcaacgaccgcgacgagctggagatcaccctcgagagcggggacaaggcggtgcagactgcgcaggggacctgcatgctggtggtggagagacacatgcagacgttccatcacagggagaagaaaaagctgccgtcgttcgtggactggttcggctggtgcacgtgggacgccttctacaccgacgtcaccgccgagagcgtcaagcaaggcctcaagagcttggcggacggcggcacgccgccgcggttcctgatcatcgacgacgggtggcagcagatcggcagcgagaacaaggaggagtccgccaacgccgtcgtccaggaaggggcgcagttcgccagtaggctgacggggatcaaggagaacgccaagttccagaagaagacgaagacgaaggagagcggcggcggcggcggcgagcagcaggcgcaaacgccgggcctgaagctgctggtggaggaggcgaagcgcgagcacggcgtcaggtacgtgtacgtgtggcacgccatggcggggtactggggcggcgtgaagccggcggcggaggggatggagcactacgagagcgcgctggcgtacccggtgcagtcgccgggtgtgatgggcaatcggcggctgcccgatatacgtcagcgacaagccaggcaaccacaacttcgagctgctcaagaagctggtgctccccgacggctccgtgctccgcgcgcagctcccgggccgccccacccgcgactgcctcttcgccgacccggcgcgcgacggcacgagcctgctcaagatctggaacgtgaacaagtgcacgggcgtggtgggcgtgttcaactgccagggcgccgggtggtgccgcgtcaccaagaagacccgggtgcacgacgcggcgccggggacgctgacggggtcggtccgcgccgacgacgtggacgtgatcgccggcctcgccggggacggctggggcggcgaggccgtcgtgtacgcctacaggtcaggggagctagtcaggctgccccagggcgccacactgccggtgacgctcaaggtgctggagttcgaggtgttccacgtctcccccgtcagggcggtcgcgccgggcgtgtcgttcgcgcccatcggcctgctcgacatgttcaactccggcggggcggtggagcagtgcgaggtccgtggcggcgcgaacgcggccgccgccgtcgcgctcagggtccgcggctgcggccgcttcggcgcgtactgctcgcggcggcccgcgaggtgcatgctggacgcgacggaggtggagttcagccacgacgctgatacggggctcgtcacgctccacatccccgtgccggagcaggagttctacagatggagcctggagatcgaagtctagaggtgctcccggcctgtcggatctgtggcaattgcctcccattcttcagtggattcaccattacacgcgtgcctcagtgtgtggttggcgtgtgtgcgacgtagggaggcgtgtggaacgcatgaaacgggcacgtacgccattgacgcgcctctcttcgtccctagaagaataagctaagcctctgttctaccttgctgcatcgacctgcttgcaataaactgctactatactccatgtgtatgcaatgtgacacaaacaaaaacacatctccagttccatgatacactgtactgttgactaattagacaaattccaaattaaattccgaatataaatcatgaccaaatcaaaagaac

SEQ ID NO: 11536 - DNA, 3141 bp, Zea Mays
gccagcctgccgtacctactacccaggcacccagcagattttcgccgttcctgctagcatgtgtgtgtgtgtgttctccaaccatctccgaggatctcgtcagtcgtcacgaaatctccatggctggagcacgcgagaggccaggatatctcgccggagtaacaagggtagaaacatctccggcgtgccacgtgtcagccctttccacggcactacaatacacttatacaccccaggtccccagccgcgcccgcgctatataaagctcccgccccccattcccttcccctcctcccccagccccaggtagtagcttagctagcgtgataatcaccgcgctaaactgatcatatatacacagcaattggcgtgtgacaggacagaggaggagggggcaggctggtaatatctagcaaaagtacaagcgttcctccagtggcgtccagcgctatatagttcgctgtccggcgtcctttccgaccgagcgcgagcgatgacggtgacgccgaggattacggtgtgggatgggcggctggtggcgcacgggcggagcgtcctcgccggcgtgccggacaacatcgtgctcacgcacgcctccggggcggggctggtcgacggcgccttcgtcggcgccacggccgccgagcccagcagcatgcacgtcttcaccttcggcaccctccgggacctgcggttcgtgtgctgcttccggttcaagctgtggtggatgacccagcgcatgggcacctccggccgcgacgtcccgctggagacgcagttcatgctcctggagtgcggcccgggcgacggccacggcgacggcgacgcggcggtgtacgtggcgatgctgccgctgctggagggccagttccgggcggcgctgcagggcaacgaccgcgacgagctggagatcaccctcgagagcggggacaaggcggtgcagactgcgcaggggacctgcatgctgtacgtgcacgccgggaccaaccctttcgacaccatcactcaggcggtcaaggtggtggagagacacatgcagacgttccatcacagggagaagaaaaagctgccgtcgttcgtggactggttcggctggtgcacgtgggacgccttctacaccgacgtcaccgccgagagcgtcaagcaaggcctcaagagcttggcggacggcggcacgccgccgcggttcctgatcatcgacgacgggtggcagcagatcggcagcgagaacaaggaggagtccgccaacgccgtcgtccaggaaggggcgcagttcgccagtaggctgacggggatcaaggagaacgccaagttccagaagaagacgaagacgaaggagagcggcggcggcggcggcgagcagcaggcgcaaacgccgggcctgaagctgctggtggaggaggcgaagcgcgagcacggcgtcaggtacgtgtacgtgtggcacgccatggcggggtactggggcggcgtgaagccggcggcggaggggatggagcactacgagagcgcgctggcgtacccggtgcagtcgccgggtgtgatgggcaaccagccggacatcgtcatggactcgctgtccgtgctgggcctggggctggtgcacccgcgcagggcgctgagcttctacgacgagctgcactcgtacctcgcctcctgcggcgtcgacggcgtcaaggtggacgtgcagaacatcatcgagacgctcggcgccgggcacggcggccgggtcgcgctcacccgcgcctaccaccgcgcgctcgaggactccgtggcgcgcaacttccccgacaacggctgcatctcctgcatgtgccacaacaccgacatgctctacagcgcgcgccagaccgccgtcgtgcgcgcctccgacgacttctacccgcgggacccggcgtcgcacaccgtccacgtctcctccgtcgcctacaacaccctcttcctcggcgagttcatgcagcccgactgggacatgttccatagcctgcacccggcggcggactaccacggcgcggcgagggcaatcggcggctgcccgatatacgtcagcgacaagccaggcaaccacaacttcgagctgctcaagaagctggtgctccccgacggctccgtgctccgcgcgcagctcccgggccgccccacccgcgactgcctcttcgccgacccggcgcgcgacggcacgagcctgctcaagatctggaacgtgaacaagtgcacgggcgtggtgggcgtgttcaactgccagggcgccgggtggtgccgcgtcaccaagaagacccgggtgcacgacgcggcgccggggacgctgacggggtcggtccgcgccgacgacgtggacgtgatcgccggcctcgccggggacggctggggcggcgaggccgtcgtgtacgcctacaggtcaggggagctagtcaggctgccccagggcgccacactgccggtgacgctcaaggtgctggagttcgaggtgttccacgtctcccccgtcagggcggtcgcgccgggcgtgtcgttcgcgcccatcggcctgctcgacatgttcaactccggcggggcggtggagcagtgcgaggtccgtggcggcgcgaacgcggccgccgccgtcgcgctcagggtccgcggctgcggccgcttcggcgcgtactgctcgcggcggcccgcgaggtgcatgctggacgcgacggaggtggagttcagccacgacgctgatacggggctcgtcacgctccacatccccgtgccggagcaggagttctacagatggagcctggagatcgaagtctagaggtgctcccggcctgtcggatctgtggcaattgcctcccattcttcagtggattcaccattacacgcgtgcctcagtgtgtggttggcgtgtgtgcgacgtagggaggcgtgtggaacgcatgaaacgggcacgtacgccattgacgcgcctctcttcgtccctagaagaataagctaagcctctgttctaccttgctgcatcgacctgcttgcaataaactgctactatactccatgtgtatgcaatgtgacacaaacaaaaacacatctccagttccatgatacactgtactgttgactaattagacaaattccaaattaaattccgaatataaatcatgaccaaatcaaaagaac

SEQ ID NO: 11537 - DNA, 2153 bp, Zea Mays
atcaagccaaacaacccggatccccacgggccacgaccccaccaggccaccacgtatacttgcccacgttccccttcccctcgcatccgtttcgtccgtgcgccgccgccagcatcttctcagcccaggccccagacagagcaaaccccccctctaaaattcggttatatttgggctcccgcctccgccgtcgccctacagtcctacaccaggtgccgaggccttcgccggtcaagagcgcccagcagatccgccactgggtttttggatttggagacatggcggaagtggatgacaagctcaaggactacgagatcaggaaggagggagaggcagagatcctcttgcacaagaggaacgccgtcttttacaatcccgtgcaggttcacaacagagacatgtctattgctgttttaaggacctttattgccaagcgcaaggaagaacatgaagcgctggtggacaagaggaacacatcgcatggaaaagacaaactgagtgaaatatcctgtcaaaatggagaggatgcgtcaactggccagcaagatgaaatggaactaaataaagctgaagttcaaattgatgatctgtcaaaagaagcaacaaaacctccttggaaagtaaccagagaacttaagccaccacttgtcctcgaggctttggctgcaactgggttgcgatctctccggtatgcccgtgaagttgagggcttaggaaagatagttgctctggacaatgataaagcttccgtcgaagattgcaagcgaaacataaagtttaatggtgcttccactactagtaaggtggaaacttacttggttgatgctcgaattcacatgctgatgcatccaaaagaatttgatgtggtatggttcattcccaaccaagggcaagtattgtcatgaaatggctttgagaattctcctagccagtattgagagccatgcaaatcggtacaagcgatatattgtgcctgttctctctgtgttcatggatttttatatccgtgtttttgttcgagtattcacttctgcaagtgaaataaagaatacacctctaaaactttcttacatatatcagtgtgttggctgcgactcttttcatcttcaatgtcttgcgaggactgttccgaagaagaataatggtgtgaagcatgcacctgcttttggacctgttgttcctcaagagtgcagtgattgtggaaagaaatttaatgtaggtgggccaatatggtcagctcctattcatgatcaagactgggtagtttctactttgacaggtgttaagtcaatgaaggatagatatcctgcgtatgataaaattacttcagttctaactactgtgtcagaggagctagatgacattccactgtttttcagtctccataacatagcaggcactgtcaagtgcacgtctccgtctctggttatgttccggtccgcagttctaaatgcagggtatcggatctcaagcacccatgttaacccacttggggttaaatctgacgccccttgggatgttatttgggacatcatgcgctgctgggtgaagaaccatcctatcaaggaacaggcacgtgactcacctggcacggtgatcctttcaaaatcgccaaagctagaaacttttccagagcagttgctgccctcggcaaatctggggcaaagaagacgaaacgattccttccaaacccagagcggcactggggcccgaaggtcagagcaggccggaagatcacgagcaaacacgtctctctgttgggccctgatgccatcaacgctgccgtgaacggcggcggcggcggtgactgccacagagaagggagcggtgccgcgccagatagtagcaatacagccccagaacccgaggggctggaggacgaaccctcgaacaaacgccagaaagccagcggcgacggggaaccagaaggacagaaggccagcgacggggaaccggcaagcgaagcttgatctgtttggtagtcgttgttgtgcctgtcagcctgtgcttttgctcgttttgtggcccgatgggtgttacctgttttattttgatgcaacgaattttgcttggttttgacagcctgtgggttttagatataagaaaagcaggctccagacccaggcctcgtgcgtgtcgagcctggcaacgtt

SEQ ID NO: 11538 - DNA, 2451 bp, Zea Mays
gttggagtgctcttttttattttttgtttaaattaaggattgagattaggagtattgaaatatgatggagatgctctaagagaagaattatagtagtagtccaaaaaaatgaataatgataattgctctcataattacaaaaaatatacaaaaataacatcaagccaaacaacccggatccccacgggccacgaccccaccaggccaccacgtatacttgcccacgttccccttcccctcgcatccgtttcgtccgtgcgccgccgccagcatcttctcagcccaggccccagacagagcaaaccccccctctaaaattcggttatatttgggctcccgcctccgccgtcgccctacagtcctacaccaggtgccgaggccttcgccggtcaagagcgcccagcagatccgccactgggtttttggatttggagacatggcggaagtggatgacaagctcaaggactacgagatcaggaaggagggagaggcagagatcctcttgcacaagaggaacgccgtcttttacaatcccgtgcaggttcacaacagagacatgtctattgctgttttaaggacctttattgccaagcgcaaggaagaacatgaagcgctggtggacaagaggaacacatcgcatggaaaagacaaactgagtgaaatatcctgtcaaaatggagaggatgcgtcaactggccagcaagatgaaatggaactaaataaagctgaagttcaaattgatgatctgtcaaaagaagcaacaaaacctccttggaaagtaaccagagaacttaagccaccacttgtcctcgaggctttggctgcaactgggttgcgatctctccggtatgcccgtgaagttgagggcttaggaaagatagttgctctggacaatgataaagcttccgtcgaagattgcaagcgaaacataaagtttaatggtgcttccactactagtaaggtggaaacttacttggttgatgctcgaattcacatgctgatgcatccaaaagaatttgatgtggttgatcttgacccttatggatcaccatctatatttctagactcagctgtacaggctgttgctgatggcggtttattgatgtgcactgccactgatatggcagttctttgtggtgccaatggagaagtttgttactctaagtatggttcattcccaaccaagggcaagtattgtcatgaaatggctttgagaattctcctagccagtattgagagccatgcaaatcggtacaagcgatatattgtgcctgttctctctgtgttcatggatttttatatccgtgtttttgttcgagtattcacttctgcaagtgaaataaagaatacacctctaaaactttcttacatatatcagtgtgttggctgcgactcttttcatcttcaatgtcttgcgaggactgttccgaagaagaataatggtgtgaagcatgcacctgcttttggacctgttgttcctcaagagtgcagtgattgtggaaagaaatttaatgtaggtgggccaatatggtcagctcctattcatgatcaagactgggtagtttctactttgacaggtgttaagtcaatgaaggatagatatcctgcgtatgataaaattacttcagttctaactactgtgtcagaggagctagatgacattccactgtttttcagtctccataacatagcaggcactgtcaagtgcacgtctccgtctctggttatgttccggtccgcagttctaaatgcagggtatcggatctcaagcacccatgttaacccacttggggttaaatctgacgccccttgggatgttatttgggacatcatgcgctgctgggtgaagaaccatcctatcaaggaacaggcacgtgactcacctggcacggtgatcctttcaaaatcgccaaagctagaaacttttccagagcagttgctgccctcggcaaatctggggcaaagaagacgaaacgattccttccaaacccagagcggcactggggcccgaaggtcagagcaggccggaagatcacgagcaaacacgtctctctgttgggccctgatgccatcaacgctgccgtgaacggcggcggcggcggtgactgccacagagaagggagcggtgccgcgccagatagtagcaatacagccccagaacccgaggggctggaggacgaaccctcgaacaaacgccagaaagccagcggcgacggggaaccagaaggacagaaggccagcgacggggaaccggcaagcgaagcttgatctgtttggtagtcgttgttgtgcctgtcagcctgtgcttttgctcgttttgtggcccgatgggtgttacctgttttattttgatgcaacgaattttgcttggttttgacagcctgtgggttttagatataagaaaagcaggctccagacccaggcctcgtgcgtgtcgagcctggcaacgtt

SEQ ID NO: 11539 - DNA, 2910 bp, Zea Mays
gagactgatacacgctcagtcgcttacggctcacccaagaccaagaaccccgggcggacgaaaagatgggcgccgatgccgcacgcacgccggcgccgcacgcgctgctgctcccttacccagcgcagggccacgtgatcccgttcatggagctggccgaccgcctcctcgaccgcggcttcgccgtcaccttcgtcaacaccgagttcaaccaccgccgcgtcgtcgtggccgccggcggcggccgggcgcccgatggccggctgcggctcgtgggtgtcgctgacgggatgggcgacggcgaggaccgcgacaacttcgtccgcctcaacgcctgcatgaaggaggccatgccgctgcggctcgacgcgctcctcgacgccgacgacgagcgcctcggcagggtcacgtgcgtcgtggtcgacgtcggcatgtcgtgggcgctggacgcggtcaagcggcgtgggctcccggccgccgcactctggcccgcgtcggcggccgtgctcgccgtcctgttcggcgccaagaagctcatacgcgatggcgtcatcgatgacgacggagctccagtgaagcaggagaaccactcgttccggctggccgagtcgatgccccccatggacgccgtcttcctggcgtggaactacatgggcaaccgcgacgtcgagcgcatggtcttccactacctgaccaccaccgcgtgggccgccgtggctaaggcggacgtcgtcctctgcaacaccttcgaggacctcgagccggacatcttcggcgcccactccccggcggccgcctccatcctcccgatcggcccgctgcgcacctgccagcgccggacgagcgaggcgccggccgggcacttttggcgcgccgacgacgaggcctgcgcgtccttcctggacgcgcagccccgtgggtccgtgacgtacgtggcgttcgggagcctgacggtcatgagccccgcgcagctccaggagctcgcgctggccctgctggcctccgcccgccccttcctgtgggtgttccggccggggctggcggccgagctcccgcccgcgttcacggatctcctgccacgccatgcgaggggcaaggtggtggagtgggcgccgcaggagaaagtgctcgcgcaccctgctgtcggctgcttcctgacgcattgcgggtggaactcgacgctggagggcgtccgccatggcgtgcctttgctttgctggccctacttcaccgaccagttcacgaaccaggcatacatttgtgatatctggaaggtggggttaagggtggtgcccgacggcggtgatggcattgtcgccaaggaaaggatcatggagaggttgacgagcctaatgggtgacagtggtgtgaaggaaagggtgaaaagattgaaggaattggcagagaggagcatggggcctgagggcaaatctttgaagaacatcaacgccttcatggaatccatgacgaagcgatctccggtccttgcccctcgtcacctcgtggtgggtcattggatcactgcttcctgcaacctccaaccgggcgggcgcgggccactggaccagcgacacatccggggagaagaaagctcggaggatccgaacgacgctgacggcgaggccgtaaccgcagagcagcggttgttgggatctcctgctcctggtcctggatgctggcacttgaattccagcatgaggttacatttggtcagcaatggtatccttcctccacattccatctggaaggattcgtggatagcggcgagatccgtaatgaaagttcggacctttcaaatcattgtgttgcaaggcattgttggctctttaccatgggctgctgtagttttcttcaccatgtggtttgaactcattggtttcgacaacagcagctcagcggcgctgaatagctttttcgctattgggtgcgccagtggatcatttctgggtggtgtgatagcagatgtcttatctagatactatccagattctgctcgcgtcatgtgcgctcagttcagcgccttcatgggcatccctttttcatggatcctcctcacagtcattccccagtctgttgattactggtctgcctatgccgtcacactctttttaatgggaattaccataagctggtgcgctacttgtgcaaacaaccccatgttcgcagaggtagtccctcccaagcaccgcacaatgatctacgcctttgaccgcgcatttgagggttcatttggctcgcttgctgcacctgctgttggattagtgaccgaaaagatctatggctacaatgcaaaggccgtcgatctatcacatggatcagtggatggagcttatgcactctctagaggtctattgactatgatgattgtcccttttgctctgtgcctcatgttttacaccccactgtatacagtgttcaagcgtgaccgagaaaatgctagattggccagcatcaaggagcaggaacttacttgaaaagctttctaacaaggagtactgatgtagtttggattactatagtctacaacaccgccaacctggaggttttgattgaagtactttggttgatgtctaggatactcaggttttatgtttcttcagtcggatatcatttaagagtacacattttgtacacaagcgatagattgtttgatctcgtcgtatgtaactggttcagtatacattcggacctcaacctggagagtggagagaggatgttgcagctttccattgaactttcagcatatagatacagttctttctcgttttgttactatttacggtctgtaatcttgttttgaactgcctgaaccatcacgtcattccaatgatgatgacatttgcagaactcttgtaccagtttcagtttatatcattataagatcaacgcttttctgacagtgtgcatgtg

SEQ ID NO: 11540 - DNA, 3720 bp, Zea Mays
gagactgatacacgctcagtcgcttacggctcacccaagaccaagaaccccgggcggacgaaaagatgggcgccgatgccgcacgcacgccggcgccgcacgcgctgctgctcccttacccagcgcagggccacgtgatcccgttcatggagctggccgaccgcctcctcgaccgcggcttcgccgtcaccttcgtcaacaccgagttcaaccaccgccgcgtcgtcgtggccgccggcggcggccgggcgcccgatggccggctgcggctcgtgggtgtcgctgacgggatgggcgacggcgaggaccgcgacaacttcgtccgcctcaacgcctgcatgaaggaggccatgccgctgcggctcgacgcgctcctcgacgccgacgacgagcgcctcggcagggtcacgtgcgtcgtggtcgacgtcggcatgtcgtgggcgctggacgcggtcaagcggcgtgggctcccggccgccgcactctggcccgcgtcggcggccgtgctcgccgtcctgttcggcgccaagaagctcatacgcgatggcgtcatcgatgacgacgaatggtgcgcgtgcgtgcaggagctccagtgaagcaggagaaccactcgttccggctggccgagtcgatgccccccatggacgccgtcttcctggcgtggaactacatgggcaaccgcgacgtcgagcgcatggtcttccactacctgaccaccaccgcgtgggccgccgtggctaaggcggacgtcgtcctctgcaacaccttcgaggacctcgagccggacatcttcggcgcccactccccggcggccgcctccatcctcccgatcggcccgctgcgcacctgccagcgccggacgagcgaggcgccggccgggcacttttggcgcgccgacgacgaggcctgcgcgtccttcctggacgcgcagccccgtgggtccgtgacgtacgtggcgttcgggagcctgacggtcatgagccccgcgcagctccaggagctcgcgctggccctgctggcctccgcccgccccttcctgtgggtgttccggccggggctggcggccgagctcccgcccgcgttcacggatctcctgccacgccatgcgaggggcaaggtggtggagtgggcgccgcaggagaaagtgctcgcgcaccctgctgtcggctgcttcctgacgcattgcgggtggaactcgacgctggagggcgtccgccatggcgtgcctttgctttgctggccctacttcaccgaccagttcacgaaccaggcatacatttgtgatatctggaaggtggggttaagggtggtgcccgacggcggtgatggcattgtcgccaaggaaaggatcatggagaggttgacgagcctaatgggtgacagtggtgtgaaggaaagggtgaaaagattgaaggaattggcagagaggagcatggggcctgagggcaaatctttgaagaacatcaacgccttcatggaatccatgacgaagcgatctccggtccttgcccctcgtcacctcgtggtgggtcattggatcactgcttcctgcaacctccaaccgggcgggcgcgggccactggaccagcgacacatccggggagaagaaagctcggaggatccgaacgacgctgacggcgaggccgtaaccgcagagcagcggttgttgggatctcctgctcctggtcctggatgctggcacttgaattccagcatgaggtcaaagaagatatttggtttatcaatttcccttgtactcatcaacctagcttctatattggaacgagctgatgagaatctcctcccagctgtttacaaggaagtgttcttgctcttcactatgaccgccctgcagtgcttgcgatagggactgcgttctgggctttgtcaacgggggctgttggtgtcagccagtattttgggcaggttgcattctggagagctattaatggtgttgggcttgccattgtaataccagctcttcaatccttcattgctgatagttacaaagatggcacacgtggagcgggatttggtttgctatcacttattggttcagtaggtgggataggaggtagtgttttggcaaccatcgtggctggaggggattattatggttttccaggatggcggcttgcatttatatctgttgcatttgtgagcttcttaattggacttcttgtatacctttacactgttgatcctaggaaattatctccaagccattttggcggtggtgaggacaatgagaggtatggtcttttgattttttttttagggaaaagctcttatcttgcctattcatattttaaaagataaattacactgagttttatgtggaaggcgtagtagtattactgcatattcttcttatcagctataaaagtttcatctgagtgaaagatttatgaaagtatgttttttattcctagttgatctcgtggatgactaccaatggaattgtatatttgcatatcattgtaataatacaatcttaaataaatggcaggttacatttggtcagcaatggtatccttcctccacattccatctggaaggattcgtggatagcggcgagatccgtaatgaaagttcggacctttcaaatcattgtgttgcaaggcattgttggctctttaccatgggctgctgtagttttcttcaccatgtggtttgaactcattggtttcgacaacagcagctcagcggcgctgaatagctttttcgctattgggtgcgccagtggatcatttctgggtggtgtgatagcagatgtcttatctagatactatccagattctgctcgcgtcatgtgcgctcagttcagcgccttcatgggcatccctttttcatggatcctcctcacagtcattccccagtctgttgattactggtctgcctatgccgtcacactctttttaatgggaattaccataagctggtgcgctacttgtgcaaacaaccccatgttcgcagaggtagtccctcccaagcaccgcacaatgatctacgcctttgaccgcgcatttgagggttcatttggctcgcttgctgcacctgctgttggattagtgaccgaaaagatctatggctacaatgcaaaggccgtcgatctatcacatggatcagtggatggagcttatgcactctctagaggtctattgactatgatgattgtcccttttgctctgtgcctcatgttttacaccccactgtatacagtgttcaagcgtgaccgagaaaatgctagattggccagcatcaaggagcaggaacttacttgaaaagctttctaacaaggagtactgatgtagtttggattactatagtctacaacaccgccaacctggaggttttgattgaagtactttggttgatgtctaggatactcaggttttatgtttcttcagtcggatatcatttaagagtacacattttgtacacaagcgatagattgtttgatctcgtcgtatgtaactggttcagtatacattcggacctcaacctggagagtggagagaggatgttgcagctttccattgaactttcagcatatagatacagttctttctcgttttgttactatttacggtctgtaatcttgttttgaactgcctgaaccatcacgtcattccaatgatgatgacatttgcagaactcttgtaccagtttcagtttatatcattataagatcaacgcttttctgacagtgtgcatgtg

SEQ ID NO: 11541 - DNA, 3051 bp, Zea Mays
gagactgatacacgctcagtcgcttacggctcacccaagaccaagaaccccgggcggacgaaaagatgggcgccgatgccgcacgcacgccggcgccgcacgcgctgctgctcccttacccagcgcagggccacgtgatcccgttcatggagctggccgaccgcctcctcgaccgcggcttcgccgtcaccttcgtcaacaccgagttcaaccaccgccgcgtcgtcgtggccgccggcggcggccgggcgcccgatggccggctgcggctcgtgggtgtcgctgacgggatgggcgacggcgaggaccgcgacaacttcgtccgcctcaacgcctgcatgaaggaggccatgccgctgcggctcgacgcgctcctcgacgccgacgacgagcgcctcggcagggtcacgtgcgtcgtggtcgacgtcggcatgtcgtgggcgctggacgcggtcaagcggcgtgggctcccggccgccgcactctggcccgcgtcggcggccgtgctcgccgtcctgttcggcgccaagaagctcatacgcgatggcgtcatcgatgacgacggagctccagtgaagcaggagaaccactcgttccggctggccgagtcgatgccccccatggacgccgtcttcctggcgtggaactacatgggcaaccgcgacgtcgagcgcatggtcttccactacctgaccaccaccgcgtgggccgccgtggctaaggcggacgtcgtcctctgcaacaccttcgaggacctcgagccggacatcttcggcgcccactccccggcggccgcctccatcctcccgatcggcccgctgcgcacctgccagcgccggacgagcgaggcgccggccgggcacttttggcgcgccgacgacgaggcctgcgcgtccttcctggacgcgcagccccgtgggtccgtgacgtacgtggcgttcgggagcctgacggtcatgagccccgcgcagctccaggagctcgcgctggccctgctggcctccgcccgccccttcctgtgggtgttccggccggggctggcggccgagctcccgcccgcgttcacggatctcctgccacgccatgcgaggggcaaggtggtggagtgggcgccgcaggagaaagtgctcgcgcaccctgctgtcggctgcttcctgacgcattgcgggtggaactcgacgctggagggcgtccgccatggcgtgcctttgctttgctggccctacttcaccgaccagttcacgaaccaggcatacatttgtgatatctggaaggtggggttaagggtggtgcccgacggcggtgatggcattgtcgccaaggaaaggatcatggagaggttgacgagcctaatgggtgacagtggtgtgaaggaaagggtgaaaagattgaaggaattggcagagaggagcatggggcctgagggcaaatctttgaagaacatcaacgccttcatggaatccatgacgaagcgatctccggtccttgcccctcgtcacctcgtggtgggtcattggatcactgcttcctgcaacctccaaccgggcgggcgcgggccactggaccagcgacacatccggggagaagaaagctcggaggatccgaacgacgctgacggcgaggccgtaaccgcagagcagcggttgttgggatctcctgctcctggtcctggatgctggcacttgaattccagcatgaggtcaaagaagatatttggtttatcaatttcccttgtactcatcaacctagcttctatattggaacgagctgatgagaatctcctcccagctgtttacaaggaagtcagtgctgctttcgatgccggtcctactgatctggggttacatttggtcagcaatggtatccttcctccacattccatctggaaggattcgtggatagcggcgagatccgtaatgaaagttcggacctttcaaatcattgtgttgcaaggcattgttggctctttaccatgggctgctgtagttttcttcaccatgtggtttgaactcattggtttcgacaacagcagctcagcggcgctgaatagctttttcgctattgggtgcgccagtggatcatttctgggtggtgtgatagcagatgtcttatctagatactatccagattctgctcgcgtcatgtgcgctcagttcagcgccttcatgggcatccctttttcatggatcctcctcacagtcattccccagtctgttgattactggtctgcctatgccgtcacactctttttaatgggaattaccataagctggtgcgctacttgtgcaaacaaccccatgttcgcagaggtagtccctcccaagcaccgcacaatgatctacgcctttgaccgcgcatttgagggttcatttggctcgcttgctgcacctgctgttggattagtgaccgaaaagatctatggctacaatgcaaaggccgtcgatctatcacatggatcagtggatggagcttatgcactctctagaggtctattgactatgatgattgtcccttttgctctgtgcctcatgttttacaccccactgtatacagtgttcaagcgtgaccgagaaaatgctagattggccagcatcaaggagcaggaacttacttgaaaagctttctaacaaggagtactgatgtagtttggattactatagtctacaacaccgccaacctggaggttttgattgaagtactttggttgatgtctaggatactcaggttttatgtttcttcagtcggatatcatttaagagtacacattttgtacacaagcgatagattgtttgatctcgtcgtatgtaactggttcagtatacattcggacctcaacctggagagtggagagaggatgttgcagctttccattgaactttcagcatatagatacagttctttctcgttttgttactatttacggtctgtaatcttgttttgaactgcctgaaccatcacgtcattccaatgatgatgacatttgcagaactcttgtaccagtttcagtttatatcattataagatcaacgcttttctgacagtgtgcatgtg

SEQ ID NO: 11542 - DNA, 3722 bp, Zea Mays
atattacgcagcttcccagatagagactgatacacgctcagtcgcttacggctcacccaagaccaagaaccccgggcggacgaaaagatgggcgccgatgccgcacgcacgccggcgccgcacgcgctgctgctcccttacccagcgcagggccacgtgatcccgttcatggagctggccgaccgcctcctcgaccgcggcttcgccgtcaccttcgtcaacaccgagttcaaccaccgccgcgtcgtcgtggccgccggcggcggccgggcgcccgatggccggctgcggctcgtgggtgtcgctgacgggatgggcgacggcgaggaccgcgacaacttcgtccgcctcaacgcctgcatgaaggaggccatgccgctgcggctcgacgcgctcctcgacgccgacgacgagcgcctcggcagggtcacgtgcgtcgtggtcgacgtcggcatgtcgtgggcgctggacgcggtcaagcggcgtgggctcccggccgccgcactctggcccgcgtcggcggccgtgctcgccgtcctgttcggcgccaagaagctcatacgcgatggcgtcatcgatgacgacggagctccagtgaagcaggagaaccactcgttccggctggccgagtcgatgccccccatggacgccgtcttcctggcgtggaactacatgggcaaccgcgacgtcgagcgcatggtcttccactacctgaccaccaccgcgtgggccgccgtggctaaggcggacgtcgtcctctgcaacaccttcgaggacctcgagccggacatcttcggcgcccactccccggcggccgcctccatcctcccgatcggcccgctgcgcacctgccagcgccggacgagcgaggcgccggccgggcacttttggcgcgccgacgacgaggcctgcgcgtccttcctggacgcgcagccccgtgggtccgtgacgtacgtggcgttcgggagcctgacggtcatgagccccgcgcagctccaggagctcgcgctggccctgctggcctccgcccgccccttcctgtgggtgttccggccggggctggcggccgagctcccgcccgcgttcacggatctcctgccacgccatgcgaggggcaaggtggtggagtgggcgccgcaggagaaagtgctcgcgcaccctgctgtcggctgcttcctgacgcattgcgggtggaactcgacgctggagggcgtccgccatggcgtgcctttgctttgctggccctacttcaccgaccagttcacgaaccaggcatacatttgtgatatctggaaggtggggttaagggtggtgcccgacggcggtgatggcattgtcgccaaggaaaggatcatggagaggttgacgagcctaatgggtgacagtggtgtgaaggaaagggtgaaaagattgaaggaattggcagagaggagcatggggcctgagggcaaatctttgaagaacatcaacgccttcatggaatccatgacgaagcgatctccggtccttgcccctcgtcacctcgtggtgggtcattggatcactgcttcctgcaacctccaaccgggcgggcgcgggccactggaccagcgacacatccggggagaagaaagctcggaggatccgaacgacgctgacggcgaggccgtaaccgcagagcagcggttgttgggatctcctgctcctggtcctggatgctggcacttgaattccagcatgaggtcaaagaagatatttggtttatcaatttcccttgtactcatcaacctagcttctatattggaacgagctgatgagaatctcctcccagctgtttacaaggaagtgttcttgctcttcactatgaccgccctgcagtgcttgcgatagggactgcgttctgggctttgtcaacgggggctgttggtgtcagccagtattttgggcaggttgcattctggagagctattaatggtgttgggcttgccattgtaataccagctcttcaatccttcattgctgatagttacaaagatggcacacgtggagcgggatttggtttgctatcacttattggttcagtaggtgggataggaggtagtgttttggcaaccatcgtggctggaggggattattatggttttccaggatggcggcttgcatttatatctgttgcatttgtgagcttcttaattggacttcttgtatacctttacactgttgatcctaggaaattatctccaagccattttggcggtggtgaggacaatgagaggtatggtcttttgattttttttttagggaaaagctcttatcttgcctattcatattttaaaagataaattacactgagttttatgtggaaggcgtagtagtattactgcatattcttcttatcagctataaaagtttcatctgagtgaaagatttatgaaagtatgttttttattcctagttgatctcgtggatgactaccaatggaattgtatatttgcatatcattgtaataatacaatcttaaataaatggcaggttacatttggtcagcaatggtatccttcctccacattccatctggaaggattcgtggatagcggcgagatccgtaatgaaagttcggacctttcaaatcattgtgttgcaaggcattgttggctctttaccatgggctgctgtagttttcttcaccatgtggtttgaactcattggtttcgacaacagcagctcagcggcgctgaatagctttttcgctattgggtgcgccagtggatcatttctgggtggtgtgatagcagatgtcttatctagatactatccagattctgctcgcgtcatgtgcgctcagttcagcgccttcatgggcatccctttttcatggatcctcctcacagtcattccccagtctgttgattactggtctgcctatgccgtcacactctttttaatgggaattaccataagctggtgcgctacttgtgcaaacaaccccatgttcgcagaggtagtccctcccaagcaccgcacaatgatctacgcctttgaccgcgcatttgagggttcatttggctcgcttgctgcacctgctgttggattagtgaccgaaaagatctatggctacaatgcaaaggccgtcgatctatcacatggatcagtggatggagcttatgcactctctagaggtctattgactatgatgattgtcccttttgctctgtgcctcatgttttacaccccactgtatacagtgttcaagcgtgaccgagaaaatgctagattggccagcatcaaggagcaggaacttacttgaaaagctttctaacaaggagtactgatgtagtttggattactatagtctacaacaccgccaacctggaggttttgattgaagtactttggttgatgtctaggatactcaggttttatgtttcttcagtcggatatcatttaagagtacacattttgtacacaagcgatagattgtttgatctcgtcgtatgtaactggttcagtatacattcggacctcaacctggagagtggagagaggatgttgcagctttccattgaactttcagcatatagatacagttctttctcgttttgttactatttacggtctgtaatcttgttttgaactgcctgaaccatcacgtcattccaatgatgatgacatttgcagaactcttgtaccagtttcagtttatatcattataagatcaacgcttttctgacagtgtgcatgtg

SEQ ID NO: 11543 - DNA, 3511 bp, Zea Mays
cggacgcctctgcagcccacaccgctatattacgcagcttcccagatagagactgatacacgctcagtcgcttacggctcacccaagaccaagaaccccgggcggacgaaaagatgggcgccgatgccgcacgcacgccggcgccgcacgcgctgctgctcccttacccagcgcagggccacgtgatcccgttcatggagctggccgaccgcctcctcgaccgcggcttcgccgtcaccttcgtcaacaccgagttcaaccaccgccgcgtcgtcgtggccgccggcggcggccgggcgcccgatggccggctgcggctcgtgggtgtcgctgacgggatgggcgacggcgaggaccgcgacaacttcgtccgcctcaacgcctgcatgaaggaggccatgccgctgcggctcgacgcgctcctcgacgccgacgacgagcgcctcggcagggtcacgtgcgtcgtggtcgacgtcggcatgtcgtgggcgctggacgcggtcaagcggcgtgggctcccggccgccgcactctggcccgcgtcggcggccgtgctcgccgtcctgttcggcgccaagaagctcatacgcgatggcgtcatcgatgacgacgaatggtgcgcgtgcgtgcaggagctccagtgaagcaggagaaccactcgttccggctggccgagtcgatgccccccatggacgccgtcttcctggcgtggaactacatgggcaaccgcgacgtcgagcgcatggtcttccactacctgaccaccaccgcgtgggccgccgtggctaaggcggacgtcgtcctctgcaacaccttcgaggacctcgagccggacatcttcggcgcccactccccggcggccgcctccatcctcccgatcggcccgctgcgcacctgccagcgccggacgagcgaggcgccggccgggcacttttggcgcgccgacgacgaggcctgcgcgtccttcctggacgcgcagccccgtgggtccgtgacgtacgtggcgttcgggagcctgacggtcatgagccccgcgcagctccaggagctcgcgctggccctgctggcctccgcccgccccttcctgtgggtgttccggccggggctggcggccgagctcccgcccgcgttcacggatctcctgccacgccatgcgaggggcaaggtggtggagtgggcgccgcaggagaaagtgctcgcgcaccctgctgtcggctgcttcctgacgcattgcgggtggaactcgacgctggagggcgtccgccatggcgtgcctttgctttgctggccctacttcaccgaccagttcacgaaccaggcatacatttgtgatatctggaaggtggggttaagggtggtgcccgacggcggtgatggcattgtcgccaaggaaaggatcatggagaggttgacgagcctaatgggtgacagtggtgtgaaggaaagggtgaaaagattgaaggaattggcagagaggagcatggggcctgagggcaaatctttgaagaacatcaacgccttcatggaatccatgacgaagcgatctccggtccttgcccctcgtcacctcgtggtgggtcattggatcactgcttcctgcaacctccaaccgggcgggcgcgggccactggaccagcgacacatccggggagaagaaagctcggaggatccgaacgacgctgacggcgaggccgtaaccgcagagcagcggttgttgggatctcctgctcctggtcctggatgctggcacttgaattccagcatgaggtcaaagaagatatttggtttatcaatttcccttgtactcatcaacctagcttctatattggaacgagctgatgagaatctcctcccagctgtttacaaggaagtgttcttgctcttcactatgaccgccctgcagtgcttgcgatagggactgcgttctgggctttgtcaacgggggctgttggtgtcagccagtattttgggcaggttgcattctggagagctattaatggtgttgggcttgccattgtaataccagctcttcaatccttcattgctgatagttacaaagatggcacacgtggagcgggatttggtttgctatcacttattggttcagtaggtgggataggaggtagtgttttggcaaccatcgtggctggaggggattattatggttttccaggatggcggcttgcatttatatctgttgcatttgtgagcttcttaattggacttcttgtatacctttacactgttgatcctaggaaattatctccaagccattttggcggtggtgaggacaatgagaggttacatttggtcagcaatggtatccttcctccacattccatctggaaggattcgtggatagcggcgagatccgtaatgaaagttcggacctttcaaatcattgtgttgcaaggcattgttggctctttaccatgggctgctgtagttttcttcaccatgtggtttgaactcattggtttcgacaacagcagctcagcggcgctgaatagctttttcgctattgggtgcgccagtggatcatttctgggtggtgtgatagcagatgtcttatctagatactatccagattctgctcgcgtcatgtgcgctcagttcagcgccttcatgggcatccctttttcatggatcctcctcacagtcattccccagtctgttgattactggtctgcctatgccgtcacactctttttaatgggaattaccataagctggtgcgctacttgtgcaaacaaccccatgttcgcagaggtagtccctcccaagcaccgcacaatgatctacgcctttgaccgcgcatttgagggttcatttggctcgcttgctgcacctgctgttggattagtgaccgaaaagatctatggctacaatgcaaaggccgtcgatctatcacatggatcagtggatggagcttatgcactctctagaggtctattgactatgatgattgtcccttttgctctgtgcctcatgttttacaccccactgtatacagtgttcaagcgtgaccgagaaaatgctagattggccagcatcaaggagcaggaacttacttgaaaagctttctaacaaggagtactgatgtagtttggattactatagtctacaacaccgccaacctggaggttttgattgaagtactttggttgatgtctaggatactcaggttttatgtttcttcagtcggatatcatttaagagtacacattttgtacacaagcgatagattgtttgatctcgtcgtatgtaactggttcagtatacattcggacctcaacctggagagtggagagaggatgttgcagctttccattgaactttcagcatatagatacagttctttctcgttttgttactatttacggtctgtaatcttgttttgaactgcctgaaccatcacgtcattccaatgatgatgacatttgcagaactcttgtaccagtttcagtttatatcattataagatcaacgcttttctgacagtgtgcatgtg

SEQ ID NO: 11544 - DNA, 2064 bp, Zea Mays
atttctgtagccaaatcgatggtgctggcggttcaggtgatgagatcttggggagcgcgactcgctcggtcctgagatgctggcgggctacggcggcggtggccgcagcgtccatctctcctcccacaaggacctcctcctcggccgctgcggccggagcttcctcttcggcaacacgtggtttctcctctccacttacccggcgcgcctcctgcacaccacggaccgtcgcgctccctccgctttcgtcgccgccatcaaccgggtcccctgcgtgcggtcgcactgcacggggcagggcctgctgcagagaggcagcattgtcatggctgcctgcggctatgttcttaggcgagctgagctgggtgctgccaagcgccagcagccggataaggacccatctggcggaacacgcgcctcccgtattgcagccatggggtcactgggcagtgctgcgcggccagaggtgtctttcaggtacagggggctggagcattgtaagaagattggtgcaagcttgaaatgccgtgagccatgggggaatagtgcgttctggacaaatgccactgggccgggttggaagttgagctttacagttgagccatggactaaggactttagtacggcgtgtgcagcgccgtattctgctggagccacagaggatcaattgccgctcaatgagaagatgaatagctccactgttggaatgtccccagtttctgaaaaattgaagttgctctctggttcatgttacttgcctcaccctgctaaggaggcaactggtggtgaggatgcacatttcattagcattgatgagcatgtgataggcgtagcagatggtgttggtggttgggcagatctcggtgtcgatgctggactatatgctaaggagctaatgagaaattcaatgagcgctatcaaagatgagccagaagggaccattgatccaaccagagttttggaaaaggcttatattagtacgaaagcaagggggtcatctaccgcgtgtatcatcactcttaaagatcagggtatccatgctgtaaatcttggggatagtggtttcgtagtagtccgagatggccgcactgttctcaggtcaccctcacagcagcatgatttcaattttacttatcagcttgagagtggaggtggcagtgatcttcctagttccgcacaagtatttcactttccggttgccccgggtgatgttatcgttgctggcacggatggactatttgacaatttatacaacaatgagataagtggtgttattgttgaagctctccgggttggacttgagcctcagattgcagcacaaaaaattgccgccctggctcgacaaagagctacggacaaaaataggcagtcaccttttgcatcagctgctcaagaagctgggtaccggtattatggtgggaagcttgatgacataacagtcgtggtctcatatgtgaaaagcgctggagccccatgatctgagcctttcttttattagatgtaatgtacataaatcattgtcccgaactggcggcgtatgtatgcaccagggcatagaagcttattctcaaggtgtggaatcccctgatcctagaagcacctgtgctgggttcagtatggttgcgctttagccctggaacatgttagcaaaccattgcaccattttacttgtttgccactgtgagaaatcgttttctctaattatctgaactcttgaagccagggtgggtttgtttccccccttggagttggaggataatgaccagctggaaccaaattttgttgtaaacagcgttgattgccgaatgatagttatagacatcttggactaaatggtgaaccagcgatgctgtttgaaatgcctttttggtctcggggtctttttgtttcactgctggcttaaaaattgttgagttgtgtgctgtaaaaaaatgttgtgagttttgtgatgtgaaaatatgtcatcctagagatttatatttgtatgtgtttttgtaaggatgcacgtgcccctcctgagctaccattatctaattatgattgtggtattcaatcgagacatct

SEQ ID NO: 11545 - DNA, 952 bp, Zea Mays
gaggagcatttggctcgtcagcgcatttcaaagcgagaagttgataataatacattgatatccccattagaagatgacaactcaagggaggtatttagtctaataaagaagctcaatattgctcctaaacctaagatgagaggaaagcaatcaacatcaaatcatgaaatgcttatggctggaaggaacaccattgcttcaaagtcatcgtttcttggacgaacagccagtggttcactggcatcttctcacagatcagtctatagatcctatgtatttggtcgtgatgacagcaatagcagcagtaggagctgcatttctacttcagagagtaatttagatctggatcagaccaattcctctcaacccaagaaggccaagttcagttcacagccgaaaccagaggggacaagggcaactccagagtgtaacacgagttcaggtgtttccctcttcgacgtcctgcgcaggacttcagagcagagcagtcaggaaagctgtagcacaatcacagaaagtcaagctgtgcaccagttctcggcattcaagttatcaaggaggttttccaaggtgggttcaaaaaattgacaaactctagatggctgttagtatcgagagggttactgttggagcttatggggcaacgcgttgagttagtttcgagcttcaaaccgccaaaatgttccggattgcaccatgagcgccaggtgttttatgcacgaactgagaatgctgagacctggccctgttgtagattatgaaacccagaatcttgttgtgtgtactcgtatgctcttgagaacgcacgctgagtttcctgagatgtttaaagtggagtgtaatgtttgcttattctctctgcattgtctcatgagataggtagatgttgtaaggcttttaccaaaaccaaatgttcgaaatattagatgtaaccatacattctgttcatgga

SEQ ID NO: 11546 - DNA, 2516 bp, Zea Mays
ctcgccgctccccgacctcgactcgccgaaatcccgggaggagaggacgcgggcggcgctatggacacggagccgttcgacgaggcggagctcctggcgctcccaccgtcccccgtcgcgtccccgcctcgtcgcctcaagcgtctcaagaaatcctcctcccaagccaccgccaccaccgccactaccaccagccctcatgtcggctccccgcctccgcctttgtcgcctccgcctccgccgctgctggcggaggcgacgccgggcgaggaaaccctggcgttcccttcccgcgacacctccccacacccgccgacgccgccagatgcggatgccccgactccgctaccgcatccctctcccgcccccgtgtcgccgccgctgcagccgaccgtcacccccgacaacgacagcgacgaggaggacgacgggctcgacccgctgttctccggggccgccggcgtcgcgcagtgggacccgctgggcgcgccggccgaaggggacggtgagggcgacgacgacgacgacggactggggggcggcggcctcatcgaggagctacggagggaacagaggtctgcgaagaagcgtctcgacatggacgaagcggacggggaggtggcttcgggtgcgggggcgagggcggaggcaaaggggaagaggagcaagaggaagaggaaagaggaggcaccgaccatggagtcggcccgggagaagaagcgatctgagaaggaaaggagggcgcagcttgattcgatccatgccgagtcacagaggctgctgcgggagacgaggaaggcgtcgttcaaaccaactgtgcagccagttcacaagcccatctcatctgtcctggagaagatccgccttcgtaagatggagatcaaatacttctattgaagacagtgatgacaatgatgctgttccggagccagtggttgatttggctgagcaattggatgtgcctcagtctaaagaagtggcacttgataaagacttgaggattgatggcgctgaaaaggagcttggagcaaatggccacagccttgatcggtgtgatagtgttcaagaggatgaggatggtttgagttgcaaggagaaatatctctataactgtggtaccaaagcttcagatgaggaattttctgatagattgcaagagaatcacgagaacacccagccaagtaataatcataacgattcagtagatcagagtcaactgcccccttcttcaagccctactgagagtacagatgaaatttcatcagaagacgaagaaaataatgataaagagaacatggatccaagcgctcagaataatgatgtacatactcttgaacacctccaacaagccatcggaggaaactcacgtccagatgatgctatcttaaaggattttctagatgatgaagctgaggaagaggatgatagtgacaatgacatgactagatttaaggacaatgaagaagatgatggaagcgatgaaaacgaggtgttcaatgacctaatagcagctggttatgaagaaaaagaagtagatcacgagaagcgtaatgaactccaccaaaagtggcttcaacaacaggatgctgctgaaacaaataatgttgataataatacattgatatccccattagaagatgacaactcaagggaggtatttagtctaataaagaagctcaatattgctcctaaacctaagatgagaggaaagcaatcaacatcaaatcatgaaatgcttatggctggaaggaacaccattgcttcaaagtcatcgtttcttggacgaacagccagtggttcactggcatcttctcacagatcagtctatagatcctatgtatttggtcgtgatgacagcaatagcagcagtaggagctgcatttctacttcagagagtaatttagatctggatcagaccaattcctctcaacccaagaaggccaagttcagttcacagccgaaaccagaggggacaagggcaactccagagtgtaacacgagttcaggtgtttccctcttcgacgtcctgcgcaggacttcagagcagagcagtcaggaaagctgtagcacaatcacagaaagtcaagctgtgcaccagttctcggcattcaagttatcaaggaggttttccaaggtgggttcaaaaaattgacaaactctagatggctgttagtatcgagagggttactgttggagcttatggggcaacgcgttgagttagtttcgagcttcaaaccgccaaaatgttccggattgcaccatgagcgccaggtgttttatgcacgaactgagaatgctgagacctggccctgttgtagattatgaaacccagaatcttgttgtgtgtactcgtatgctcttgagaacgcacgctgagtttcctgagatgtttaaagtggagtgtaatgtttgcttattctctctgcattgtctcatgagataggtagatgttgtaaggcttttaccaaaaccaaatgttcgaaatattagatgtaaccatacattctgttcatgga

SEQ ID NO: 11547 - DNA, 2563 bp, Zea Mays
cctcattcccgttcgcctcgccgctccccgacctcgactcgccgaaatcccgggaggagaggacgcgggcggcgctatggacacggagccgttcgacgaggcggagctcctggcgctcccaccgtcccccgtcgcgtccccgcctcgtcgcctcaagcgtctcaagaaatcctcctcccaagccaccgccaccaccgccactaccaccagccctcatgtcggctccccgcctccgcctttgtcgcctccgcctccgccgctgctggcggaggcgacgccgggcgaggaaaccctggcgttcccttcccgcgacacctccccacacccgccgacgccgccagatgcggatgccccgactccgctaccgcatccctctcccgcccccgtgtcgccgccgctgcagccgaccgtcacccccgacaacgacagcgacgaggaggacgacgggctcgacccgctgttctccggggccgccggcgtcgcgcagtgggacccgctgggcgcgccggccgaaggggacggtgagggcgacgacgacgacgacggactggggggcggcggcctcatcgaggagctacggagggaacagaggtctgcgaagaagcgtctcgacatggacgaagcggacggggaggtggcttcgggtgcgggggcgagggcggaggcaaaggggaagaggagcaagaggaagaggaaagaggaggcaccgaccatggagtcggcccgggagaagaagcgatctgagaaggaaaggagggcgcagcttgattcgatccatgccgagtcacagaggctgctgcgggagacgaggaaggcgtcgttcaaaccaactgtgcagccagttcacaagcccatctcatctgtcctggagaagatccgccttcgtaagatggaggttctgaagaagtacagatttttctctctgagatcaaatacttctattgaagacagtgatgacaatgatgctgttccggagccagtggttgatttggctgagcaattggatgtgcctcagtctaaagaagtggcacttgataaagacttgaggattgatggcgctgaaaaggagcttggagcaaatggccacagccttgatcggtgtgatagtgttcaagaggatgaggatggtttgagttgcaaggagaaatatctctataactgtggtaccaaagcttcagatgaggaattttctgatagattgcaagagaatcacgagaacacccagccaagtaataatcataacgattcagtagatcagagtcaactgcccccttcttcaagccctactgagagtacagatgaaatttcatcagaagacgaagaaaataatgataaagagaacatggatccaagcgctcagaataatgatgtacatactcttgaacacctccaacaagccatcggaggaaactcacgtccagatgatgctatcttaaaggattttctagatgatgaagctgaggaagaggatgatagtgacaatgacatgactagatttaaggacaatgaagaagatgatggaagcgatgaaaacgaggtgttcaatgacctaatagcagctggttatgaagaaaaagaagtagatcacgagaagcgtaatgaactccaccaaaagtggcttcaacaacaggatgctgctgaaacaaataagttgataataatacattgatatccccattagaagatgacaactcaagggaggtatttagtctaataaagaagctcaatattgctcctaaacctaagatgagaggaaagcaatcaacatcaaatcatgaaatgcttatggctggaaggaacaccattgcttcaaagtcatcgtttcttggacgaacagccagtggttcactggcatcttctcacagatcagtctatagatcctatgtatttggtcgtgatgacagcaatagcagcagtaggagctgcatttctacttcagagagtaatttagatctggatcagaccaattcctctcaacccaagaaggccaagttcagttcacagccgaaaccagaggggacaagggcaactccagagtgtaacacgagttcaggtgtttccctcttcgacgtcctgcgcaggacttcagagcagagcagtcaggaaagctgtagcacaatcacagaaagtcaagctgtgcaccagttctcggcattcaagttatcaaggaggttttccaaggtgggttcaaaaaattgacaaactctagatggctgttagtatcgagagggttactgttggagcttatggggcaacgcgttgagttagtttcgagcttcaaaccgccaaaatgttccggattgcaccatgagcgccaggtgttttatgcacgaactgagaatgctgagacctggccctgttgtagattatgaaacccagaatcttgttgtgtgtactcgtatgctcttgagaacgcacgctgagtttcctgagatgtttaaagtggagtgtaatgtttgcttattctctctgcattgtctcatgagataggtagatgttgtaaggcttttaccaaaaccaaatgttcgaaatattagatgtaaccatacattctgttcatgga

SEQ ID NO: 11548 - DNA, 2539 bp, Zea Mays
atcctcattcccgttcgcctcgccgctccccgacctcgactcgccgaaatcccgggaggagaggacgcgggcggcgctatggacacggagccgttcgacgaggcggagctcctggcgctcccaccgtcccccgtcgcgtccccgcctcgtcgcctcaagcgtctcaagaaatcctcctcccaagccaccgccaccaccgccactaccaccagccctcatgtcggctccccgcctccgcctttgtcgcctccgcctccgccgctgctggcggaggcgacgccgggcgaggaaaccctggcgttcccttcccgcgacacctccccacacccgccgacgccgccagatgcggatgccccgactccgctaccgcatccctctcccgcccccgtgtcgccgccgctgcagccgaccgtcacccccgacaacgacagcgacgaggaggacgacgggctcgacccgctgttctccggggccgccggcgtcgcgcagtgggacccgctgggcgcgccggccgaaggggacggtgagggcgacgacgacgacgacggactggggggcggcggcctcatcgaggagctacggagggaacagaggtctgcgaagaagcgtctcgacatggacgaagcggacggggaggtggcttcgggtgcgggggcgagggcggaggcaaaggggaagaggagcaagaggaagaggaaagaggaggcaccgaccatggagtcggcccgggagaagaagcgatctgagaaggaaaggagggcgcagcttgattcgatccatgccgagtcacagaggctgctgcgggagacgaggaaggcgtcgttcaaaccaactgtgcagccagttcacaagcccatctcatctgtcctggagaagatccgccttcgtaagatggaggttctgaagaaatcaaatacttctattgaagacagtgatgacaatgatgctgttccggagccagtggttgatttggctgagcaattggatgtgcctcagtctaaagaagtggcacttgataaagacttgaggattgatggcgctgaaaaggagcttggagcaaatggccacagccttgatcggtgtgatagtgttcaagaggatgaggatggtttgagttgcaaggagaaatatctctataactgtggtaccaaagcttcagatgaggaattttctgatagattgcaagagaatcacgagaacacccagccaagtaataatcataacgattcagtagatcagagtcaactgcccccttcttcaagccctactgagagtacagatgaaatttcatcagaagacgaagaaaataatgataaagagaacatggatccaagcgctcagaataatgatgtacatactcttgaacacctccaacaagccatcggaggaaactcacgtccagatgatgctatcttaaaggattttctagatgatgaagctgaggaagaggatgatagtgacaatgacatgactagatttaaggacaatgaagaagatgatggaagcgatgaaaacgaggtgttcaatgacctaatagcagctggttatgaagaaaaagaagtagatcacgagaagcgtaatgaactccaccaaaagtggcttcaacaacaggatgctgctgaaacaaataatgttgataataatacattgatatccccattagaagatgacaactcaagggaggtatttagtctaataaagaagctcaatattgctcctaaacctaagatgagaggaaagcaatcaacatcaaatcatgaaatgcttatggctggaaggaacaccattgcttcaaagtcatcgtttcttggacgaacagccagtggttcactggcatcttctcacagatcagtctatagatcctatgtatttggtcgtgatgacagcaatagcagcagtaggagctgcatttctacttcagagagtaatttagatctgaccaattcctctcaacccaagaaggccaagttcagttcacagccgaaaccagaggggacaagggcaactccagagtgtaacacgagttcaggtgtttccctcttcgacgtcctgcgcaggacttcagagcagagcagtcaggaaagctgtagcacaatcacagaaagtcaagctgtgcaccagttctcggcattcaagttatcaaggaggttttccaaggtgggttcaaaaaattgacaaactctagatggctgttagtatcgagagggttactgttggagcttatggggcaacgcgttgagttagtttcgagcttcaaaccgccaaaatgttccggattgcaccatgagcgccaggtgttttatgcacgaactgagaatgctgagacctggccctgttgtagattatgaaacccagaatcttgttgtgtgtactcgtatgctcttgagaacgcacgctgagtttcctgagatgtttaaagtggagtgtaatgtttgcttattctctctgcattgtctcatgagataggtagatgttgtaaggcttttaccaaaaccaaatgttcgaaatattagatgtaaccatacattctgttcatgga

SEQ ID NO: 11549 - DNA, 2545 bp, Zea Mays
atcctcattcccgttcgcctcgccgctccccgacctcgactcgccgaaatcccgggaggagaggacgcgggcggcgctatggacacggagccgttcgacgaggcggagctcctggcgctcccaccgtcccccgtcgcgtccccgcctcgtcgcctcaagcgtctcaagaaatcctcctcccaagccaccgccaccaccgccactaccaccagccctcatgtcggctccccgcctccgcctttgtcgcctccgcctccgccgctgctggcggaggcgacgccgggcgaggaaaccctggcgttcccttcccgcgacacctccccacacccgccgacgccgccagatgcggatgccccgactccgctaccgcatccctctcccgcccccgtgtcgccgccgctgcagccgaccgtcacccccgacaacgacagcgacgaggaggacgacgggctcgacccgctgttctccggggccgccggcgtcgcgcagtgggacccgctgggcgcgccggccgaaggggacggtgagggcgacgacgacgacgacggactggggggcggcggcctcatcgaggagctacggagggaacagaggtctgcgaagaagcgtctcgacatggacgaagcggacggggaggtggcttcgggtgcgggggcgagggcggaggcaaaggggaagaggagcaagaggaagaggaaagaggaggcaccgaccatggagtcggcccgggagaagaagcgatctgagaaggaaaggagggcgcagcttgattcgatccatgccgagtcacagaggctgctgcgggagacgaggaaggcgtcgttcaaaccaactgtgcagccagttcacaagcccatctcatctgtcctggagaagatccgccttcgtaagatggaggttctgaagaaatcaaatacttctattgaagacagtgatgacaatgatgctgttccggagccagtggttgatttggctgagcaattggatgtgcctcagtctaaagaagtggcacttgataaagacttgaggattgatggcgctgaaaaggagcttggagcaaatggccacagccttgatcggtgtgatagtgttcaagaggatgaggatggtttgagttgcaaggagaaatatctctataactgtggtaccaaagcttcagatgaggaattttctgatagattgcaagagaatcacgagaacacccagccaagtaataatcataacgattcagtagatcagagtcaactgcccccttcttcaagccctactgagagtacagatgaaatttcatcagaagacgaagaaaataatgataaagagaacatggatccaagcgctcagaataatgatgtacatactcttgaacacctccaacaagccatcggaggaaactcacgtccagatgatgctatcttaaaggattttctagatgatgaagctgaggaagaggatgatagtgacaatgacatgactagatttaaggacaatgaagaagatgatggaagcgatgaaaacgaggtgttcaatgacctaatagcagctggttatgaagaaaaagaagtagatcacgagaagcgtaatgaactccaccaaaagtggcttcaacaacaggatgctgctgaaacaaataatgttgataataatacattgatatccccattagaagatgacaactcaagggaggtatttagtctaataaagaagctcaatattgctcctaaacctaagatgagaggaaagcaatcaacatcaaatcatgaaatgcttatggctggaaggaacaccattgcttcaaagtcatcgtttcttggacgaacagccagtggttcactggcatcttctcacagatcagtctatagatcctatgtatttggtcgtgatgacagcaatagcagcagtaggagctgcatttctacttcagagagtaatttagatctggatcagaccaattcctctcaacccaagaaggccaagttcagttcacagccgaaaccagaggggacaagggcaactccagagtgtaacacgagttcaggtgtttccctcttcgacgtcctgcgcaggacttcagagcagagcagtcaggaaagctgtagcacaatcacagaaagtcaagctgtgcaccagttctcggcattcaagttatcaaggaggttttccaaggtgggttcaaaaaattgacaaactctagatggctgttagtatcgagagggttactgttggagcttatggggcaacgcgttgagttagtttcgagcttcaaaccgccaaaatgttccggattgcaccatgagcgccaggtgttttatgcacgaactgagaatgctgagacctggccctgttgtagattatgaaacccagaatcttgttgtgtgtactcgtatgctcttgagaacgcacgctgagtttcctgagatgtttaaagtggagtgtaatgtttgcttattctctctgcattgtctcatgagataggtagatgttgtaaggcttttaccaaaaccaaatgttcgaaatattagatgtaaccatacattctgttcatgga

SEQ ID NO: 11550 - DNA, 1929 bp, Zea Mays
ttgaaaagactgaggcccaagaagaagaagttagaagtaagctagctttgttggaggtatgccaccaaaatgaaatccatagaaccatttctgcatttgcccgacttcagaaatatgcagaatcaagaaaagagatcgacagaagacttgatgtacacttccagagaagaatggcagaagtactcgataagcacttatctatggtccaaagggatcatgaacaaaaatcccagattgttgaacgtcgaataagagatgatgcagctcttgaagaagctaaaagaaaagagcaagctgtcaaggaagaaaagttaaggcaggaaagagcccagcaagaagcagaggctaggcagaaggaagctgcaaagttagcagctgaagcgcgaaaaacagcatttgaggctgctaaaaaggaagcggcagaaaagcaggctgctaaattgagagatgcagcagcaacttcccaatctagtccagatttgcagaataatattgcagacatcaaagtttttggcgttaaatatgcattagaagcagagtcacggaggtatgcattagtacagaatcaagtgccagaaaacattcatcacaacaaggtcttatttactgctgaaacttctaatatttaattgcagtttttcaaaacttgctgttgtttttttgattcgttaattctgatgactaatgactgctcctgtgttccatgacttaccatttggtgtataaatgagtatgttgctaacttgtactctggccgacatcatatcatgcaggaattcagcaaatatgaccgacaaattgccaaatccataagtaaacttatgccaactactgatagtgtcagagcaagggctagtgagcttattaaagctttagatggacaggattgtccccgtccaatctcttgttgtctatttgcaaacaagattatttctattgtcaagagtagaaatacaaaggacagaaccttcggaaatttggcctttgcgtgtggatatgtcatgctattagtcacaaatcaggtaccagatgcaatggactatcttttagctgagttcaacagagtttgcatatacacggttccaaagcatttgcatgctttaaataagcacgaaatagagattattacagactgataggttaccaggaagaaaatggacaattcgagagcactgaaagttatctaacatatgtcgttgcatatgtcaaattgtacgcggcaatgattcaaacagaaatcaagggtgtacgccatcctcatggcttagctgagggatggaaatggctcgccatgttcctcaattctcttccagctactacagccactgcttgtgcccttcacgccttcctcaagatggctggttttgcacttcacaagaaatatggatcgcagttcatgaaaatcctatatgtgatttcacggtactttttaccggctttgaaggaacaaggcaacaagatgcaggctgaggctgtcaacaatctacagaattatctgaacgacaagatctacctggaggaaccagaagggcagtacctcgtccagcaattactatcgaaagagttgttcatgtaaagttcaaaacaccagatcgtgtgattgactctgaagggcgcacctcgtataagctactactatcgaaagagctgttcgtgtttcagaaacgcaagcgagccttgtagagatgacctgcaaggaaatcagtaccaaatctccccaacatttgtagtcttaaccgtagaggagatgaccctgcatgaaatatattgaatattatttgtacgtgctattaccttagtgtttgaaattattgattatttatttttaactcttcatttatcaaattggcataatttaattcacatgtatatttacgatatttatgctttccttgtttggcaacatgtccatttattttttccctattt

SEQ ID NO: 11551 - DNA, 1678 bp, Zea Mays
atgtcaaagttgaaaagactgaggcccaagaagaagaagttagaagtaagctagctttgttggaggtatgccaccaaaatgaaatccatagaaccatttctgcatttgcccgacttcagaaatatgcagaatcaagaaaagagatcgacagaagacttgatgtacacttccagagaagaataagtactcgataagcacttatctatggtccaaagggatcatgaacaaaaatcccagattgttgaacgtcgaataagagatgatgcagctcttgaagaagctaaaagaaaagagcaagctgtcaaggaagaaaagttaaggcaggaaagagcccagcaagaagcagaggctaggcagaaggaagctgcaaagttagcagctgaagcgcgaaaaacagcatttgaggctgctaaaaaggaagcggcagaaaagcaggctgctaaattgagagatgcagcagcaacttcccaatctagtccagatttgcagaataatattgcagacatcaaagtttttggcgttaaatatgcattagaagcagagtcacggaggtatgcattagtacagaatcaagtgccagaaaacattcatcacaacaaggaattcagcaaatatgaccgacaaattgccaaatccataagtaaacttatgccaactactgatagtgtcagattatttctattgtcaagagtagaaatacaaaggacagaaccttcggaaatttggcctttgcgtgtggatatgtcatgctattagtcacaaatcaggtaccagatgcaatggactatcttttagctgagttcaacagagtttgcatatacacggttccaaagcatttgcatgctttaaatgcagaagcacgaaatagagattattacagactgataggttaccaggaagaaaatggacaattcgagagcactgaaagttatctaacatatgtcgttgcatatgtcaaattgtacgcggcaatgattcaaacagaaatcaagggtgtacgccatcctcatggcttagctgagggatggaaatggctcgccatgttcctcaattctcttccagctactacagccactgcttgtgcccttcacgccttcctcaagatggctggttttgcacttcacaagaaatatggatcgcagttcatgaaaatcctatatgtgatttcacggtactttttaccggctttgaaggaacaaggcaacaagatgcaggctgaggctgtcaacaatctacagaattatctgaacgacaagatctacctggaggaaccagaagggcagtacctcgtccagcaattactatcgaaagagttgttcatgtaaagttcaaaacaccagatcgtgtgattgactctgaagggcgcacctcgtataagctactactatcgaaagagctgttcgtgtttcagaaacgcaagcgagccttgtagagatgacctgcaaggaaatcagtaccaaatctccccaacatttgtagtcttaaccgtagaggagatgaccctgcatgaaatatattgaatattatttgtacgtgctattaccttagtgtttgaaattattgattatttatttttaactcttcatttatcaaattggcataatttaattcacatgtatatttacgatatttatgctttccttgtttggcaacatgtccatttattttttccctattt

SEQ ID NO: 11552 - DNA, 2483 bp, Zea Mays
cggccatcgcataggtgacgccaccgtccctgtcccgccgtcgctacgaatttgctacacctacacgttttcatttgctggtttcgccgatgatctgatcacggcgcgctacttcgcctacttgcctgcttcagcttcaatccatcggggggttcctttcagttaataagatcgatttgaaaagcgcacccggcaacctgctccgctcctgcgctgtttaggttccggcctgtgtcaaagcgtgcatctcacgcgaggcgcaccaaggccggagccctggccacctagggtcacctccctgcgatcgggccgcggcgacggggacggccgcgatgggcttcgagcgtgtggagctgcgttgccccagggacctggacccgcgcccgagctggacgctcggcgacgtgctcgccgagctcgacgcgctagacgccacccgccgcgctgcgccgcccacgcccctgaagcagccgccccattgggttaacggcgtcggtacgagggagaaggcatttgtgatgcgggttgatggctacgacgaagacgacttagaagatgaagacgatggtacaagtgctgggaagtcccgggctctcatggctaaaggagcaaggttctcgtgtaacgatctccaatcaagtgattcagaggatgaattagatggccaagttaccccatacaacttaatggagaaaagggacctagcgaagagcattcttcttgagcttgaaagcgagcatcatctaaaagttcaagaagaagttagaagtaagctagctttgttggaggtatgccaccaaaatgaaatccatagaaccatttctgcatttgcccgacttcagaaatatgcagaatcaagaaaagagatcgacagaagacttgatgtacacttccagagaagaataagtactcgataagcacttatctatggtccaaagggatcatgaacaaaaatcccagattgttgaacgtcgaataagagatgatgcagctcttgaagaagctaaaagaaaagagcaagctgtcaaggaagaaaagttaaggcaggaaagagcccagcaagaagcagaggctaggcagaaggaagctgcaaagttagcagctgaagcgcgaaaaacagcatttgaggctgctaaaaaggaagcggcagaaaagcaggctgctaaattgagagatgcagcagcaacttcccaatctagtccagatttgcagaataatattgcagacatcaaagtttttggcgttaaatatgcattagaagcagagtcacggaggtatgcattagtacagaatcaagtgccagaaaacattcatcacaacaaggaattcagcaaatatgaccgacaaattgccaaatccataagtaaacttatgccaactactgatagtgtcagagcaagggctagtgagcttattaaagctttagatggacaggattgtccccgtccaatctcttgttgtctatttgcaaacaagattatttctattgtcaagagtagaaatacaaaggacagaaccttcggaaatttggcctttgcgtgtggatatgtcatgctattagtcacaaatcaggtaccagatgcaatggactatcttttagctgagttcaacagagtttgcatatacacggttccaaagcatttgcatgctttaaatgcagaagcacgaaatagagattattacagactgataggttaccaggaagaaaatggacaattcgagagcactgaaagttatctaacatatgtcgttgcatatgtcaaattgtacgcggcaatgattcaaacagaaatcaagggtgtacgccatcctcatggcttagctgagggatggaaatggctcgccatgttcctcaattctcttccagctactacagccactgcttgtgcccttcacgccttcctcaagatggctggttttgcacttcacaagaaatatggatcgcagttcatgaaaatcctatatgtgatttcacggtactttttaccggctttgaaggaacaaggcaacaagatgcaggctgaggctgtcaacaatctacagaattatctgaacgacaagatctacctggaggaaccagaagggcagtacctcgtccagcaattactatcgaaagagttgttcatgtaaagttcaaaacaccagatcgtgtgattgactctgaagggcgcacctcgtataagctactactatcgaaagagctgttcgtgtttcagaaacgcaagcgagccttgtagagatgacctgcaaggaaatcagtaccaaatctccccaacatttgtagtcttaaccgtagaggagatgaccctgcatgaaatatattgaatattatttgtacgtgctattaccttagtgtttgaaattattgattatttatttttaactcttcatttatcaaattggcataatttaattcacatgtatatttacgatatttatgctttccttgtttggcaacatgtccatttattttttccctattt

SEQ ID NO: 11553 - DNA, 2359 bp, Zea Mays
cggccatcgcataggtgacgccaccgtccctgtcccgccgtcgctacgaatttgctacacctacacgttttcatttgctggtttcgccgatgatctgatcacggcgcgctacttcgcctacttgcctgcttcagcttcaatccatcggggggttcctttcagttaataagatcgatttgaaaagcgcacccggcaacctgctccgctcctgcgctgtttaggttccggcctgtgtcaaagcgtgcatctcacgcgaggcgcaccaaggccggagccctggccacctagggtcacctccctgcgatcgggccgcggcgacggggacggccgcgatgggcttcgagcgtgtggagctgcgttgccccagggacctggacccgcgcccgagctggacgctcggcgacgtgctcgccgagctcgacgcgctagacgccacccgccgcgctgcgccgcccacgcccctgaagcagccgccccattgggttaacggcgtcggtacgagggagaaggcatttgtgatgcgggttgatggctacgacgaagacgacttagaagatgaagacgatggtacaagtgctgggaagtcccgggctctcatggctaaaggagcaaggttctcgtgtaacgatctccaatcaagtgattcagaggatgaattagatggccaagttaccccatacaacttaatggagaaaagggacctagcgaagagcattcttcttgagcttgaaagcgagcatcatctaaaagttcaagaagaagttagaagtaagctagctttgttggaggtatgccaccaaaatgaaatccatagaaccatttctgcatttgcccgacttcagaaatatgcagaatcaagaaaagagatcgacagaagacttgatgtacacttccagagaagaatggcagaagtactcgataagcacttatctatggtccaaagggatcatgaacaaaaatcccagattgttgaacgtcgaataagagatgatgcagctcttgaagaagctaaaagaaaagagcaagctgtcaaggaagaaaagttaaggcaggaaagagcccagcaagaagcagaggctaggcagaaggaagctgcaaagttagcagctgaagcgcgaaaaacagcatttgaggctgctaaaaaggaagcggcagaaaagcaggctgctaaattgagagatgcagcagcaacttcccaatctagtccagatttgcagaataatattgcagacatcaaagtttttggcgttaaatatgcattagaagcagagtcacggaggtatgcattagtacagaatcaagtgccagaaaacattcatcacaacaaggaattcagcaaatatgaccgacaaattgccaaatccataagtaaacttatgccaactactgatagtgtcagagcaagggctagtgagcttattaaagctttagatggacaggattgtccccgtccaatctcttgttgtctatttgcaaacaagattatttctattgtcaagagtagaaatacaaaggacagaaccttcggaaatttggcctttgcgtgtggatatgtcatgctattagtcacaaatcaggtaccagatgcaatggactatcttttagctgagttcaacagagtttgcatatacacggttccaaagcatttgcatgctttaaatacagaaatcaagggtgtacgccatcctcatggcttagctgagggatggaaatggctcgccatgttcctcaattctcttccagctactacagccactgcttgtgcccttcacgccttcctcaagatggctggttttgcacttcacaagaaatatggatcgcagttcatgaaaatcctatatgtgatttcacggtactttttaccggctttgaaggaacaaggcaacaagatgcaggctgaggctgtcaacaatctacagaattatctgaacgacaagatctacctggaggaaccagaagggcagtacctcgtccagcaattactatcgaaagagttgttcatgtaaagttcaaaacaccagatcgtgtgattgactctgaagggcgcacctcgtataagctactactatcgaaagagctgttcgtgtttcagaaacgcaagcgagccttgtagagatgacctgcaaggaaatcagtaccaaatctccccaacatttgtagtcttaaccgtagaggagatgaccctgcatgaaatatattgaatattatttgtacgtgctattaccttagtgtttgaaattattgattatttatttttaactcttcatttatcaaattggcataatttaattcacatgtatatttacgatatttatgctttccttgtttggcaacatgtccatttattttttccctattt

SEQ ID NO: 11554 - DNA, 2484 bp, Zea Mays
cggccatcgcataggtgacgccaccgtccctgtcccgccgtcgctacgaatttgctacacctacacgttttcatttgctggtttcgccgatgatctgatcacggcgcgctacttcgcctacttgcctgcttcagcttcaatccatcggggggttcctttcagttaataagatcgatttgaaaagcgcacccggcaacctgctccgctcctgcgctgtttaggttccggcctgtgtcaaagcgtgcatctcacgcgaggcgcaccaaggccggagccctggccacctagggtcacctccctgcgatcgggccgcggcgacggggacggccgcgatgggcttcgagcgtgtggagctgcgttgccccagggacctggacccgcgcccgagctggacgctcggcgacgtgctcgccgagctcgacgcgctagacgccacccgccgcgctgcgccgcccacgcccctgaagcagccgccccattgggttaacggcgtcggtacgagggagaaggcatttgtgatgcgggttgatggctacgacgaagacgacttagaagatgaagacgatggtacaagtgctgggaagtcccgggctctcatggctaaaggagcaaggttctcgtgtaacgatctccaatcaagtgattcagaggatgaattagatggccaagttaccccatacaacttaatggagaaaagggacctagcgaagagcattcttcttgagcttgaaagcgagcatcatctaaaagttcaagaagaagttagaagtaagctagctttgttggaggtatgccaccaaaatgaaatccatagaaccatttctgcatttgcccgacttcagaaatatgcagaatcaagaaaagagatcgacagaagacttgatgtacacttccagagaagaatggcagaagtactcgataagcacttatctatggtccaaagggatcatgaacaaaaatcccagattgttgaacgtcgaataagagatgatgcagctcttgaagaagctaaaagaaaagagcaagctgtcaaggaagaaaagttaaggcaggaaagagcccagcaagaagcagaggctaggcagaaggaagctgcaaagttagcagctgaagcgcgaaaaacagcatttgaggctgctaaaaaggaagcggcagaaaagcaggctgctaaattgagagatgcagcagcaacttcccaatctagtccagatttgcagaataatattgcagacatcaaagtttttggcgttaaatatgcattagaagcagagtcacggaggtatgcattagtacagaatcaagtgccagaaaacattcatcacaacaaggaattcagcaaatatgaccgacaaattgccaaatccataagtaaacttatgccaactactgatagtgtcagagcaagggctagtgagcttattaaagctttagatggacaggattgtccccgtccaatctcttgttgtctatttgcaaacaagattatttctattgtcaagagtagaaatacaaaggacagaaccttcggaaatttggcctttgcgtgtggatatgtcatgctattagtcacaaatcaggtaccagatgcaatggactatcttttagctgagttcaacagagtttgcatatacacggttccaaagcatttgcatgctttaaataagcacgaaatagagattattacagactgataggttaccaggaagaaaatggacaattcgagagcactgaaagttatctaacatatgtcgttgcatatgtcaaattgtacgcggcaatgattcaaacagaaatcaagggtgtacgccatcctcatggcttagctgagggatggaaatggctcgccatgttcctcaattctcttccagctactacagccactgcttgtgcccttcacgccttcctcaagatggctggttttgcacttcacaagaaatatggatcgcagttcatgaaaatcctatatgtgatttcacggtactttttaccggctttgaaggaacaaggcaacaagatgcaggctgaggctgtcaacaatctacagaattatctgaacgacaagatctacctggaggaaccagaagggcagtacctcgtccagcaattactatcgaaagagttgttcatgtaaagttcaaaacaccagatcgtgtgattgactctgaagggcgcacctcgtataagctactactatcgaaagagctgttcgtgtttcagaaacgcaagcgagccttgtagagatgacctgcaaggaaatcagtaccaaatctccccaacatttgtagtcttaaccgtagaggagatgaccctgcatgaaatatattgaatattatttgtacgtgctattaccttagtgtttgaaattattgattatttatttttaactcttcatttatcaaattggcataatttaattcacatgtatatttacgatatttatgctttccttgtttggcaacatgtccatttattttttccctattt

SEQ ID NO: 11555 - DNA, 1881 bp, Zea Mays
cgattcaagcgacgccgcggccgccggccatcgcatagtgattcagaggatgaattagatggccaagttaccccatacaacttaatggagaaaagggacctagcgaagagcattcttcttgagcttgaaagcgagcatcatctaaaagttcaagaagaagttagaagtaagctagctttgttggaggtatgccaccaaaatgaaatccatagaaccatttctgcatttgcccgacttcagaaatatgcagaatcaagaaaagagatcgacagaagacttgatgtacacttccagagaagaataagtactcgataagcacttatctatggtccaaagggatcatgaacaaaaatcccagattgttgaacgtcgaataagagatgatgcagctcttgaagaagctaaaagaaaagagcaagctgtcaaggaagaaaagttaaggcaggaaagagcccagcaagaagcagaggctaggcagaaggaagctgcaaagttagcagctgaagcgcgaaaaacagcatttgaggctgctaaaaaggaagcggcagaaaagcaggctgctaaattgagagatgcagcagcaacttcccaatctagtccagatttgcagaataatattgcagacatcaaagtttttggcgttaaatatgcattagaagcagagtcacggaggtatgcattagtacagaatcaagtgccagaaaacattcatcacaacaaggaattcagcaaatatgaccgacaaattgccaaatccataagtaaacttatgccaactactgatagtgtcagagcaagggctagtgagcttattaaagctttagatggacaggattgtccccgtccaatctcttgttgtctatttgcaaacaagattatttctattgtcaagagtagaaatacaaaggacagaaccttcggaaatttggcctttgcgtgtggatatgtcatgctattagtcacaaatcaggtaccagatgcaatggactatcttttagctgagttcaacagagtttgcatatacacggttccaaagcatttgcatgctttaaatgcagaagcacgaaatagagattattacagactgataggttaccaggaagaaaatggacaattcgagagcactgaaagttatctaacatatgtcgttgcatatgtcaaattgtacgcggcaatgattcaaacagaaatcaagggtgtacgccatcctcatggcttagctgagggatggaaatggctcgccatgttcctcaattctcttccagctactacagccactgcttgtgcccttcacgccttcctcaagatggctggttttgcacttcacaagaaatatggatcgcagttcatgaaaatcctatatgtgatttcacggtactttttaccggctttgaaggaacaaggcaacaagatgcaggctgaggctgtcaacaatctacagaattatctgaacgacaagatctacctggaggaaccagaagggcagtacctcgtccagcaattactatcgaaagagttgttcatgtaaagttcaaaacaccagatcgtgtgattgactctgaagggcgcacctcgtataagctactactatcgaaagagctgttcgtgtttcagaaacgcaagcgagccttgtagagatgacctgcaaggaaatcagtaccaaatctccccaacatttgtagtcttaaccgtagaggagatgaccctgcatgaaatatattgaatattatttgtacgtgctattaccttagtgtttgaaattattgattatttatttttaactcttcatttatcaaattggcataatttaattcacatgtatatttacgatatttatgctttccttgtttggcaacatgtccatttattttttccctattt

SEQ ID NO: 11556 - DNA, 2173 bp, Zea Mays
gcggcaccgccgatcccctcgccgtcgattcatatcacccctttcgattcaagcgacgccgcggccgccggccatcgcatagtgattcagaggatgaattagatggccaagttaccccatacaacttaatggagaaaagggacctagcgaagagcattcttcttgagcttgaaagcgagcatcatctaaaagttcaagaagaagttagaagtaagctagctttgttggaggtatgccaccaaaatgaaatccatagaaccatttctgcatttgcccgacttcagaaatatgcagaatcaagaaaagagatcgacagaagacttgatgtacacttccagagaagaatggcagaagtactcgataagcacttatctatggtccaaagggatcatgaacaaaaatcccagattgttgaacgtcgaataagagatgatgcagctcttgaagaagctaaaagaaaagagcaagctgtcaaggaagaaaagttaaggcaggaaagagcccagcaagaagcagaggctaggcagaaggaagctgcaaagttagcagctgaagcgcgaaaaacagcatttgaggctgctaaaaaggaagcggcagaaaagcaggctgctaaattgagagatgcagcagcaacttcccaatctagtccagatttgcagaataatattgcagacatcaaagtttttggcgttaaatatgcattagaagcagagtcacggaggtatgcattagtacagaatcaagtgccagaaaacattcatcacaacaaggaattcagcaaatatgaccgacaaattgccaaatccataagtaaacttatgccaactactgatagtgtcagagcaagggctagtgagcttattaaagctttagatggacaggattgtccccgtccaatctcttgttgtctatttgcaaacaagattatttctattgtcaagagtagaaatacaaaggacagaaccttcggaaatttggcctttgcgtgtggatatgtcatgctattagtcacaaatcaggtaccagatgcaatggactatcttttagctgagttcaacagagtttgcatatacacggttccaaagcatttgcatgctttaaatgtaagtctgcatggtatgactctgtaatatatttggaatttgtttatttctgactcttatatgggatgccatgagaaaacgccctaatagacacagcaatgctcagaattatttataatgcatttttaacaattgtatgcagcagatttgtggaccaaaatgctgtgacatactgtcacccactgttttatataaatgtatcgagctttggatttttttctcacgatatctgtaattttataggcagaagcacgaaatagagattattacagactgataggttaccaggaagaaaatggacaattcgagagcactgaaagttatctaacatatgtcgttgcatatgtcaaattgtacgcggcaatgattcaaacagaaatcaagggtgtacgccatcctcatggcttagctgagggatggaaatggctcgccatgttcctcaattctcttccagctactacagccactgcttgtgcccttcacgccttcctcaagatggctggttttgcacttcacaagaaatatggatcgcagttcatgaaaatcctatatgtgatttcacggtactttttaccggctttgaaggaacaaggcaacaagatgcaggctgaggctgtcaacaatctacagaattatctgaacgacaagatctacctggaggaaccagaagggcagtacctcgtccagcaattactatcgaaagagttgttcatgtaaagttcaaaacaccagatcgtgtgattgactctgaagggcgcacctcgtataagctactactatcgaaagagctgttcgtgtttcagaaacgcaagcgagccttgtagagatgacctgcaaggaaatcagtaccaaatctccccaacatttgtagtcttaaccgtagaggagatgaccctgcatgaaatatattgaatattatttgtacgtgctattaccttagtgtttgaaattattgattatttatttttaactcttcatttatcaaattggcataatttaattcacatgtatatttacgatatttatgctttccttgtttggcaacatgtccatttattttttccctattt

SEQ ID NO: 11557 - DNA, 2589 bp, Zea Mays
tctcgctctccctctgcggtgcggcaccgccgatcccctcgccgtcgattcatatcacccctttcgattcaagcgacgccgcggccgccggccatcgcataggtgacgccaccgtccctgtcccgccgtcgctacgaatttgctacacctacacgttttcatttgctggtttcgccgatgatctgatcacggcgcgctacttcgcctacttgcctgcttcagcttcaatccatcggggggttcctttcagttaataagatcgatttgaaaagcgcacccggcaacctgctccgctcctgcgctgtttaggttccggcctgtgtcaaagcgtgcatctcacgcgaggcgcaccaaggccggagccctggccacctagggtcacctccctgcgatcgggccgcggcgacggggacggccgcgatgggcttcgagcgtgtggagctgcgttgccccagggacctggacccgcgcccgagctggacgctcggcgacgtgctcgccgagctcgacgcgctagacgccacccgccgcgctgcgccgcccacgcccctgaagcagccgccccattgggttaacggcgtcggtacgagggagaaggcatttgtgatgcgggttgatggctacgacgaagacgacttagaagatgaagacgatggtacaagtgctgggaagtcccgggctctcatggctaaaggagcaaggttctcgtgtaacgatctccaatcaagtgattcagaggatgaattagatggccaagttaccccatacaacttaatggagaaaagggacctagcgaagagcattcttcttgagcttgaaagcgagcatcatctaaaagttcaagaagaagttagaagtaagctagctttgttggaggtatgccaccaaaatgaaatccatagaaccatttctgcatttgcccgacttcagaaatatgcagaatcaagaaaagagatcgacagaagacttgatgtacacttccagagaagaatggcagaagtactcgataagcacttatctatggtccaaagggatcatgaacaaaaatcccagattgttgaacgtcgaataagagatgatgcagctcttgaagaagctaaaagaaaagagcaagctgtcaaggaagaaaagttaaggcaggaaagagcccagcaagaagcagaggctaggcagaaggaagctgcaaagttagcagctgaagcgcgaaaaacagcatttgaggctgctaaaaaggaagcggcagaaaagcaggctgctaaattgagagatgcagcagcaacttcccaatctagtccagatttgcagaataatattgcagacatcaaagtttttggcgttaaatatgcattagaagcagagtcacggaggtatgcattagtacagaatcaagtgccagaaaacattcatcacaacaaggaattcagcaaatatgaccgacaaattgccaaatccataagtaaacttatgccaactactgatagtgtcagagcaagggctagtgagcttattaaagctttagatggacaggattgtccccgtccaatctcttgttgtctatttgcaaacaagattatttctattgtcaagagtagaaatacaaaggacagaaccttcggaaatttggcctttgcgtgtggatatgtcatgctattagtcacaaatcaggtaccagatgcaatggactatcttttagctgagttcaacagagtttgcatatacacggttccaaagcatttgcatgctttaaatgtaagtctgcatggcagaagcacgaaatagagattattacagactgataggttaccaggaagaaaatggacaattcgagagcactgaaagttatctaacatatgtcgttgcatatgtcaaattgtacgcggcaatgattcaaacagaaatcaagggtgtacgccatcctcatggcttagctgagggatggaaatggctcgccatgttcctcaattctcttccagctactacagccactgcttgtgcccttcacgccttcctcaagatggctggttttgcacttcacaagaaatatggatcgcagttcatgaaaatcctatatgtgatttcacggtactttttaccggctttgaaggaacaaggcaacaagatgcaggctgaggctgtcaacaatctacagaattatctgaacgacaagatctacctggaggaaccagaagggcagtacctcgtccagcaattactatcgaaagagttgttcatgtaaagttcaaaacaccagatcgtgtgattgactctgaagggcgcacctcgtataagctactactatcgaaagagctgttcgtgtttcagaaacgcaagcgagccttgtagagatgacctgcaaggaaatcagtaccaaatctccccaacatttgtagtcttaaccgtagaggagatgaccctgcatgaaatatattgaatattatttgtacgtgctattaccttagtgtttgaaattattgattatttatttttaactcttcatttatcaaattggcataatttaattcacatgtatatttacgatatttatgctttccttgtttggcaacatgtccatttattttttccctattt

SEQ ID NO: 11558 - DNA, 2834 bp, Zea Mays
tctccctctcgctctccctctgcggtgcggcaccgccgatcccctcgccgtcgattcatatcacccctttcgattcaagcgacgccgcggccgccggccatcgcataggtgacgccaccgtccctgtcccgccgtcgctacgaatttgctacacctacacgttttcatttgctggtttcgccgatgatctgatcacggcgcgctacttcgcctacttgcctgcttcagcttcaatccatcggggggttcctttcagttaataagatcgatttgaaaagcgcacccggcaacctgctccgctcctgcgctgtttaggttccggcctgtgtcaaagcgtgcatctcacgcgaggcgcaccaaggccggagccctggccacctagggtcacctccctgcgatcgggccgcggcgacggggacggccgcgatgggcttcgagcgtgtggagctgcgttgccccagggacctggacccgcgcccgagctggacgctcggcgacgtgctcgccgagctcgacgcgctagacgccacccgccgcgctgcgccgcccacgcccctgaagcagccgccccattgggttaacggcgtcggtacgagggagaaggcatttgtgatgcgggttgatggctacgacgaagacgacttagaagatgaagacgatggtacaagtgctgggaagtcccgggctctcatggctaaaggagcaaggttctcgtgtaacgatctccaatcaagtggttttagtgattcagaggatgaattagatggccaagttaccccatacaacttaatggagaaaagggacctagcgaagagcattcttcttgagcttgaaagcgagcatcatctaaaagttcaagaagaagttagaagtaagctagctttgttggaggtatgccaccaaaatgaaatccatagaaccatttctgcatttgcccgacttcagaaatatgcagaatcaagaaaagagatcgacagaagacttgatgtacacttccagagaagaatggcagaagtactcgataagcacttatctatggtccaaagggatcatgaacaaaaatcccagattgttgaacgtcgaataagagatgatgcagctcttgaagaagctaaaagaaaagagcaagctgtcaaggaagaaaagttaaggcaggaaagagcccagcaagaagcagaggctaggcagaaggaagctgcaaagttagcagctgaagcgcgaaaaacagcatttgaggctgctaaaaaggaagcggcagaaaagcaggctgctaaattgagagatgcagcagcaacttcccaatctagtccagatttgcagaataatattgcagacatcaaagtttttggcgttaaatatgcattagaagcagagtcacggaggtatgcattagtacagaatcaagtgccagaaaacattcatcacaacaaggaattcagcaaatatgaccgacaaattgccaaatccataagtaaacttatgccaactactgatagtgtcagagcaagggctagtgagcttattaaagctttagatggacaggattgtccccgtccaatctcttgttgtctatttgcaaacaagattatttctattgtcaagagtagaaatacaaaggacagaaccttcggaaatttggcctttgcgtgtggatatgtcatgctattagtcacaaatcaggtaccagatgcaatggactatcttttagctgagttcaacagagtttgcatatacacggttccaaagcatttgcatgctttaaatgtaagtctgcatggtatgactctgtaatatatttggaatttgtttatttctgactcttatatgggatgccatgagaaaacgccctaatagacacagcaatgctcagaattatttataatgcatttttaacaattgtatgcagcagatttgtggaccaaaatgctgtgacatactgtcacccactgttttatataaatgtatcgagctttggatttttttctcacgatatctgtaattttataggcagaagcacgaaatagagattattacagactgataggttaccaggaagaaaatggacaattcgagagcactgaaagttatctaacatatgtcgttgcatatgtcaaattgtacgcggcaatgattcaaacagaaatcaagggtgtacgccatcctcatggcttagctgagggatggaaatggctcgccatgttcctcaattctcttccagctactacagccactgcttgtgcccttcacgccttcctcaagatggctggttttgcacttcacaagaaatatggatcgcagttcatgaaaatcctatatgtgatttcacggtactttttaccggctttgaaggaacaaggcaacaagatgcaggctgaggctgtcaacaatctacagaattatctgaacgacaagatctacctggaggaaccagaagggcagtacctcgtccagcaattactatcgaaagagttgttcatgtaaagttcaaaacaccagatcgtgtgattgactctgaagggcgcacctcgtataagctactactatcgaaagagctgttcgtgtttcagaaacgcaagcgagccttgtagagatgacctgcaaggaaatcagtaccaaatctccccaacatttgtagtcttaaccgtagaggagatgaccctgcatgaaatatattgaatattatttgtacgtgctattaccttagtgtttgaaattattgattatttatttttaactcttcatttatcaaattggcataatttaattcacatgtatatttacgatatttatgctttccttgtttggcaacatgtccatttattttttccctattt

SEQ ID NO: 11559 - DNA, 2365 bp, Zea Mays
caagctctccctctcgctctccctctgcggtgcggcaccgccgatcccctcgccgtcgattcatatcacccctttcgattcaagcgacgccgcggccgccggccatcgcatagcttcaatccatcggggggttcctttcagttaataagatcgatttgaaaagcgcacccggcaacctgctccgctcctgcgctgtttaggttccggcctgtgtcaaagcgtgcatctcacgcgaggcgcaccaaggccggagccctggccacctagggtcacctccctgcgatcgggccgcggcgacggggacggccgcgatgggcttcgagcgtgtggagctgcgttgccccagggacctggacccgcgcccgagctggacgctcggcgacgtgctcgccgagctcgacgcgctagacgccacccgccgcgctgcgccgcccacgcccctgaagcagccgccccattgggttaacggcgtcggtacgagggagaaggcatttgtgatgcgggttgatggctacgacgaagacgacttagaagatgaagacgatggtacaagtgctgggaagtcccgggctctcatggctaaaggagcaaggttctcgtgtaacgatctccaatcaagtgattcagaggatgaattagatggccaagttaccccatacaacttaatggagaaaagggacctagcgaagagcattcttcttgagcttgaaagcgagcatcatctaaaagttcaagaagaagttagaagtaagctagctttgttggaggtatgccaccaaaatgaaatccatagaaccatttctgcatttgcccgacttcagaaatatgcagaatcaagaaaagagatcgacagaagacttgatgtacacttccagagaagaatggcagaagtactcgataagcacttatctatggtccaaagggatcatgaacaaaaatcccagattgttgaacgtcgaataagagatgatgcagctcttgaagaagctaaaagaaaagagcaagctgtcaaggaagaaaagttaaggcaggaaagagcccagcaagaagcagaggctaggcagaaggaagctgcaaagttagcagctgaagcgcgaaaaacagcatttgaggctgctaaaaaggaagcggcagaaaagcaggctgctaaattgagagatgcagcagcaacttcccaatctagtccagatttgcagaataatattgcaggaattcagcaaatatgaccgacaaattgccaaatccataagtaaacttatgccaactactgatagtgtcagagcaagggctagtgagcttattaaagctttagatggacaggattgtccccgtccaatctcttgttgtctatttgcaaacaagattatttctattgtcaagagtagaaatacaaaggacagaaccttcggaaatttggcctttgcgtgtggatatgtcatgctattagtcacaaatcaggtaccagatgcaatggactatcttttagctgagttcaacagagtttgcatatacacggttccaaagcatttgcatgctttaaataagcacgaaatagagattattacagactgataggttaccaggaagaaaatggacaattcgagagcactgaaagttatctaacatatgtcgttgcatatgtcaaattgtacgcggcaatgattcaaacagaaatcaagggtgtacgccatcctcatggcttagctgagggatggaaatggctcgccatgttcctcaattctcttccagctactacagccactgcttgtgcccttcacgccttcctcaagatggctggttttgcacttcacaagaaatatggatcgcagttcatgaaaatcctatatgtgatttcacggtactttttaccggctttgaaggaacaaggcaacaagatgcaggctgaggctgtcaacaatctacagaattatctgaacgacaagatctacctggaggaaccagaagggcagtacctcgtccagcaattactatcgaaagagttgttcatgtaaagttcaaaacaccagatcgtgtgattgactctgaagggcgcacctcgtataagctactactatcgaaagagctgttcgtgtttcagaaacgcaagcgagccttgtagagatgacctgcaaggaaatcagtaccaaatctccccaacatttgtagtcttaaccgtagaggagatgaccctgcatgaaatatattgaatattatttgtacgtgctattaccttagtgtttgaaattattgattatttatttttaactcttcatttatcaaattggcataatttaattcacatgtatatttacgatatttatgctttccttgtttggcaacatgtccatttattttttccctattt

SEQ ID NO: 11560 - DNA, 1833 bp, Zea Mays
gcaagctctccctctcgctctccctctgcggtgcggcaccgccgatcccctcgccgtcgattcatatcacccctttcgattcaagcgacgccgcggccgccggccatcgcatagtgattcagaggatgaattagatggccaagttaccccatacaacttaatggagaaaagggacctagcgaagagcattcttcttgagcttgaaagcgagcatcatctaaaagttcaagaagaagttagaagtaagctagctttgttggaggtatgccaccaaaatgaaatccatagaaccatttctgcatttgcccgacttcagaaatatgcagaatcaagaaaagagatcgacagaagacttgatgtacacttccagagaagaatggcagaagtactcgataagcacttatctatggtccaaagggatcatgaacaaaaatcccagattgttgaacgtcgaataagagatgatgcagctcttgaagaagctaaaagaaaagagcaagctgtcaaggaagaaaagttaaggcaggaaagagcccagcaagaagcagaggctaggcagaaggaagctgcaaagttagcagctgaagcgcgaaaaacagcatttgaggctgctaaaaaggaagcggcagaaaagcaggctgctaaattgagagatgcagcagcaacttcccaatctagtccagatttgcagaataatattgcagacatcaaagtttttggcgttaaatatgcattagaagcagagtcacggaggtatgcattagtacagaatcaagtgccagaaaacattcatcacaacaaggaattcagcaaatatgaccgacaaattgccaaatccataagtaaacttatgccaactactgatagtgtcagagcaagggctagtgagcttattaaagctttagatggacaggattgtccccgtccaatctcttgttgtctatttgcaaacaagattatttctattgtcaagagtagaaatacaaaggacagaaccttcggaaatttggcctttgcgtgtggatatgtcatgctattagtcacaaatcaggtaccagatgcaatggactatcttttagctgagttcaacagagtttgcatatacacggttccaaagcatttgcatgctttaaatacagaaatcaagggtgtacgccatcctcatggcttagctgagggatggaaatggctcgccatgttcctcaattctcttccagctactacagccactgcttgtgcccttcacgccttcctcaagatggctggttttgcacttcacaagaaatatggatcgcagttcatgaaaatcctatatgtgatttcacggtactttttaccggctttgaaggaacaaggcaacaagatgcaggctgaggctgtcaacaatctacagaattatctgaacgacaagatctacctggaggaaccagaagggcagtacctcgtccagcaattactatcgaaagagttgttcatgtaaagttcaaaacaccagatcgtgtgattgactctgaagggcgcacctcgtataagctactactatcgaaagagctgttcgtgtttcagaaacgcaagcgagccttgtagagatgacctgcaaggaaatcagtaccaaatctccccaacatttgtagtcttaaccgtagaggagatgaccctgcatgaaatatattgaatattatttgtacgtgctattaccttagtgtttgaaattattgattatttatttttaactcttcatttatcaaattggcataatttaattcacatgtatatttacgatatttatgctttccttgtttggcaacatgtccatttattttttccctattt

SEQ ID NO: 11561 - DNA, 2534 bp, Zea Mays
cttctagttctagcggccagcgggcaagctctccctctcgctctccctctgcggtgcggcaccgccgatcccctcgccgtcgattcatatcacccctttcgattcaagcgacgccgcggccgccggccatcgcataggggcttcgagcgtgtggagctgcgttgccccagggacctggacccgcgcccgagctggacgctcggcgacgtgctcgccgagctcgacgcgctagacgccacccgccgcgctgcgccgcccacgcccctgaagcagccgccccattgggttaacggcgtcggtacgagggagaaggcatttgtgatgcgggttgatggctacgacgaagacgacttagaagatgaagacgatggtacaagtgctgggaagtcccgggctctcatggctaaaggagcaaggttctcgtgtaacgatctccaatcaagtgattcagaggatgaattagatggccaagttaccccatacaacttaatggagaaaagggacctagcgaagagcattcttcttgagcttgaaagcgagcatcatctaaaagttcaagaagaagttagaagtaagctagctttgttggaggtatgccaccaaaatgaaatccatagaaccatttctgcatttgcccgacttcagaaatatgcagaatcaagaaaagagatcgacagaagacttgatgtacacttccagagaagaatggcagaagtactcgataagcacttatctatggtccaaagggatcatgaacaaaaatcccagattgttgaacgtcgaataagagatgatgcagctcttgaagaagctaaaagaaaagagcaagctgtcaaggaagaaaagttaaggcaggaaagagcccagcaagaagcagaggctaggcagaaggaagctgcaaagttagcagctgaagcgcgaaaaacagcatttgaggctgctaaaaaggaagcggcagaaaagcaggctgctaaattgagagatgcagcagcaacttcccaatctagtccagatttgcagaataatattgcagacatcaaagtttttggcgttaaatatgcattagaagcagagtcacggaggtatgcattagtacagaatcaagtgccagaaaacattcatcacaacaaggaattcagcaaatatgaccgacaaattgccaaatccataagtaaacttatgccaactactgatagtgtcagagcaagggctagtgagcttattaaagctttagatggacaggattgtccccgtccaatctcttgttgtctatttgcaaacaagattatttctattgtcaagagtagaaatacaaaggacagaaccttcggaaatttggcctttgcgtgtggatatgtcatgctattagtcacaaatcaggtaccagatgcaatggactatcttttagctgagttcaacagagtttgcatatacacggttccaaagcatttgcatgctttaaatgtaagtctgcatggtatgactctgtaatatatttggaatttgtttatttctgactcttatatgggatgccatgagaaaacgccctaatagacacagcaatgctcagaattatttataatgcatttttaacaattgtatgcagcagatttgtggaccaaaatgctgtgacatactgtcacccactgttttatataaatgtatcgagctttggatttttttctcacgatatctgtaattttataggcagaagcacgaaatagagattattacagactgataggttaccaggaagaaaatggacaattcgagagcactgaaagttatctaacatatgtcgttgcatatgtcaaattgtacgcggcaatgattcaaacagaaatcaagggtgtacgccatcctcatggcttagctgagggatggaaatggctcgccatgttcctcaattctcttccagctactacagccactgcttgtgcccttcacgccttcctcaagatggctggttttgcacttcacaagaaatatggatcgcagttcatgaaaatcctatatgtgatttcacggtactttttaccggctttgaaggaacaaggcaacaagatgcaggctgaggctgtcaacaatctacagaattatctgaacgacaagatctacctggaggaaccagaagggcagtacctcgtccagcaattactatcgaaagagttgttcatgtaaagttcaaaacaccagatcgtgtgattgactctgaagggcgcacctcgtataagctactactatcgaaagagctgttcgtgtttcagaaacgcaagcgagccttgtagagatgacctgcaaggaaatcagtaccaaatctccccaacatttgtagtcttaaccgtagaggagatgaccctgcatgaaatatattgaatattatttgtacgtgctattaccttagtgtttgaaattattgattatttatttttaactcttcatttatcaaattggcataatttaattcacatgtatatttacgatatttatgctttccttgtttggcaacatgtccatttattttttccctattt

SEQ ID NO: 11562 - DNA, 2502 bp, Zea Mays
cgcttctagttctagcggccagcgggcaagctctccctctcgctctccctctgcggtgcggcaccgccgatcccctcgccgtcgattcatatcacccctttcgattcaagcgacgccgcggccgccggccatcgcatagcttcaatccatcggggggttcctttcagttaataagatcgatttgaaaagcgcacccggcaacctgctccgctcctgcgctgtttaggttccggcctgtgtcaaagcgtgcatctcacgcgaggcgcaccaaggccggagccctggccacctagggtcacctccctgcgatcgggccgcggcgacggggacggccgcgatgggcttcgagcgtgtggagctgcgttgccccagggacctggacccgcgcccgagctggacgctcggcgacgtgctcgccgagctcgacgcgctagacgccacccgccgcgctgcgccgcccacgcccctgaagcagccgccccattgggttaacggcgtcggtacgagggagaaggcatttgtgatgcgggttgatggctacgacgaagacgacttagaagatgaagacgatggtacaagtgctgggaagtcccgggctctcatggctaaaggagcaaggttctcgtgtaacgatctccaatcaagtggttttagtgattcagaggatgaattagatggccaagttaccccatacaacttaatggagaaaagggacctagcgaagagcattcttcttgagcttgaaagcgagcatcatctaaaagttcaagaagaagttagaagtaagctagctttgttggaggtatgccaccaaaatgaaatccatagaaccatttctgcatttgcccgacttcagaaatatgcagaatcaagaaaagagatcgacagaagacttgatgtacacttccagagaagaatggcagaagtactcgataagcacttatctatggtccaaagggatcatgaacaaaaatcccagattgttgaacgtcgaataagagatgatgcagctcttgaagaagctaaaagaaaagagcaagctgtcaaggaagaaaagttaaggcaggaaagagcccagcaagaagcagaggctaggcagaaggaagctgcaaagttagcagctgaagcgcgaaaaacagcatttgaggctgctaaaaaggaagcggcagaaaagcaggctgctaaattgagagatgcagcagcaacttcccaatctagtccagatttgcagaataatattgcagacatcaaagtttttggcgttaaatatgcattagaagcagagtcacggaggtatgcattagtacagaatcaagtgccagaaaacattcatcacaacaaggaattcagcaaatatgaccgacaaattgccaaatccataagtaaacttatgccaactactgatagtgtcagagcaagggctagtgagcttattaaagctttagatggacaggattgtccccgtccaatctcttgttgtctatttgcaaacaagattatttctattgtcaagagtagaaatacaaaggacagaaccttcggaaatttggcctttgcgtgtggatatgtcatgctattagtcacaaatcaggtaccagatgcaatggactatcttttagctgagttcaacagagtttgcatatacacggttccaaagcatttgcatgctttaaatgcagaagcacgaaatagagattattacagactgataggttaccaggaagaaaatggacaattcgagagcactgaaagttatctaacatatgtcgttgcatatgtcaaattgtacgcggcaatgattcaaacagaaatcaagggtgtacgccatcctcatggcttagctgagggatggaaatggctcgccatgttcctcaattctcttccagctactacagccactgcttgtgcccttcacgccttcctcaagatggctggttttgcacttcacaagaaatatggatcgcagttcatgaaaatcctatatgtgatttcacggtactttttaccggctttgaaggaacaaggcaacaagatgcaggctgaggctgtcaacaatctacagaattatctgaacgacaagatctacctggaggaaccagaagggcagtacctcgtccagcaattactatcgaaagagttgttcatgtaaagttcaaaacaccagatcgtgtgattgactctgaagggcgcacctcgtataagctactactatcgaaagagctgttcgtgtttcagaaacgcaagcgagccttgtagagatgacctgcaaggaaatcagtaccaaatctccccaacatttgtagtcttaaccgtagaggagatgaccctgcatgaaatatattgaatattatttgtacgtgctattaccttagtgtttgaaattattgattatttatttttaactcttcatttatcaaattggcataatttaattcacatgtatatttacgatatttatgctttccttgtttggcaacatgtccatttattttttccctattt

SEQ ID NO: 11563 - DNA, 2510 bp, Zea Mays
aaaaacctcaagccccccgcttctagttctagcggccagcgggcaagctctccctctcgctctccctctgcggtgcggcaccgccgatcccctcgccgtcgattcatatcacccctttcgattcaagcgacgccgcggccgccggccatcgcatagcttcaatccatcggggggttcctttcagttaataagatcgatttgaaaagcgcacccggcaacctgctccgctcctgcgctgtttaggttccggcctgtgtcaaagcgtgcatctcacgcgaggcgcaccaaggccggagccctggccacctagggtcacctccctgcgatcgggccgcggcgacggggacggccgcgatgggcttcgagcgtgtggagctgcgttgccccagggacctggacccgcgcccgagctggacgctcggcgacgtgctcgccgagctcgacgcgctagacgccacccgccgcgctgcgccgcccacgcccctgaagcagccgccccattgggttaacggcgtcggtacgagggagaaggcatttgtgatgcgggttgatggctacgacgaagacgacttagaagatgaagacgatggtacaagtgctgggaagtcccgggctctcatggctaaaggagcaaggttctcgtgtaacgatctccaatcaagtgattcagaggatgaattagatggccaagttaccccatacaacttaatggagaaaagggacctagcgaagagcattcttcttgagcttgaaagcgagcatcatctaaaagttcaagaagaagttagaagtaagctagctttgttggaggtatgccaccaaaatgaaatccatagaaccatttctgcatttgcccgacttcagaaatatgcagaatcaagaaaagagatcgacagaagacttgatgtacacttccagagaagaatggcagaagtactcgataagcacttatctatggtccaaagggatcatgaacaaaaatcccagattgttgaacgtcgaataagagatgatgcagctcttgaagaagctaaaagaaaagagcaagctgtcaaggaagaaaagttaaggcaggaaagagcccagcaagaagcagaggctaggcagaaggaagctgcaaagttagcagctgaagcgcgaaaaacagcatttgaggctgctaaaaaggaagcggcagaaaagcaggctgctaaattgagagatgcagcagcaacttcccaatctagtccagatttgcagaataatattgcagacatcaaagtttttggcgttaaatatgcattagaagcagagtcacggaggtatgcattagtacagaatcaagtgccagaaaacattcatcacaacaaggaattcagcaaatatgaccgacaaattgccaaatccataagtaaacttatgccaactactgatagtgtcagagcaagggctagtgagcttattaaagctttagatggacaggattgtccccgtccaatctcttgttgtctatttgcaaacaagattatttctattgtcaagagtagaaatacaaaggacagaaccttcggaaatttggcctttgcgtgtggatatgtcatgctattagtcacaaatcaggtaccagatgcaatggactatcttttagctgagttcaacagagtttgcatatacacggttccaaagcatttgcatgctttaaatgcagaagcacgaaatagagattattacagactgataggttaccaggaagaaaatggacaattcgagagcactgaaagttatctaacatatgtcgttgcatatgtcaaattgtacgcggcaatgattcaaacagaaatcaagggtgtacgccatcctcatggcttagctgagggatggaaatggctcgccatgttcctcaattctcttccagctactacagccactgcttgtgcccttcacgccttcctcaagatggctggttttgcacttcacaagaaatatggatcgcagttcatgaaaatcctatatgtgatttcacggtactttttaccggctttgaaggaacaaggcaacaagatgcaggctgaggctgtcaacaatctacagaattatctgaacgacaagatctacctggaggaaccagaagggcagtacctcgtccagcaattactatcgaaagagttgttcatgtaaagttcaaaacaccagatcgtgtgattgactctgaagggcgcacctcgtataagctactactatcgaaagagctgttcgtgtttcagaaacgcaagcgagccttgtagagatgacctgcaaggaaatcagtaccaaatctccccaacatttgtagtcttaaccgtagaggagatgaccctgcatgaaatatattgaatattatttgtacgtgctattaccttagtgtttgaaattattgattatttatttttaactcttcatttatcaaattggcataatttaattcacatgtatatttacgatatttatgctttccttgtttggcaacatgtccatttattttttccctattt

SEQ ID NO: 11564 - DNA, 1239 bp, Zea Mays
tatgcctgttccatacaactgttgggttttaacttctccaggagtttaaaatgttttcaagctaggtgaaataggaagaagttagaagtaagctagctttgttggaggtatgccaccaaaatgaaatccatagaaccatttctgcatttgcccgacttcagaaatatgcagaatcaagaaaagagatcgacagaagacttgatgtacacttccagagaagaataagtactcgataagcacttatctatggtccaaagggatcatgaacaaaaatcccagattgttgaacgtcgaataagagatgatgcagctcttgaagaagctaaaagaaaagagcaagctgtcaaggaagaaaagttaaggcaggaaagagcccagcaagaagcagaggctaggcagaaggaagctgcaaagttagcagctgaagcgcgaaaaacagcatttgaggctgctaaaaaggaagcggcagaaaagcaggctgctaaattgagagatgcagcagcaacttcccaatctagtccagatttgcagaataatattgcaggctggagttatgtgaagggcgggcctggtgcagtgttagagcctaccgtctgtaatcggaaggtcccgggttcgagccccagcctctgcatattatgcgggtaaggcttggcgcttaaagatacccttccctagactccgcacagtgcgggaagcctacggcaccgggtacgcccctttttttattaggctggagttatgtactggcatcagtcattctgccatatctttttattctaggatctagctacaagataacaaaatatgcaaaatgcaagcttgttctatcaagtatcaaagatacaatttcccagaatctaagaaatcctgctaagtattctgcagcaccagtgtcaaatgtcgttatgcaagcacacacccaaaaatagagggaaatggaagttctggtgctatttgcacatatatcctctctatacacttgtaaaacactgacaattctgtatttgtatgaagtatatcataacttacaaacgttgttattccccagctacactacttgtctgttgtatattttttttttctcgaaagcgcaggagaactgcgcgatattatattaagcatataggggtttctttttgggatcttctgagtttgagccttttcatagaatatggaaatcttgggctcctccaaaaaccaagttttttatgtggttggtcgcacacaggaaggttt

SEQ ID NO: 11565 - DNA, 1905 bp, Zea Mays
gcaagctctccctctcgctctccctctgcggtgcggcaccgccgatcccctcgccgtcgattcatatcacccctttcgattcaagcgacgccgcggccgccggccatcgcatagcttcaatccatcggggggttcctttcagttaataagatcgatttgaaaagcgcacccggcaacctgctccgctcctgcgctgtttaggttccggcctgtgtcaaagcgtgcatctcacgcgaggcgcaccaaggccggagccctggccacctagggtcacctccctgcgatcgggccgcggcgacggggacggccgcgatgggcttcgagcgtgtggagctgcgttgccccagggacctggacccgcgcccgagctggacgctcggcgacgtgctcgccgagctcgacgcgctagacgccacccgccgcgctgcgccgcccacgcccctgaagcagccgccccattgggttaacggcgtcggtacgagggagaaggcatttgtgatgcgggttgatggctacgacgaagacgacttagaagatgaagacgatggtacaagtgctgggaagtcccgggctctcatggctaaaggagcaaggttctcgtgtaacgatctccaatcaagtgattcagaggatgaattagatggccaagttaccccatacaacttaatggagaaaagggacctagcgaagagcattcttcttgagcttgaaagcgagcatcatctaaaagttcaagaagaagttagaagtaagctagctttgttggaggtatgccaccaaaatgaaatccatagaaccatttctgcatttgcccgacttcagaaatatgcagaatcaagaaaagagatcgacagaagacttgatgtacacttccagagaagaatggcagaagtactcgataagcacttatctatggtccaaagggatcatgaacaaaaatcccagattgttgaacgtcgaataagagatgatgcagctcttgaagaagctaaaagaaaagagcaagctgtcaaggaagaaaagttaaggcaggaaagagcccagcaagaagcagaggctaggcagaaggaagctgcaaagttagcagctgaagcgcgaaaaacagcatttgaggctgctaaaaaggaagcggcagaaaagcaggctgctaaattgagagatgcagcagcaacttcccaatctagtccagatttgcagaataatattgcaggctggagttatgtgaagggcgggcctggtgcagtgttagagcctaccgtctgtaatcggaaggtcccgggttcgagccccagcctctgcatattatgcgggtaaggcttggcgcttaaagatacccttccctagactccgcacagtgcgggaagcctacggcaccgggtacgcccctttttttattaggctggagttatgtactggcatcagtcattctgccatatctttttattctaggatctagctacaagataacaaaatatgcaaaatgcaagcttgttctatcaagtatcaaagatacaatttcccagaatctaagaaatcctgctaagtattctgcagcaccagtgtcaaatgtcgttatgcaagcacacacccaaaaatagagggaaatggaagttctggtgctatttgcacatatatcctctctatacacttgtaaaacactgacaattctgtatttgtatgaagtatatcataacttacaaacgttgttattccccagctacactacttgtctgttgtatattttttttttctcgaaagcgcaggagaactgcgcgatattatattaagcatataggggtttctttttgggatcttctgagtttgagccttttcatagaatatggaaatcttgggctcctccaaaaaccaagttttttatgtggttggtcgcacacaggaaggttt

SEQ ID NO: 11566 - DNA, 1878 bp, Zea Mays
cagcgggcaagctctccctctcgctctccctctgcggtgcggcaccgccgatcccctcgccgtcgattcatatcacccctttcgattcaagcgacgccgcggccgccggccatcgcatagttaataagatcgatttgaaaagcgcacccggcaacctgctccgctcctgcgctgtttaggttccggcctgtgtcaaagcgtgcatctcacgcgaggcgcaccaaggccggagccctggccacctagggtcacctccctgcgatcgggccgcggcgacggggacggccgcgatgggcttcgagcgtgtggagctgcgttgccccagggacctggacccgcgcccgagctggacgctcggcgacgtgctcgccgagctcgacgcgctagacgccacccgccgcgctgcgccgcccacgcccctgaagcagccgccccattgggttaacggcgtcggtacgagggagaaggcatttgtgatgcgggttgatggctacgacgaagacgacttagaagatgaagacgatggtacaagtgctgggaagtcccgggctctcatggctaaaggagcaaggttctcgtgtaacgatctccaatcaagtgattcagaggatgaattagatggccaagttaccccatacaacttaatggagaaaagggacctagcgaagagcattcttcttgagcttgaaagcgagcatcatctaaaagttcaagaagaagttagaagtaagctagctttgttggaggtatgccaccaaaatgaaatccatagaaccatttctgcatttgcccgacttcagaaatatgcagaatcaagaaaagagatcgacagaagacttgatgtacacttccagagaagaataagtactcgataagcacttatctatggtccaaagggatcatgaacaaaaatcccagattgttgaacgtcgaataagagatgatgcagctcttgaagaagctaaaagaaaagagcaagctgtcaaggaagaaaagttaaggcaggaaagagcccagcaagaagcagaggctaggcagaaggaagctgcaaagttagcagctgaagcgcgaaaaacagcatttgaggctgctaaaaaggaagcggcagaaaagcaggctgctaaattgagagatgcagcagcaacttcccaatctagtccagatttgcagaataatattgcaggctggagttatgtgaagggcgggcctggtgcagtgttagagcctaccgtctgtaatcggaaggtcccgggttcgagccccagcctctgcatattatgcgggtaaggcttggcgcttaaagatacccttccctagactccgcacagtgcgggaagcctacggcaccgggtacgcccctttttttattaggctggagttatgtactggcatcagtcattctgccatatctttttattctaggatctagctacaagataacaaaatatgcaaaatgcaagcttgttctatcaagtatcaaagatacaatttcccagaatctaagaaatcctgctaagtattctgcagcaccagtgtcaaatgtcgttatgcaagcacacacccaaaaatagagggaaatggaagttctggtgctatttgcacatatatcctctctatacacttgtaaaacactgacaattctgtatttgtatgaagtatatcataacttacaaacgttgttattccccagctacactacttgtctgttgtatattttttttttctcgaaagcgcaggagaactgcgcgatattatattaagcatataggggtttctttttgggatcttctgagtttgagccttttcatagaatatggaaatcttgggctcctccaaaaaccaagttttttatgtggttggtcgcacacaggaaggttt

SEQ ID NO: 11567 - DNA, 794 bp, Zea Mays
agtgagcgtaggcatgggggcacgacatggaagaaattctctactggccatccacacagcattttctggggctctatgacttcaaaagcaagacgcatcaagatgcgtgctgccctgagggtatgtgcagagctgcagtgtttgcgctgcatgtaaaggaagagctggcctcatggcctgagcagagcacccgacagaggacctggctcacggtccctgaagctgcatcaagttgccgataccagtggatgcaagaggccttgctgacaggcttctctgactggcacgacaagtggagcagaggcggcggcggcacaaactgtgacccggcctaactgctgacaggcccatctgcagtcgtccaatttgttcatctcctctctttccctaggcccccaaccttgcagaatgcaataatacagtgtacttgtcttgatgctgggttggtcattgacatgttatcttagttgtagtgggacgaggtacatctcatcaagacgagaattctcacaacttttaagtgtcaattctcgtgccctattatttctcggtttcatccgctgtcgtcgcggtgctgcagcctgcaggcacgcgccgcacgcattttgtaactccgctcctgattctggagatgcatatgctatatgtatgaactggtataactttgaaatcaaaagttgccactgttgactcgagtcgccatgcggtgcgtgcgtccagagaacctcgcaatctgtttgtctaaggctggctggggaggcagccgggttatcaaaccccatttttagtctcgg

SEQ ID NO: 11568 - DNA, 994 bp, Zea Mays
gtattgttgtaattgtcgctgataacaaaaggccatgaatcagtgctcataacccagatgcataccatttaggtatagagctaacaatgatgaaacctctggtgacaaaactaagaaactcgtggaagttctcatgataaattcccaaagcggacctggtcttttgtttccaaagggaggatgggagaatgatgaaactgttgaagaggcagcagctcgagaagctatagaagaagctggagttcgaggtgatatagtgcattttctggggctctatgacttcaaaagcaagacgcatcaagatgcgtgctgccctgagggtatgtgcagagctgcagtgtttgcgctgcatgtaaaggaagagctggcctcatggcctgagcagagcacccgacagaggacctggctcacggtccctgaagctgcatcaagttgccgataccagtggatgcaagaggccttgctgacaggcttctctgactggcacgacaagtggagcagaggcggcggcggcacaaactgtgacccggcctaactgctgacaggcccatctgcagtcgtccaatttgttcatctcctctctttccctaggcccccaaccttgcagaatgcaataatacagtgtacttgtcttgatgctgggttggtcattgacatgttatcttagttgtagtgggacgaggtacatctcatcaagacgagaattctcacaacttttaagtgtcaattctcgtgccctattatttctcggtttcatccgctgtcgtcgcggtgctgcagcctgcaggcacgcgccgcacgcattttgtaactccgctcctgattctggagatgcatatgctatatgtatgaactggtataactttgaaatcaaaagttgccactgttgactcgagtcgccatgcggtgcgtgcgtccagagaacctcgcaatctgtttgtctaaggctggctggggaggcagccgggttatcaaaccccatttttagtctcgg

SEQ ID NO: 11569 - DNA, 1117 bp, Zea Mays
attcgattgggttggggccgatggctacgtgcttattgccctccttgacctaaatgcggcgccggcgctgtgcgcgtcttattcctcgccagcgtacggcgcgctagcattggttttggcgttggggatcgttgcggtgtggtggtgtgccaccggggctggattgttttgtttgttgagatgcataccatttaggtatagagctaacaatgatgaaacctctggtgacaaaactaagaaactcgtggaagttctcatgataaattcccaaagcggacctggtcttttgtttccaaagggaggatgggagaatgatgaaactgttgaagaggcagcagctcgagaagctatagaagaagctggagttcgaggtgatatagtgcattttctggggctctatgacttcaaaagcaagacgcatcaagatgcgtgctgccctgagggtatgtgcagagctgcagtgtttgcgctgcatgtaaaggaagagctggcctcatggcctgagcagagcacccgacagaggacctggctcacggtccctgaagctgcatcaagttgccgataccagtggatgcaagaggccttgctgacaggcttctctgactggcacgacaagtggagcagaggcggcggcggcacaaactgtgacccggcctaactgctgacaggcccatctgcagtcgtccaatttgttcatctcctctctttccctaggcccccaaccttgcagaatgcaataatacagtgtacttgtcttgatgctgggttggtcattgacatgttatcttagttgtagtgggacgaggtacatctcatcaagacgagaattctcacaacttttaagtgtcaattctcgtgccctattatttctcggtttcatccgctgtcgtcgcggtgctgcagcctgcaggcacgcgccgcacgcattttgtaactccgctcctgattctggagatgcatatgctatatgtatgaactggtataactttgaaatcaaaagttgccactgttgactcgagtcgccatgcggtgcgtgcgtccagagaacctcgcaatctgtttgtctaaggctggctggggaggcagccgggttatcaaaccccatttttagtctcgg

SEQ ID NO: 11570 - DNA, 1429 bp, Zea Mays
atagaaaatgatattttatagtggtagtggggtatagggggagtatttagggggaaccgctgcgggagatggaaaaatatggggaaaaatagggggaaaagtgatatagggggaaaaatttaggggtaacggttgcggatagcctaactagcgattagcgaaaagaagaggacaagtcatcaagccccacgggccacggcgaacaaacagacatataggcagtacaaaagtgaggaaaaaaaacgaaaaaaaaacagggcgccctcacggcgaactcccacctcctatcgcccctcacctctcctttctctctctagccccgcacaaatctctcctcccctctcgccctcgccgcattgcccgccgacgaccccccggcccccgccggatagagaggaggaggagcggcgcggctgcgggagagccgggcggcggcggcggagcgggcttcatgtgcgacctagtggcccgcacgggccggcatcagcagcgatgcataccatttaggtatagagctaacaatgatgaaacctctggtgacaaaactaagaaactcgtggaagttctcatgataaattcccaaagcggacctggtcttttgtttccaaagggaggatgggagaatgatgaaactgttgaagaggcagcagctcgagaagctatagaagaagctggagttcgaggtgatatagtgcattttctggggctctatgacttcaaaagcaagacgcatcaagatgcgtgctgccctgagggtatgtgcagagctgcagtgtttgcgctgcatgtaaaggaagagctggcctcatggcctgagcagagcacccgacagaggacctggctcacggtccctgaagctgcatcaagttgccgataccagtggatgcaagaggccttgctgacaggcttctctgactggcacgacaagtggagcagaggcggcggcggcacaaactgtgacccggcctaactgctgacaggcccatctgcagtcgtccaatttgttcatctcctctctttccctaggcccccaaccttgcagaatgcaataatacagtgtacttgtcttgatgctgggttggtcattgacatgttatcttagttgtagtgggacgaggtacatctcatcaagacgagaattctcacaacttttaagtgtcaattctcgtgccctattatttctcggtttcatccgctgtcgtcgcggtgctgcagcctgcaggcacgcgccgcacgcattttgtaactccgctcctgattctggagatgcatatgctatatgtatgaactggtataactttgaaatcaaaagttgccactgttgactcgagtcgccatgcggtgcgtgcgtccagagaacctcgcaatctgtttgtctaaggctggctggggaggcagccgggttatcaaaccccatttttagtctcgg

SEQ ID NO: 11571 - DNA, 1644 bp, Zea Mays
ccgccacgtgcgaagcgcaagcgctccatctgtcgccggtcccgaacctcccccaacggcgcccgccgctcccagcaccgacatcgccgcagctggattacgtccgctcccgctggctcctgggtccagggggttggacccgagtacccgacaccttctaggtccacgcgtcattggcccatacccatgtgggcgtggatttggaccgcggtggacgacggctggacgccttttccaccgaaaaccagcccggccgcccggcggcgaggaggaatccccattccccccctcctcacgcacgctcctcgccatctttagcctggaccccacctcccgtgccccggccattaaagcgggggacgccgacccgggctctccctgcctcctcgtcccgtccctcccagcgccccgttccattcgaccgccgaccagatccacccccaacacgtccagccatgccggcgccgccgcatccaacgccgctgctgccaccggcgggggagccgttccgcgtgttcgtggggtacgacccgcgggagcacgaggcgtacgaggtgtgccgccgcagcctgctccggcgctcatcgatcccgcttgacgtgcgcccgatccggcaggcggagctgcgcgccgcggggctgtacacccgggcgcgcggccccacggagagcaccgagttctccttcacgcgcttcctcaccccgtacctggcggggtaccgcggctgggcgctcttcgtcgactgcgacttcctctacctggcggacctggccgacctcctcgccgccgcggccgccgccgaccgcgcggccggcgccggccgcattgccgtcgcctgcgtgaagcacgagtaccagcccgccgaggccaccaagatggacggcgccatccagacggtgtacccgcgcaagaactggtcctccatggtgctctacaactgcggccaccccaagaacgtggccgcgctcactccggaggccgtcagcacccagacgggtgccttcctccaccgcttcgcctggctcgacgacgacgagatcggggaggtgcccttcgcctggaacttcctcgtgggccacaaccgggtcgacccggccgacccggccacgcgccccagggccatccactacacctccggcgggccgtggttcgagcgctacagggactgcgagttcgccgacctctggctcaaggaggccgaggagctgagggccgacaaggacaaggaaaacgacaagctcaagctcctcaaggacatggacgacgccaacggcaagcaggaggtggaggaagagacggcgcaggagaaggagaaggagaagggcaagtgatggtggtattcatccatggatcggtggtgctgcattgtgtggaagtggattggacctgtcggctgtcggtgcgtggagacgatccaagtctctctcgacctctcgtatgagtcaagacagctgggaacgtggaagtctctctcggaacagctcctctcatgtgtattgggctgtcgggcctcgccttctcataaggccagaatcgtcttcaccgtaggagtacatggtgatggaattgtatggtttactctcgatgacctacctgcgtactgcatatagcgttaagcattgaaatcatgctactatattatac

SEQ ID NO: 11572 - DNA, 1659 bp, Zea Mays
cggcggtctgcgacccgccacgtgcgaagcgcaagcgctccatctgtcgccggtcccgaacctcccccaacggcgcccgccgctcccagcaccgacatcgccgcagctggattacgtccgctcccgctggctcctgggtccagggggttggacccgagtacccgacaccttctaggtccacgcgtcattggcccatacccatgtgggcgtggatttggaccgcggtggacgacggctggacgccttttccaccgaaaaccagcccggccgcccggcggcgaggaggaatccccattccccccctcctcacgcacgctcctcgccatctttagcctggaccccacctcccgtgccccggccattaaagcgggggacgccgacccgggctctccctgcctcctcgtcccgtccctcccagcgccccgttccattcgaccgccgaccagatccacccccaacacgtccagccatgccggcgccgccgcatccaacgccgctgctgccaccggcgggggagccgttccgcgtgttcgtggggtacgacccgcgggagcacgaggcgtacgaggtgtgccgccgcagcctgctccggcgctcatcgatcccgcttgacgtgcgcccgatccggcaggcggagctgcgcgccgcggggctgtacacccgggcgcgcggccccacggagagcaccgagttctccttcacgcgcttcctcaccccgtacctggcggggtaccgcggctgggcgctcttcgtcgactgcgacttcctctacctggcggacctggccgacctcctcgccgccgcggccgccgccgaccgcgcggccggcgccggccgcattgccgtcgcctgcgtgaagcacgagtaccagcccgccgaggccaccaagatggacggcgccatccagacggtgtacccgcgcaagaactggtcctccatggtgctctacaactgcggccaccccaagaacgtggccgcgctcactccggaggccgtcagcacccagacgggtgccttcctccaccgcttcgcctggctcgacgacgacgagatcggggaggtgcccttcgcctggaacttcctcgtgggccacaaccgggtcgacccggccgacccggccacgcgccccagggccatccactacacctccggcgggccgtggttcgagcgctacagggactgcgagttcgccgacctctggctcaaggaggccgaggagctgagggccgacaaggacaaggaaaacgacaagctcaagctcctcaaggacatggacgacgccaacggcaagcaggaggtggaggaagagacggcgcaggagaaggagaaggagaagggcaagtgatggtggtattcatccatggatcggtggtgctgcattgtgtggaagtggattgggacctgtcggctgtcggtgcgtggagacgatccaagtctctctcgacctctcgtatgagtcaagacagctgggaacgtggaagtctctctcggaacagctcctctcatgtgtattgggctgtcgggcctcgccttctcataaggccagaatcgtcttcaccgtaggagtacatggtgatggaattgtatggtttactctcgatgacctacctgcgtactgcatatagcgttaagcattgaaatcatgctactatattatac

SEQ ID NO: 11573 - DNA, 2421 bp, Zea Mays
aaaaaatccttatgaaacgagttgtcccgatcaagccaatatcacacccaaatcccgcaaaaccctaagccaagcagggagggagaagacgcgaggagagagagagagagaggaggtgcgcggcatggcgggtgcgacgtccctggcggcggccgctaatctggcgggcaagtcgagcgtgcgggtcgtcgtgatcggcgaccccggcaccggcaagtccagcctcatcgtcgccctcgccaccgagcagttccccgagaacgtaccacgcgtcatgccccccacccgcctccccgccgactacttccccgatcgcgtccccatcactatcatcgacacgtcgtccagcccggagcagaagccgaagttgatcgccgagtgccaggcagccgatgcggtcgtgctcacctacgcctgcgaccggcccgccacactggagcggctcagttcgttctggcttcccgagctccggcgacttcagttgaaggctccagttatcgtggtggggtgcaagctggacctgagggacgaacagcaggttagccttgaacaggttatggcgcccatcatgcagtccttccgcgagattgagacatgcattgagtgctccgctcttcggcagatccaggtgcctgaggtcttctattatgcccagaaggcagtacttcacccaactgctccgctcttcgatcaagagttacaagctctgaagcctcgatgtgtgagagcgttgaagcggatatttattatatgtgataatgacaaggatggtgctctcagtgatgtggagctcaatgaattccaggtccgatgctttaatgctccactccagcctactgaaatttcaggagttaagagagttgttcaggagaagatgcctgaaggcgtaaatgaaagcggccttaccttgactgggttcctttttctgcatgccctctttattgaaaaaggtcgtttggaaactacttggactgtattgaggaaatttggttacgacaatgacatcaagcttagggatgatctcattgcaatgccaattaaaagagctcctgatcaaactctggaaatgacaagcgaagtggtcgatttcttgagagggatattcaacatgtttgacattgataatgatggagctttactacctactgagctggaggaccttttctcaacagcacctgaaaacccatggatttctgatccctataaagactgtgctgaaaagaatgtgttgggtggtctgtcacttgaaggttttctctcaaagtgggctcttatgacacttctagatccaacaaatagttatgccaaccttgcatatgttggttatcctggtgagttcagttctgcatttactgtcacaaggagaagacgagtggatcgtaaaaagcaacatacgcagagaaacattttccagtgttatgtttttggtgccagaggctctggaaagacgtcgttgctacaatcattcattggaaggcaaccttctgacactctgccatctaacagcgaacgctttgcaacaaattctgttgaaatggctgatctgcgatgaatattcatggcaaagagctagagacttgcttgtgcaagtggctacacatggagaaaatactggctacgaagttccttgcttgatagttgctgcaaaagatgatcttgaccaatcttcacaagctctacaagaatcgactagagtgagccaagacatgggaattgaaacaccaattccgatcagcgtgaagctgagagatttgaacaacattttctgcagaatcgtgcatgctgcgcagcagcctcatttgagcattccagagactgaaactggaaaagcacgtcggcaatatcggcaacttctaaaccgttcgctaatggttgtctctgttggagctgctgttgcagttgttggattagctgcttatcgggtttatgcagctcggaagaactcgtcctcttgaagcctcccctactggacaattggggaaataaggcccttccttcctgcgacctcagctggatccatgctggttgaagttcgtcgcttgggtttttacccggcaggaaaccaacgtttttgtacagacatgtcatcagctatgaattatccggccaattggggtttcagattcagacatcacctggctccgtaaaaatgccgtatctgatgatctgttggctaaattggcccagctaattattgttactactagcctaagttcttattattcgaattttttttcgttggcaaacatgctgagacatttagttgaacaagcatgagtttgtgttgtaccttgatttctttcggggatttatcaaatcggaattacctagtcacactgccactgaggcctcgtgcacacggttatactttgtatgaataatttgatatacatgtaaatgcatgcagtcacactttgcttt

SEQ ID NO: 11574 - DNA, 2451 bp, Zea Mays
aaaaaatccttatgaaacgagttgtcccgatcaagccaatatcacacccaaatcccgcaaaaccctaagccaagcagggagggagaagacgcgaggagagagagagagagaggaggtgcgcggcatggcgggtgcgacgtccctggcggcggccgctaatctggcgggcaagtcgagcgtgcgggtcgtcgtgatcggcgaccccggcaccggcaagtccagcctcatcgtcgccctcgccaccgagcagttccccgagaacgtaccacgcgtcatgccccccacccgcctccccgccgactacttccccgatcgcgtccccatcactatcatcgacacgtcgtccagcccggagcagaagccgaagttgatcgccgagtgccaggcagccgatgcggtcgtgctcacctacgcctgcgaccggcccgccacactggagcggctcagttcgttctggcttcccgagctccggcgacttcagttgaaggctccagttatcgtggtggggtgcaagctggacctgagggacgaacagcaggttagccttgaacaggttatggcgcccatcatgcagtccttccgcgagattgagacatgcattgagtgctccgctcttcggcagatccaggtgcctgaggtcttctattatgcccagaaggcagtacttcacccaactgctccgctcttcgatcaagagttacaagctctgaagcctcgatgtgtgagagcgttgaagcggatatttattatatgtgataatgacaaggatggtgctctcagtgatgtggagctcaatgaattccaggtccgatgctttaatgctccactccagcctactgaaatttcaggagttaagagagttgttcaggagaagatgcctgaaggcgtaaatgaaagcggccttaccttgactgggttcctttttctgcatgccctctttattgaaaaaggtcgtttggaaactacttggactgtattgaggaaatttggttacgacaatgacatcaagcttagggatgatctcattgcaatgccaattaaaagagctcctgatcaaactctggaaatgacaagcgaagtggtcgatttcttgagagggatattcaacatgtttgacattgataatgatggagctttactacctactgagctggaggaccttttctcaacagcacctgaaaacccatggatttctgatccctataaagactgtgctgaaaagaatgtgttgggtggtctgtcacttgaaggttttctctcaaagtgggctcttatgacacttctagatccaacaaatagttatgccaaccttgcatatgttggttatcctgtgttatgtttttggtgccagaggctctggaaagacgtcgttgctacaatcattcattggaaggcaaccttctgacactctgccatctaacagcgaacgctttgcaacaaattctgttgaaatggctgatggaactagaaagacgctaatactgcgagagatacctgaaggtgacgtgagatcgttactttctgacagggaatcgttggcgccatgtgatgtagcagtatttgtttacgatagctgcgatgaatattcatggcaaagagctagagacttgcttgtgcaagtggctacacatggagaaaatactggctacgaagttccttgcttgatagttgctgcaaaagatgatcttgaccaatcttcacaagctctacaagaatcgactagagtgagccaagacatgggaattgaaacaccaattccgatcagcgtgaagctgagagatttgaacaacattttctgcagaatcgtgcatgctgcgcagcagcctcatttgagcattccagagactgaaactggaaaagcacgtcggcaatatcggcaacttctaaaccgttcgctaatggttgtctctgttggagctgctgttgcagttgttggattagctgcttatcgggtttatgcagctcggaagaactcgtcctcttgaagcctcccctactggacaattggggaaataaggcccttccttcctgcgacctcagctggatccatgctggttgaagttcgtcgcttgggtttttacccggcaggaaaccaacgtttttgtacagacatgtcatcagctatgaattatccggccaattggggtttcagattcagacatcacctggctccgtaaaaatgccgtatctgatgatctgttggctaaattggcccagctaattattgttactactagcctaagttcttattattcgaattttttttcgttggcaaacatgctgagacatttagttgaacaagcatgagtttgtgttgtaccttgatttctttcggggatttatcaaatcggaattacctagtcacactgccactgaggcctcgtgcacacggttatactttgtatgaataatttgatatacatgtaaatgcatgcagtcacactttgcttt

SEQ ID NO: 11575 - DNA, 2710 bp, Zea Mays
cgcctctcactcttttccccgatgaccagttctcacaaaaggcaggacgcaagcagcagccatatcctccaggtttcatgattcttctcttcatcctctgcttccatcttcctcctttggaactggagaaaggagaggagacaaaaccatccaagcgatccgtttctcccacttgtctcgcgccaccattattgcccgcccaatgggacgccgccgtatcctcgccgcgccatagttttaaccttgcgtccacgcctgcccaagtgcccatcccacttttcttccacgcaaaggattttctctctctctccttttccattttaatactgcacgatctctgatcgattgattcggccgagataactggagccttgtgtttttatttcgggggtcttgtaccaaaatagcgtcgattttatctacttgacccctgacccattctctctctctctctcccttttcaatttcgggggctttatttctctcctcccacgccttgcatcttcttgatgcgttgcgtcccgactcgaggcagacatcggaggcgcgccactgacttagctcgcgatttctagatccgcaaccctgcgctgctcaactccgattcttttagttcggattcgggtagcagcagggcttcggtggcgatgacttgattgatacgaattggggatttcttgctgtttgcgcctctcttcgtatcggcgctgaagggctcagctcgagattagaacaatttgggttttggggtcttttcttcttctactactgctggtcaagttcacagaaatcgctggctccgtggtccaatggacgagtccggggaagcgagcgtcggctccttcaggatcgggccgtcgacgctgctgggccgcggggtggcgttccgcgtgctcctcttcagctcgctgtggcgcctgcgggcgcgcgcgtacgcggccatctcgcgcgtgcgcagcgcggcgctgccggtggcggcgtcctggctgcacctcaggaacagccacggcgtcctcctcatggccgtgctcctcgccctcttcctgaggaaactctcggccgcgcggtcgcgggcggcgctcgcgcgccggcgcaggcagcacgagaaggccatgctgcatgccgggacgtacgaggtctgggcgcgcgccgccaaggtgctcgacaagatgtctgagcaggtccacgaggcggatttctacgacgaggagctcatcaggaataggctcgaggaactccggagacggagggaggacgggtcgctccgggacgtggtgttctgtatgcgcggcgatcttgttaggaacttggggaacatgtgcaaccctgaacttcacaagggcaggctagagcttgctcgtcttgctgaaatggaggttaagtatcgatgcaaccaaatcctagagatcggtcttccaatgggaggacttgcaaaattgtttgcccaggattgggagggtgatgtgaccatggttatgccagcaacacttgctcagtacttgaagatcattcagaatccaacatacgcggagctccaaatggctgccaaccaaggccgcaggtgcacatgggagaagctctccgcaatcagagcgaactgcgccattgaacttgcacttgacgaatccatagcggttctaaaccacaaacggaggctaaaacgaagcatggagaggacggcggcggcttcgcagggtcactctaactatgtccgacccaagactccgaggaggataccgtcatggagccgcatcagtcgagagaactctttggagtctctctcggaagagatctctgcggttgctgcttcgtccatgcagcaaggcgctgctcttgttgtcggcgcaccaccaacgactctttctcagcatgttcggcgcagttctcatgacggaagtgagagtgagtcagaaaccattgaccttaattcctggaccaggagtggagggcctctaatgaggacagcgtccgccgacaggttcatcagtttcatccataacattgagattgacacagaattaagtaggccctgtgctgtggaaggtgatgctgcaggtattttgtcagaatctaccttcccaaacggtccacgaccgaacaatagctcaagtgttagtatgccaggtagatgcacagaaaattctgggaccgagtcgtgcaacactgtcaacaccagagcttctactcccacaagcatggctgttcgtgaaggagatttgctgccgcctgaaagcactactgataatgtcctacttaacattgtgaaaagagacgccctgcaggatggtgtaactgaattggcggaaagctcctgcgctgaaggatatgcggcaaactgtgacaccgtctcagggctagactgctgaaggtaacaagacgctcgctgctgacttgagcaatcaacaattagctgatgattagattcttcttgattttgatgatgaaaggtcatttatatgtagctcactacagcaacgcagtgtaggaaaattgtacctgctcgatttaaactttaaagagcatgccatgagtagctttgttaatgttaatattcacatccattgtggaattgttggttgatgcatttcttagcacgtcgagcaaccatatcacagcatgccatgagttcggcactggtacttggaatgtccaaatcatctgttcgctacatgtaacatgcagtggtttattagtcttgcagacacttcat

SEQ ID NO: 11576 - DNA, 823 bp, Zea Mays
ccaggccgttccaggccaaaccgaaccaggccttaatcccattcgatttccatgaaaccgaacaagggcttaatagtcagcgcatcgcaggttagtgattacaaactgggtgaggagggggattacatctggtatttctatttacgatttacatgctacaatctacaacatataaggaactgcttacagttgattctggactgcaaaattgtgttatgatgccatgattagagctgatttggtgaccagcgatcacggaaaattagagggaattgaggaggaaattagttcatttccccctcaatccccttcaaaccttccgtgatccacttgtcatgttgttggatcacttgtcatgttgttgagaaaccaagtttccagaatgatgtagctggaagatgaatactttgctcacctcgagcagtaactaaccctttctcagctgtagcctgatagggcgccgtaaatccatgattgaagaatgctctatttcctagcttccccttcaattgtgaagtgacaaaagaatacgaccttggtgctgaacagagggatttctgagtgacaaaaaaatgctgtgacaaactcttcttttaaaagaggttcatcagagtgaatgcatagcagtcatgtttcagtgagaagtatttgagattcccatggtattgtagctatgtgatgcagcagagatcatatctcttgactcatgtaaaatacatgttgcttttgttggaacaatggcatcttgattcggcgaaatgaagcacagcgatctttcttcaatggaatcaatttaccagaaaataaactagcgatgatccag

SEQ ID NO: 11577 - DNA, 1529 bp, Zea Mays
gttgattattgatagcaatctatggtgactcatattgaggatctgaaacttaggagtcaatctaatttaaattttggttccatactcatcatggctttgcaagattctggtggccacacaaacaaagagacccatggtaatcgtgttgaaggaaaacatggcaacgggcatgaaatttttccatcttctgaccttgttcgcaagagcaaaaggattcccaagaagaaaacacttgacggagattctgatgatgaagatggtgaattacgctatctggaaaaactcaaaggggctaaagttgcaccagatcctgtgaacactagccataaaggttatgattttggtgatgatgctctcaagaaaaagaagctatccaagctttctagaaacaagagcaccccatatgaagtggacgacgacttcagaatgtctcgatctggcagggatggtaggaagaagttgaatttaggggatgacaatgagtttatagaagaggaggaatctgagatggatgaaacgaatgggctaaaggaacctgattcacctcaaggtgtgaagattgaaacccctggtcttacaacaagacagcgagcccttcaaggcaggggtggcaatggtgaaagctttattgagtttcctgatggattaccagcagcttcatcaagaaagcaaaaggagaagctctcagatatggagatacaagccaaaaaggcagaagctgcgctgaggcgcaagatgcaagttgagaaggcagagaaagaacagcaggctgaagcgatgaggaagatactgggaatagattctgagaagaaaaaggaagagaagaagctgaaagaacgagaagagagggaaaaacaggcaagattggaagaatacaggaaaaactgcgtccagactgtcatgggcccaactgggactgtgattacattccctgagagcatggggcttccgagtatatttaactccaaacctgtcagctatccgcctccgagggagaagtgtgcaggcccatcgtgcacaaacccgtacaagtaccgccactccaagactctggtccctctctgcagccttgcttgctataaggccgtcgaggaccgtcctcctgcccaggggagtgaaggtggtggtggccagggaagcgatgctgggcagggaactgatgccgcccaggagagtgctgggaagcaagcatgatgaatctagctgcctgacgcgattcaaccgtgaccgtcagttggctggagaagtgtaatgtcgacatggccagctcgctggtgtgttgttttcttggtctctcctctggtagtgtgtcgtctaacaaccaatcaacctgacaaaagataggtgtgtgactgccggtttccttctgcccgtcgtgaaccaagccgggcttcgtaatggtggattggatcgagtttaaaacctatggtgtggtcggttcgatgtatgagactactctagtcgagaaatatgaagggaaacaaggtcgtgggagacctcgggctgtgggcgtctttttcgggttcctc

SEQ ID NO: 11578 - DNA, 2087 bp, Zea Mays
gtttgctgcggctcccgtgccgcgctctcgctctctatctgcgaggtagcagagttgcttgcgtgcgaaggccgcttggtctggagttaagcgcgtgttgtaatggaggggcgtgggaaccctccgcacaccaccactgatgctgtgatcaagaagccaaggagcgtcgcatccaggaagccaaggtccacggagcagctcacgtatgagtacaatggcatttgcccgccatcttggagcgctccccatgacgatgacactggcgttggagctggtggacatcggaggaaagagctacacctaaatagccctgaaatgaagggctccatggctcataggagcgacgtgcccaggaagataaggagggatgatagatctggaggcgaccatgatggccatggtcggagcagcaaagcaaaggatgctgccaagcatggaagtgaaaatgttcttgccctagagtgcacagcaagaaacaatggatcccctgataacccacagttggtccccagagatgactctatgccttgtgaaaataggtcgagaaaagtaaagctcaaagttgttagtcgaaccctacatgccaaaaatggccaggatgctggtggcagtggtattcctgccacgttggatggctctattcatcagtacaagcaaaaggattctggtggccacacaaacaaagagacccatggtaatcgtgttgaaggaaaacatggcaacgggcatgaaatttttccatcttctgaccttgttcgcaagagcaaaaggattcccaagaagaaaacacttgacggagattctgatgatgaagatggtgaattacgctatctggaaaaactcaaaggggctaaagttgcaccagatcctgtgaacactagccataaaggttatgattttggtgatgatgctctcaagaaaaagaagctatccaagctttctagaaacaagagcaccccatatgaagtggacgacgacttcagaatgtctcgatctggcagggatggtaggaagaagttgaatttaggggatgacaatgagtttatagaagaggaggaatctgagatggatgaaacgaatgggctaaaggaacctgattcacctcaaggtgtgaagattgaaacccctggtcttacaacaagacagcgagcccttcaaggcaggggtggcaatggtgaaagctttattgagtttcctgatggattaccagcagcttcatcaagaaagcaaaaggagaagctctcagatatggagatacaagccaaaaaggcagaagctgcgctgaggcgcaagatgcaagttgagaaggcagagaaagaacagcaggctgaagcgatgaggaagatactgggaatagattctgagaagaaaaaggaagagaagaagctgaaagaacgagaagagagggaaaaacaggcaagattggaagaatacaggaaaaactgcgtccagactgtcatgggcccaactgggactgtgattacattccctgagagcatggggcttccgagtatatttaactccaaacctgtcagctatccgcctccgagggagaagtgtgcaggcccatcgtgcacaaacccgtacaagtaccgccactccaagactctggtccctctctgcagccttgcttgctataaggccgtcgaggaccgtcctcctgcccaggggagtgaaggtggtggtggccagggaagcgatgctgggcagggaactgatgccgcccaggagagtgctgggaagcaagcatgatgaatctagctgcctgacgcgattcaaccgtgaccgtcagttggctggagaagtgtaatgtcgacatggccagctcgctggtgtgttgttttcttggtctctcctctggtagtgtgtcgtctaacaaccaatcaacctgacaaaagataggtgtgtgactgccggtttccttctgcccgtcgtgaaccaagccgggcttcgtaatggtggattggatcgagtttaaaacctatggtgtggtcggttcgatgtatgagactactctagtcgagaaatatgaagggaaacaaggtcgtgggagacctcgggctgtgggcgtctttttcgggttcctc

SEQ ID NO: 11579 - DNA, 2088 bp, Zea Mays
ccatagtcggtcctcctagggttcgtgctcgtcatcgcgggtcgaggtagcagagttgcttgcgtgcgaaggccgcttggtctggagttaagcgcgtgttgtaatggaggggcgtgggaaccctccgcacaccaccactgatgctgtgatcaagaagccaaggagcgtcgcatccaggaagccaaggtccacggagcagctcacgtatgagtacaatggcatttgcccgccatcttggagcgctccccatgacgatgacactggcgttggagctggtggacatcggaggaaagagctacacctaaatagccctgaaatgaagggctccatggctcataggagcgacgtgcccaggaagataaggagggatgatagatctggaggcgaccatgatggccatggtcggagcagcaaagcaaaggatgctgccaagcatggaagtgaaaatgttcttgccctagagtgcacagcaagaaacaatggatcccctgataacccacagttggtccccagagatgactctatgccttgtgaaaataggtcgagaaaagtaaagctcaaagttgttagtcgaaccctacatgccaaaaatggccaggatgctggtggcagtggtattcctgccacgttggatggctctattcatcagtacaagcaaaaggattctggtggccacacaaacaaagagacccatggtaatcgtgttgaaggaaaacatggcaacgggcatgaaatttttccatcttctgaccttgttcgcaagagcaaaaggattcccaagaagaaaacacttgacggagattctgatgatgaagatggtgaattacgctatctggaaaaactcaaaggggctaaagttgcaccagatcctgtgaacactagccataaaggttatgattttggtgatgatgctctcaagaaaaagaagctatccaagctttctagaaacaagagcaccccatatgaagtggacgacgacttcagaatgtctcgatctggcagggatggtaggaagaagttgaatttaggggatgacaatgagtttatagaagaggaggaatctgagatggatgaaacgaatgggctaaaggaacctgattcacctcaaggtgtgaagattgaaacccctggtcttacaacaagacagcgagcccttcaaggcaggggtggcaatggtgaaagctttattgagtttcctgatggattaccagcagcttcatcaagaaagcaaaaggagaagctctcagatatggagatacaagccaaaaaggcagaagctgcgctgaggcgcaagatgcaagttgagaaggcagagaaagaacagcaggctgaagcgatgaggaagatactgggaatagattctgagaagaaaaaggaagagaagaagctgaaagaacgagaagagagggaaaaacaggcaagattggaagaatacaggaaaaactgcgtccagactgtcatgggcccaactgggactgtgattacattccctgagagcatggggcttccgagtatatttaactccaaacctgtcagctatccgcctccgagggagaagtgtgcaggcccatcgtgcacaaacccgtacaagtaccgccactccaagactctggtccctctctgcagccttgcttgctataaggccgtcgaggaccgtcctcctgcccaggggagtgaaggtggtggtggccagggaagcgatgctgggcagggaactgatgccgcccaggagagtgctgggaagcaagcatgatgaatctagctgcctgacgcgattcaaccgtgaccgtcagttggctggagaagtgtaatgtcgacatggccagctcgctggtgtgttgttttcttggtctctcctctggtagtgtgtcgtctaacaaccaatcaacctgacaaaagataggtgtgtgactgccggtttccttctgcccgtcgtgaaccaagccgggcttcgtaatggtggattggatcgagtttaaaacctatggtgtggtcggttcgatgtatgagactactctagtcgagaaatatgaagggaaacaaggtcgtgggagacctcgggctgtgggcgtctttttcgggttcctc

SEQ ID NO: 11580 - DNA, 2160 bp, Zea Mays
agcccgcgcacccccacccgcgcgctcctccccttccccgacctcacccgcgtcatccacccggcacccccctcccctccacctcgtcacgctcacgccgcacgggcccggcccaaataccctcgcactcgcgcccccacctctcgccacaaaccctaacctgacctccccaccggctcgacgccgccgtcgccggtccgtcttcgtcgtcggcccactctgtgcgaggtagcagagttgcttgcgtgcgaaggccgcttggtctggagttaagcgcgtgttgtaatggaggggcgtgggaaccctccgcacaccaccactgatgctgtgatcaagaagccaaggagcgtcgcatccaggaagccaaggtccacggagcagctcacgtatgagtacaatggcatttgcccgccatcttggagcgctccccatgacgatgacactggcgttggagctggtggacatcggaggaaagagctacacctaaatagccctgaaatgaagggctccatggctcataggagcgacgtgcccaggaagataaggagggatgatagatctggaggcgaccatgatggccatggtcggagcagcaaagcaaaggatgctgccaagcatggaagtgaaaatgttcttgccctagagtgcacagcaagaaacaatggatcccctgataacccacagttggtccccagagatgactctatgccttgtgaaaataggtcgagaaaagtaaagctcaaagttgttagtcgaaccctacatgccaaaaatggccaggatgctggtggcagtggtattcctgccacgttggatggctctattcatcagtacaagcaaaaggattcccaagaagaaaacacttgacggagattctgatgatgaagatggtgaattacgctatctggaaaaactcaaaggggctaaagttgcaccagatcctgtgaacactagccataaaggttatgattttggtgatgatgctctcaagaaaaagaagctatccaagctttctagaaacaagagcaccccatatgaagtggacgacgacttcagaatgtctcgatctggcagggatggtaggaagaagttgaatttaggggatgacaatgagtttatagaagaggaggaatctgagatggatgaaacgaatgggctaaaggaacctgattcacctcaaggtgtgaagattgaaacccctggtcttacaacaagacagcgagcccttcaaggcaggggtggcaatggtgaaagctttattgagtttcctgatggattaccagcagcttcatcaagaaagcaaaaggagaagctctcagatatggagatacaagccaaaaaggcagaagctgcgctgaggcgcaagatgcaagttgagaaggcagagaaagaacagcaggctgaagcgatgaggaagatactgggaatagattctgagaagaaaaaggaagagaagaagctgaaagaacgagaagagagggaaaaacaggcaagattggaagaatacaggaaaaactgcgtccagactgtcatgggcccaactgggactgtgattacattccctgagagcatggggcttccgagtatatttaactccaaacctgtcagctatccgcctccgagggagaagtgtgcaggcccatcgtgcacaaacccgtacaagtaccgccactccaagactctggtccctctctgcagccttgcttgctataaggccgtcgaggaccgtcctcctgcccaggggagtgaaggtggtggtggccagggaagcgatgctgggcagggaactgatgccgcccaggagagtgctgggaagcaagcatgatgaatctagctgcctgacgcgattcaaccgtgaccgtcagttggctggagaagtgtaatgtcgacatggccagctcgctggtgtgttgttttcttggtctctcctctggtagtgtgtcgtctaacaaccaatcaacctgacaaaagataggtgtgtgactgccggtttccttctgcccgtcgtgaaccaagccgggcttcgtaatggtggattggatcgagtttaaaacctatggtgtggtcggttcgatgtatgagactactctagtcgagaaatatgaagggaaacaaggtcgtgggagacctcgggctgtgggcgtctttttcgggttcctc

SEQ ID NO: 11581 - DNA, 376 bp, Zea Mays
aagagattaggttttcctcaaggaaccagcatggactggcaaggagcacccccaagtcctagctcccatgttgtaaagaagattcttcgtctggaggttccagttgattcttatccgaatttcaattttgtggggcgcattttaggacctagaggtaattctctaaagcgagtagaagcatccactgggtgtcgtgttttcattagaggaaagggttccatcaaagattcagggaaggtaagagaagtttctgttccttttttacattcgccaaattaaagtcacgttgctcttatttaactctcaggcaaatatgttgatcgggagcctttgaatcccaatgtgttttcttgaacttgtaatgctgtggtcgacg

SEQ ID NO: 11582 - DNA, 1365 bp, Zea Mays
aggtcgaaaccagtcgcgtcttatggtccattgatgtttcgtatgcttcagagattgtagctggtctttacagaagcacacaaaagcaatgataaagctccggactccggtaatgtgcaagtgttagatgttctgctgctgatcaccatacgttttccagtttgtacattaccggcaaagagggtgaaatcacatatcacacagcatacacataaactactttaattattggaaacaaaatttctgacctattacggtttttttccctgttgcggatactggaaatgttggagcctttgtttttgcattcaagtgccatttttttttcttggttgggtaagtgtgctctatcagctgattctactctttgtgttcaatgtataataccagaccagtgttttagggagttccctttatttgacattgtagattgaataatgcactgactgatcaagagtccattgattgacttcggtgttgtttggttgcaccatcttgtaaaaataattttccgtaaagctaagtggctagctgtatgtatattgcaggcataataagagattatgcgggtatcaagcattgtgcacaaccatggatttggcgatttcgacaggcatcggtttagaagtcctagtccaatgtcttctccaaaccctagagctaatctccctggcaatgggttcagtccttggagcggactacaagaggtaacactaaagaatatatttgaaatcaagtgggtgactcttctgtacttcatacacagatggatgtgccttttcctctgggagttctgtcccttaacattgataaaccacatatcttcttgtaactggcaatgctatttcagagtcatgatgaattaatatgaaaagtacattcaagatgcactggcattcatgttcccatgcgttaatgcgcatgtgtgtgtgtgtgttgtcacaaacactgatgatgtatatatgcttttgcctttatgaacaattcaaaagagattaggttttcctcaaggaaccagcatggactggcaaggagcacccccaagtcctagctcccatgttgtaaagaagattcttcgtctggaggttccagttgattcttatccgaatttcaattttgtggggcgcattttaggacctagaggtaattctctaaagcgagtagaagcatccactgggtgtcgtgttttcattagaggaaagggttccatcaaagattcagggaaggtaagagaagtttctgttccttttttacattcgccaaattaaagtcacgttgctcttatttaactctcaggcaaatatgttgatcgggagcctttgaatcccaatgtgttttcttgaacttgtaatgctgtggtcgacg

SEQ ID NO: 11583 - DNA, 1308 bp, Zea Mays
aggtcgaaaccagtcgcgtcttatggtccattgatgtttcgtatgcttcagagattgtagctggtctttacagaagcacacaaaagcaatgataaagctccggactccggtaatgtgcaagtgttagatgttctgctgctgatcaccatacgttttccagtttgtacattaccggcaaagagggtgaaatcacatatcacacagcatacacataaactactttaattattggaaacaaaatttctgacctattacggtttttttccctgttgcggatactggaaatgttggagcctttgtttttgcattcaagtgccatttttttttcttggttgggtaagtgtgctctatcagctgattctactctttgtgttcaatgtataataccagaccagtgttttagggagttccctttatttgacattgtagattgaataatgcactgactgatcaagagtccattgattgacttcggtgttgtttggttgcaccatcttgtaaaaataattttccgtaaagctaagtggctagctgtatgtatattgcaggcataataaggtgatttatatcaatgcgcatgtcttggtatttgctgatatttttttccttgttgattctcatggtgtagtgggagtgtcatcttcagacttacgttactgttagcctggttctaatcaacgacttatctatttcttattatataaatgaagtgatcttctgagttctgacctttgctgtacacccagagatcatttttctgagttctaacctttgttgtacacccagagattatgcgggtatcaagcattgtgcacaaccatggatttggcgatttcgacaggcatcggtttagaagtcctagtccaatgtcttctccaaaccctagagctaatctccctggcaatgggttcagtccttggagcggactacaagagagattaggttttcctcaaggaaccagcatggactggcaaggagcacccccaagtcctagctcccatgttgtaaagaagattcttcgtctggaggttccagttgattcttatccgaatttcaattttgtggggcgcattttaggacctagaggtaattctctaaagcgagtagaagcatccactgggtgtcgtgttttcattagaggaaagggttccatcaaagattcagggaaggtaagagaagtttctgttccttttttacattcgccaaattaaagtcacgttgctcttatttaactctcaggcaaatatgttgatcgggagcctttgaatcccaatgtgttttcttgaacttgtaatgctgtggtcgacg

SEQ ID NO: 11584 - DNA, 1080 bp, Zea Mays
aggtcgaaaccagtcgcgtcttatggtccattgatgtttcgtatgcttcagagattgtagctggtctttacagaagcacacaaaagcaatgataaagctccggactccggtaatgtgcaagtgttagatgttctgctgctgatcaccatacgttttccagtttgtacattaccggcaaagagggtgaaatcacatatcacacagcatacacataaactactttaattattggaaacaaaatttctgacctattacggtttttttccctgttgcggatactggaaatgttggagcctttgtttttgcattcaagtgccatttttttttcttggttgggtaagtgtgctctatcagctgattctactctttgtgttcaatgtataataccagaccagtgttttagggagttccctttatttgacattgtagattgaataatgcactgactgatcaagagtccattgattgacttcggtgttgtttggttgcaccatcttgtaaaaataattttccgtaaagctaagtggctagctgtatgtatattgcaggcataataagagattatgcgggtatcaagcattgtgcacaaccatggatttggcgatttcgacaggcatcggtttagaagtcctagtccaatgtcttctccaaaccctagagctaatctccctggcaatgggttcagtccttggagcggactacaagagagattaggttttcctcaaggaaccagcatggactggcaaggagcacccccaagtcctagctcccatgttgtaaagaagattcttcgtctggaggttccagttgattcttatccgaatttcaattttgtggggcgcattttaggacctagaggtaattctctaaagcgagtagaagcatccactgggtgtcgtgttttcattagaggaaagggttccatcaaagattcagggaaggtaagagaagtttctgttccttttttacattcgccaaattaaagtcacgttgctcttatttaactctcaggcaaatatgttgatcgggagcctttgaatcccaatgtgttttcttgaacttgtaatgctgtggtcgacg

SEQ ID NO: 11585 - DNA, 1047 bp, Zea Mays
gttctcttttcccccaccccatcaacacaatttacccttcgtcttcccgcttccagcgcacccccatcttgagtctcgccgccgcaagcttgtgtaaggtgtaaccctaaccctaaaacacttaccttcgcctccagcaccacgcttccatggaggggcgcggaggctaagtatagccaacctctacaccatatccccatggattgagcggattcccaaggcatgggtacaaaccctcacctgcaagagctggccgcttcggcggtggcggcttctgaaccaccaccgcgggcgcgcgtggtgcggatcctagtgcacgatgctgacgccaccgattcgtcctccagcgaggatgaggcaccgccacttcttcctcggcggaggtcgaggggtggtagcagcagcctgagcgtgaggcgccgtgttatggaaccggctggggcaagctcggccgttcggttccgtggcgtccgtcgtaggccgtgggggcgctgggctgcggagatccgcgagccgcacaaccgccgcagactgtggctcggcaccttcgacaccgctgaggaggctgccaacgcctacgacgctgcgaacatccgcttccgcggtgtcagcgccactaccaacttccctgcggcccgctactcgccccctccaaagccagcgaagcctatcatctcgctgactcctgaacccggaaaggtgatcaccttgccaccggtacctgtgaagccaaccttccctgttcaggtgaaggaagtgggtgggagctggggcggcctggtcaagggagctaggtcggaggtcaaggcgtttgcaccgaagccagtatggaagatgatccccagggtgcaccagaagtttccgggttgtgccgatggctctggcctgcgtgccgtccatgctgcctccatctacgtggaggaggttggcggtggctgatggtccaagtatctgcaattactatcgctagagaacagaaacctcagcaggcaaatttctggccagctgagcacgctacagtctgcataatgggttgcgaggcctgac

SEQ ID NO: 11586 - DNA, 1420 bp, Zea Mays
attggattctactgcttgaagcctcgcaggcctggaatggtcaaatataactcgtattggacgtatggagataaatgggggaaatggagtgaggtcaatccaagaggggcagcaatggcatttatgtaaccatggaatcgagattgggcgtccatcaccaggaggggatgaacctggtaccatccccagagatgtgagagtggagaatgggcatggagttgttggaagaagagacgggggtcctgcatccagctattgggacctgttgagagcacacctctctgatcctttaacaggtgttctcatggatgatgcattgattttatcatgtggccattcatatggaagtagtggaatgcaacatgtctacagaatgaaagcttgtggtaagtgtggcatgccaattactgaggccgccattcgaccaaacttggctcttcgccttgcagttcaggcattcaaacgtgaagaagactcagcaaagtcattgaaaagaagaagagagcgccttgaactggtatacgcccttttccagcttatcagtcacccttcaaatcgggcagctatatttgttgcatgttcttaaatccattctaccctatgtgaggataaatgtggtgacgatgatccaaatcgaactgaacttgctactagaggtaaaggtgtgcagtttcctttttctgtcttcgacagggtcataatcaagggaaacaagaggaccccggaacggtttgtgggacgtcaagcagttgtgacagcgcagtgcttaaatggatggtatgttgtgaagacttcagacaacgcagagagtgtgaagctgcaataccgttccttggcaaaggttgctgatggcaatgggccttctggtcttgtcccaagcaatgtccaaagtacaagctggctataggctacaacagtaccggtagtaggccccaagcccctcttcaacttcacgcatttgctgaggttctgcgatgacgtgagcatgccaaattcagattaggcttgctttgcctttgtcccctctttttgtatcctggggacgcggatcttgtgagtatggccaaagaaatgtttactactttagcagtgttggaaacgcgtgacatcactggttacgagtagttttagccgtcttctgtctagcggtgtggccggtagtggcagcatgcgtctgcagagaacatatctggtacacataaaagtttagtgcacatgatttatatattaaattatcactatctattttagatctaacgtctctgttgaccattgtaatctataaataacaccttctaccattacactccaccatgtcagggtgtctttagcaaaatataccaaataattagagacgttagatataagatgagtgatgataatttaatatatgtaatatgtgcattaaacttatacgtgc

SEQ ID NO: 11587 - DNA, 1506 bp, Zea Mays
aaaactagcgcttactgttttgcacggccatagtctcgatccccaccgagtccagcaaacagcaccaccccaccctcttcgcggctccggcagccgcgccaccatggcttctcctgcgggggctaacagcggggcctcctcctcgagagggacacccttgcctttgcccttccccttccccgctgcggcgcacttcccctcccgcggcgccggtcccttcctgtcgcagcactatcacccgccctccacctccgacggcgacgatgaggtcgaagaagacgagggaagcatggacgacggcagcgccgaagaggatgatgccgagctgtccgacggaggggctctcggctcgccgcggcgacgcgccttctccgctccagaggtgttctcatggatgatgcattgattttatcatgtggccattcatatggaagtagtggaatgcaacatgtctacagaatgaaagcttgtggtaagtgtggcatgccaattactgaggccgccattcgaccaaacttggctcttcgccttgcagttcaggcattcaaacgtgaagaagactcagcaaagtcattgaaaagaagaagagagcgccttgaactggtatacgcccttttccagcttatcagtcacccttcaaatcgggcagctatatttgttgcatgttcttaaatccattctaccctatgtgaggataaatgtggtgacgatgatccaaatcgaactgaacttgctactagaggtaaaggtgtgcagtttcctttttctgtcttcgacagggtcataatcaagggaaacaagaggaccccggaacggtttgtgggacgtcaagcagttgtgacagcgcagtgcttaaatggatggtatgttgtgaagacttcagacaacgcagagagtgtgaagctgcaataccgttccttggcaaaggttgctgatggcaatgggccttctggtcttgtcccaagcaatgtccaaagtacaagctggctataggctacaacagtaccggtagtaggccccaagcccctcttcaacttcacgcatttgctgaggttctgcgatgacgtgagcatgccaaattcagattaggcttgctttgcctttgtcccctctttttgtatcctggggacgcggatcttgtgagtatggccaaagaaatgtttactactttagcagtgttggaaacgcgtgacatcactggttacgagtagttttagccgtcttctgtctagcggtgtggccggtagtggcagcatgcgtctgcagagaacatatctggtacacataaaagtttagtgcacatgatttatatattaaattatcactatctattttagatctaacgtctctgttgaccattgtaatctataaataacaccttctaccattacactccaccatgtcagggtgtctttagcaaaatataccaaataattagagacgttagatataagatgagtgatgataatttaatatatgtaatatgtgcattaaacttatacgtgc

SEQ ID NO: 11588 - DNA, 1279 bp, Zea Mays
ataagatccctcgatcttctccgtttctttccaaaactagcgcttactgttttgcacggccatagtctcgatccccaccgagtccagcaaacagcaccaccccaccctcttcgcggctccggcagccgcgccaccatggcttctcctgcgggggctaacagcggggatgaacctggtaccatccccagagatgtgagagtggagaatgggcatggagttgttggaagaagagacgggggtcctgcatccagctattgggacctgttgagagcacacctctctgatcctttaacaggtgttctcatggatgatgcattgattttatcatgtggccattcatatggaagtagtggaatgcaacatgtctacagaatgaaagcttgtggtaagtgtggcatgccaattactgaggccgccattcgaccaaacttggctcttcgccttgcagttcaggcattcaaacgtgaagaagactcagcaaagtcattgaaaagaagaagagagcgccttgaactggataaatgtggtgacgatgatccaaatcgaactgaacttgctactagagggaaacaagaggaccccggaacggtttgtgggacgtcaagcagttgtgacagcgcagtgcttaaatggatggtatgttgtgaagacttcagacaacgcagagagtgtgaagctgcaataccgttccttggcaaaggttgctgatggcaatgggccttctggtcttgtcccaagcaatgtccaaagtacaagctggctataggctacaacagtaccggtagtaggccccaagcccctcttcaacttcacgcatttgctgaggttctgcgatgacgtgagcatgccaaattcagattaggcttgctttgcctttgtcccctctttttgtatcctggggacgcggatcttgtgagtatggccaaagaaatgtttactactttagcagtgttggaaacgcgtgacatcactggttacgagtagttttagccgtcttctgtctagcggtgtggccggtagtggcagcatgcgtctgcagagaacatatctggtacacataaaagtttagtgcacatgatttatatattaaattatcactatctattttagatctaacgtctctgttgaccattgtaatctataaataacaccttctaccattacactccaccatgtcagggtgtctttagcaaaatataccaaataattagagacgttagatataagatgagtgatgataatttaatatatgtaatatgtgcattaaacttatacgtgc

SEQ ID NO: 11589 - DNA, 1243 bp, Zea Mays
gtaacatcacaagttcagatgtcattgtcttcacatgaggaaacttgtgccataatcctttgtacggtgatcaaattgtagcgataaaggttcttaaccgtggcagcacccctgaagaaaaagcaacacttgaagcccgtttcatccgagaagtaaatatgatgtgtaaagtgaaacatgagaatcttgtcaagtttattggagcttgcaaagaaccattgatggtgatcgttagtgagctactaccagggatgtcactgaaaagttacctgcatagcatacggcctagccaattagatacacacactgcaataagctatgcactggacatagctcatgcaatggactgtttacatgccaatggcataatacatagagacctgaaacctgataatttattgcttacagcaaatcgcaagaagctaaaacttactgattttggacttgcacgtgaagaaactgtgactgaaatgatgactgctgaaactgggacttaccgatggatggccccagagcacagtcacacttcgacgtggtgagaaaaagcattacacaaataaagtggatgtgtacagctttggcattgttttgtgggaattattgaccaatagaatgccatttgaaggcatgtcgaatctacaagctgcatatgctgctgcttttcagcaaaagcgcccagctctccctgaggagaccccccaggagcttgtgttcatagtacaatcatgctgggttgaggatcctgccatgcgacccagtttcagccagatcatccgaatgcttgaaactttcattatgacaatacatccacctccgctttcagagccaaacgaaggcgaggaatcggaagaaacgaggtcgtcactgagcagtaggagctcctctggctcctcgctcgtttctcgcgcgacaagcaagctctcggtcgtccgccacctcttcgtctcaaagaagacaggcaatgggaaggcgtgatgcgccatgccctgagacgcttttcttcggtgctgtaaagatgctagcctaggtgatgcgcaatacaagagggaacttgttcagtgtagagtagctgttgtattgatgttacaaaaggggaaagttgaagtgcagcttttgcaagctatgtatagctcgcagctcctttactttactgaaagtccaaacagccggctttaatccgaagcgaaccgagatatatattaaatcaaacaaccgactttaattcgaagaacagagatatata

SEQ ID NO: 11590 - DNA, 1775 bp, Zea Mays
cccccgataccttctctccccgacttttccttcccttcctcgcacgacgagtgacgacgaccatcccccaaccccacgccgcggagccgcaccaaatctcaccccgcatcctttagggttagggttctgcccgcacctgtgaattccgttgcgaaatctctcatctcctgagtcgagaatcgcagtttcccgctcggctcgtttggggaaatcggttattttcgtccggccgcgtgggctctctgaagcgtttgggctgtcggctatttgccccgagttttcaggtttgaaaaatcgtcgtaatttgttcatcacgcggctgccgaactttaagtggtggtggaagtttcgtgcctcggcgtggcccccgtgctccgattcctgatcacctgcccgccccgcacgctatgagcgcagggcgcgcgggctggggctcttgctgctcgggcacgcgcgcggggtccccgtgttaatgcctcggttgtcctgcaagttcgcggaccccgacagcgccgtttcctccgctccggtggcgcgccgcgtgcggtcagacacgatgagctgcggcagcgacgtgtgccgggacggcggcagcagcagcggcagcgaggagttcaggcggccgcggcccagcaaggtcgccgctgatgattcggtggcgcccgcccggagctcggatgccgcggcgccggcgtcgtggatcgacaggaagctgcttgttgatccaaagatgctgttcgttggggacaagattggggagggagctcatggcaaggtctacaaggggaagtacggtgatcaaattgtagcgataaaggttcttaaccgtggcagcacccctgaagaaaaagcaacacttgaagcccgtttcatccgagaagtaaatatgatgtgtaaagtgaaacatgagaatcttgtcaagataatttattgcttacagcaaatcgcaagaagctaaaacttactgattttggacttgcacgtgaagaaactgtgactgaaatgatgactgctgaaactgggacttaccgatggatggccccagagcacagtcacacttcgacgtggtgagaaaaagcattacacaaataaagtggatgtgtacagctttggcattgttttgtgggaattattgaccaatagaatgccatttgaaggcatgtcgaatctacaagctgcatatgctgctgcttttcagcaaaagcgcccagctctccctgaggagaccccccaggagcttgtgttcatagtacaatcatgctgggttgaggatcctgccatgcgacccagtttcagccagatcatccgaatgcttgaaactttcattatgacaatacatccacctccgctttcagagccaaacgaaggcgaggaatcggaagaaacgaggtcgtcactgagcagtaggagctcctctggctcctcgctcgtttctcgcgcgacaagcaagctctcggtcgtccgccacctcttcgtctcaaagaagacaggcaatgggaaggcgtgatgcgccatgccctgagacgcttttcttcggtgctgtaaagatgctagcctaggtgatgcgcaatacaagagggaacttgttcagtgtagagtagctgttgtattgatgttacaaaaggggaaagttgaagtgcagcttttgcaagctatgtatagctcgcagctcctttactttactgaaagtccaaacagccggctttaatccgaagcgaaccgagatatatattaaatcaaacaaccgactttaattcgaagaacagagatatata

SEQ ID NO: 11591 - DNA, 1783 bp, Zea Mays
cccccgataccttctctccccgacttttccttcccttcctcgcacgacgagtgacgacgaccatcccccaaccccacgccgcggagccgcaccaaatctcaccccgcatcctttagggttagggttctgcccgcacctgtgaattccgttgcgaaatctctcatctcctgagtcgagaatcgcagtttcccgctcggctcgtttggggaaatcggttattttcgtccggccgcgtgggctctctgaagcgtttgggctgtcggctatttgccccgagttttcaggtttgaaaaatcgtcgtaatttgttcatcacgcggctgccgaactttaagtggtggtggaagtttcgtgcctcggcgtggcccccgtgctccgattcctgatcacctgcccgccccgcacgctatgagcgcagggcgcgcgggctggggctcttgctgctcgggcacgcgcgcggggtccccgtgttaatgcctcggttgtcctgcaagttcgcggaccccgacagcgccgtttcctccgctccggtggcgcgccgcgtgcggtcagacacgatgagctgcggcagcgacgtgtgccgggacggcggcagcagcagcggcagcgaggagttcaggcggccgcggcccagcaaggtcgccgctgatgattcggtggcgcccgcccggagctcggatgccgcggcgccggcgtcgtggatcgacaggaagctgcttgttgatccaaagatgctgttcgttggggacaagattggggagggagctcatggcaaggtctacaaggggaagtacggtgatcaaattgtagcgataaaggttcttaaccgtggcagcacccctgaagaaaaagcaacacttgaagcccgtttcatccgagaagtaaatatgatgtgtaaagtgaaacatgagaatcttgtcaagataatttattgcttacagcaaatcgcaagaagctaaaacttactgattttggacttgcacgtgaagaaactgtgactgaaatgatgactgctgaaactgggacttaccgatggatggccccagagctatacagcacagtcacacttcgacgtggtgagaaaaagcattacacaaataaagtggatgtgtacagctttggcattgttttgtgggaattattgaccaatagaatgccatttgaaggcatgtcgaatctacaagctgcatatgctgctgcttttcagcaaaagcgcccagctctccctgaggagaccccccaggagcttgtgttcatagtacaatcatgctgggttgaggatcctgccatgcgacccagtttcagccagatcatccgaatgcttgaaactttcattatgacaatacatccacctccgctttcagagccaaacgaaggcgaggaatcggaagaaacgaggtcgtcactgagcagtaggagctcctctggctcctcgctcgtttctcgcgcgacaagcaagctctcggtcgtccgccacctcttcgtctcaaagaagacaggcaatgggaaggcgtgatgcgccatgccctgagacgcttttcttcggtgctgtaaagatgctagcctaggtgatgcgcaatacaagagggaacttgttcagtgtagagtagctgttgtattgatgttacaaaaggggaaagttgaagtgcagcttttgcaagctatgtatagctcgcagctcctttactttactgaaagtccaaacagccggctttaatccgaagcgaaccgagatatatattaaatcaaacaaccgactttaattcgaagaacagagatatata

SEQ ID NO: 11592 - DNA, 2700 bp, Zea Mays
ttgtcaaaaaaaaatatgttcaagacaaaaaatatctcaggttcagttaaaaatttccacatgctgaagaaaagattgtttctaactcaagcgaaaagtgacatagctttatgcgaaagatgcaccaggttattctaagttcaattgaaaaaggtcctctagcttttccttcaatggggaaaatgtttgacctcaataaaatataaaaataataaatttgctcattttgtaatgtaatgttaatatcattattgtctcactcatttttcatttgaaattaaaatgttccactaggcagtgtccaggaatccaggatgtgaggctaaatacaaaatcaagaagaataaatataaataaaaataaaacgagagagagagaaagaaacacataagttaaggaggtgtggaaaaaacggcccagcagaaggcccgtgttgctgccctcccctgggccgacaaaccccggacgggcctaccgccgtcagccgcatccgtgattccgttcaccttcacggcttcaccagcctgcgctctctcctctcagcgcgacgactgggtgggcggggctaccgccgccgccgccgcccgacaccaggtgccgaggttttcgtcggtctcttcgccggcgacgagctccaaccagctaaacctgcccctagtggcaagaggaactggagcagtggcgggactgccgctggaaggaagaacaaggaaagaggagatgacaaagcaaaaggaatcagggttgctggttggaacaagggcgacaagaagaaagaagacaaagggcgccaagtaagtgcgggatcgaagaggcggtggagtgagggagtgccccgggttggtgtgaagagggctgtgtctgggtttgacaggaggaagaggaagatcgatgatgactcgtgggatgatgacggtggcaaggatgtttcatcttccaaatcaaagtttaccagaaagtgttcttccacaataagccgtcgaaaggtttctcctggaaaaggtgacagattgaagtctcaaacgttgtatgaggatgactaccgtgcagggaaaaggagtattagcaaagtttctgatgttagtagaggggtcaagaatcgactggtgaattctgtagcatccaaagggaagaagcttggtgcatccgaaggagtcatacgaacaaagaagggtggtgctaaagaagttgatttggatgaggaggctgttaatagcaagaagtcagatgacttggatcttattattgaagaagagaagcctcgccctcgccttactcgagtactggaccagactggtaagaaaataaagcccgctaagaaggttgtagttcctgacaatgaggaacgtgctcctcctaagaagagaaagcgaatgaagctagatccttatgacacttcaaacaaacggattgaagattcttctatccaagatgtgcagagaaggttctcgtgaattgtacacctgaagaagagactgaaatgtcaataaatgcaaaatttcgtgctatacagccaagttcttcaatcctttcatatgtggaagataatttactaggtcgtaggcgcttaattgagataaaaaatgctggctacaatgtcaagatttctgctcctctggataacgttcccttctcaaccagcacagaacgtgaacgcatagaagacattgcgttcagaaataagctggaattctttgctgctgcaaagatctcttcctcattccccactccaacactcccagagatagcatttgcaggtgtatcgaatgttggtaaatcctcactcctaaattcacttacaagacaatggggtgttgtgcgaacatcagataagcctggacttactcagacaataaatttctttcaacttgcttcaaagttatgtcttgttgatttacctggatatggttttgcttatgcaaaggacgaagttaaggaatcgtgggaggaacttgtgaaagagtatgtttcgaccagagttggcctagaaagggtgtgccttcttgtgcacactaaacgaggaatgaaaccgttggactatgagcttgtagacttaatggaaaggcacaagacgccataccagattgtactgacaaaaactgatttagttttcccaattgatgttgctcgccgtgccatggaaatccaagagagcctgaagaggaataagtcagtggtaaacccagtgatgatggtgagctctaaaacaggagctggcatacgcaacctgagaggcgtgcttggaaagttagctcgcttcatcaaaccgtagcaaagctgcagccaatttcggagtctgcgtctgcgtcggtcgagaccgtgagaggaaactcacaccaggctgtcttaggcaggtgccgcgctacgtcaacgctctaaccagtccaccgccacaagctttgtctgcatcagtttagactatcgaacacttgcagcaagcgttcctagttaggttatgctttggagcctagctgtatcacaggccattccggtaggattgaactgttcaacttttgagtggattatgcgatgctcagattaatccatgaaatatttgagtttccccatttggatatacggaatcgtacatccttaaaaactattatgcatcgttccttgatgtacaatactttttcagtgatgattcatcactcatcagtcattgatgttttatgtgttcttcacgaaaaaggtatgccg

SEQ ID NO: 11593 - DNA, 2684 bp, Zea Mays
ttgtcaaaaaaaaatatgttcaagacaaaaaatatctcaggttcagttaaaaatttccacatgctgaagaaaagattgtttctaactcaagcgaaaagtgacatagctttatgcgaaagatgcaccaggttattctaagttcaattgaaaaaggtcctctagcttttccttcaatggggaaaatgtttgacctcaataaaatataaaaataataaatttgctcattttgtaatgtaatgttaatatcattattgtctcactcatttttcatttgaaattaaaatgttccactaggcagtgtccaggaatccaggatgtgaggctaaatacaaaatcaagaagaataaatataaataaaaataaaacgagagagagagaaagaaacacataagttaaggaggtgtggaaaaaacggcccagcagaaggcccgtgttgctgccctcccctgggccgacaaaccccggacgggcctaccgccgtcagccgcatccgtgattccgttcaccttcacggcttcaccagcctgcgctctctcctctcagcgcgacgactgggtgggcggggctaccgccgccgccgccgcccgacaccaggtgccgaggttttcgtcggtctcttcgccggcgacgagctccaaccagtggcaagaggaactggagcagtggcgggactgccgctggaaggaagaacaaggaaagaggagatgacaaagcaaaaggaatcagggttgctggttggaacaagggcgacaagaagaaagaagacaaagggcgccaagtaagtgcgggatcgaagaggcggtggagtgagggagtgccccgggttggtgtgaagagggctgtgtctgggtttgacaggaggaagaggaagatcgatgatgactcgtgggatgatgacggtggcaaggatgtttcatcttccaaatcaaagtttaccagaaagtgttcttccacaataagccgtcgaaaggtttctcctggaaaaggtgacagattgaagtctcaaacgttgtatgaggatgactaccgtgcagggaaaaggagtattagcaaagtttctgatgttagtagaggggtcaagaatcgactggtgaattctgtagcatccaaagggaagaagcttggtgcatccgaaggagtcatacgaacaaagaagggtggtgctaaagaagttgatttggatgaggaggctgttaatagcaagaagtcagatgacttggatcttattattgaagaagagaagcctcgccctcgccttactcgagtactggaccagactggtaagaaaataaagcccgctaagaaggttgtagttcctgacaatgaggaacgtgctcctcctaagaagagaaagcgaatgaagctagatccttatgacacttcaaacaaacggattgaagattcttctatccaagatgtgcagagaaggttctcgtgaattgtacacctgaagaagagactgaaatgtcaataaatgcaaaatttcgtgctatacagccaagttcttcaatcctttcatatgtggaagataatttactaggtcgtaggcgcttaattgagataaaaaatgctggctacaatgtcaagatttctgctcctctggataacgttcccttctcaaccagcacagaacgtgaacgcatagaagacattgcgttcagaaataagctggaattctttgctgctgcaaagatctcttcctcattccccactccaacactcccagagatagcatttgcaggtgtatcgaatgttggtaaatcctcactcctaaattcacttacaagacaatggggtgttgtgcgaacatcagataagcctggacttactcagacaataaatttctttcaacttgcttcaaagttatgtcttgttgatttacctggatatggttttgcttatgcaaaggacgaagttaaggaatcgtgggaggaacttgtgaaagagtatgtttcgaccagagttggcctagaaagggtgtgccttcttgtgcacactaaacgaggaatgaaaccgttggactatgagcttgtagacttaatggaaaggcacaagacgccataccagattgtactgacaaaaactgatttagttttcccaattgatgttgctcgccgtgccatggaaatccaagagagcctgaagaggaataagtcagtggtaaacccagtgatgatggtgagctctaaaacaggagctggcatacgcaacctgagaggcgtgcttggaaagttagctcgcttcatcaaaccgtagcaaagctgcagccaatttcggagtctgcgtctgcgtcggtcgagaccgtgagaggaaactcacaccaggctgtcttaggcaggtgccgcgctacgtcaacgctctaaccagtccaccgccacaagctttgtctgcatcagtttagactatcgaacacttgcagcaagcgttcctagttaggttatgctttggagcctagctgtatcacaggccattccggtaggattgaactgttcaacttttgagtggattatgcgatgctcagattaatccatgaaatatttgagtttccccatttggatatacggaatcgtacatccttaaaaactattatgcatcgttccttgatgtacaatactttttcagtgatgattcatcactcatcagtcattgatgttttatgtgttcttcacgaaaaaggtatgccg

SEQ ID NO: 11594 - DNA, 1244 bp, Zea Mays
cttaacagaacatatggcaagttcttgacaggcaccataggttcgttttctggagtggacagatgatttggagggttttgttctaaaaggctatggtgagtcaattaactacaggatgggactgccattgctcaaggatgttgtccagtcaatggaagaagcaatcatagctagagaagaaaaccgtgctgatggtacgtttgaaaaggcaaggctccgatttgcacatgcagaaactgttgttccttttagctgccttcttggtctttttcttgaaggtccagaaattgagaagatacagagagaggaagcattggacctaccccctttgccgccacagggaagaaactggaagggcagtgttgttgcgccttttgctggtaacaatatgctggttttatatcaatgtccaagcaaaatttcggatggcagcacaatctctggaggccgaaacaactcttacttagttcaagttctacacaacgaagtcccagtttcaatgcctgggtgcggcaacaaagatttctgtccgttcgaggagttcaaggagaaaattgtgaaaccgcacctgaagcacgactacaacatgatatgcaaggtcaaatccccagcggcaagcgaggagcctgcctcgttcgcctccagggtgtccagtttcttcctaggactcctctcgcagaaagggtaccgcggtgtgggcgccgagggcgtcaagaccgagctgtaggcgtcaagacctagcttagcacggtgccgtctcctctcaccgtctgcgagcacgatcaggaaccagactaacccatgcactaacccgcagtgtttttgtacggggcgagtcgaatgtgtaggacaccaccacaggaggcgccagttcggttgtctccagggccagacgcctctgatactgtagtagcaataacataaataataaatgtgtttcgattcggactccctttcgcgcagaaagaaacaaatgcatgaatgaatgaatgaaatagtacgtgataagcatcttctggggaaaaaagaaataagataacgaattagagactgaaaaggaaaacacgaactaactcgattcatgaaagtttcaggcaccgaattggattggatccttgtcgcctagagaggcacactgaacgttctgatagttgacgtgtactgtacttggccactccgtccatttgctagcttcttttctttggcctgccgtctgtagaaatctcaatgtaatgccgtcgtct

SEQ ID NO: 11595 - DNA, 1269 bp, Zea Mays
agatgcaggaagcatctttgttgaatacaacaaatcaagcttgtgggctttttaatgaagctgaggttcgttttctggagtggacagatgatttggagggttttgttctaaaaggctatggtgagtcaattaactacaggatgggactgccattgctcaaggatgttgtccagtcaatggaagaagcaatcatagctagagaagaaaaccgtgctgatggtacgtttgaaaaggcaaggctccgatttgcacatgcagaaactgttgttccttttagctgccttcttggtctttttcttgaaggtccagaaattgagaagatacagagagaggaagcattggacctaccccctttgccgccacagggaagaaactggaagggcagtgttgttgcgccttttgctggtaacaatatgctggttttatatcaatgtccaagcaaaatttcggatggcagcacaatctctggaggccgaaacaactcttacttagttcaagttctacacaacgaagtcccagtttcaatgcctgggtgcggcaacaaagatttctgtccgttcgaggagttcaaggagaaaattgtgaaaccgcacctgaagcacgactacaacatgatatgcaaggtcaaatccccagcggcaagcgaggagcctgcctcgttcgcctccagggtgtccagtttcttcctaggactcctctcgcagaaagggtaccgcggtgtgggcgccgagggcgtcaagaccgagctgtaggcgtcaagacctagcttagcacggtgccgtctcctctcaccgtctgcgagcacgatcaggaaccagactaacccatgcactaacccgcagtgtttttgtacggggcgagtcgaatgtgtaggacaccaccacaggaggcgccagttcggttgtctccagggccagacgcctctgatactgtagtagcaataacataaataataaatgtgtttcgattcggactccctttcgcgcagaaagaaacaaatgcatgaatgaatgaatgaaatagtacgtgataagcatcttctggggaaaaaagaaataagataacgaattagagactgaaaaggaaaacacgaactaactcgattcatgaaagtttcaggcaccgaattggattggatccttgtcgcctagagaggcacactgaacgttctgatagttgacgtgtactgtacttggccactccgtccatttgctagcttcttttctttggcctgccgtctgtagaaatctcaatgtaatgccgtcgtct

SEQ ID NO: 11596 - DNA, 1987 bp, Zea Mays
gccataacctgtacacctgaagcactacaatagtttaaaatgtatgatgtggccagggagtccagtagtgtcatctccatgccgtcaatcccagacgggtgccgtgtcattcacctcaatttagtggcaagacatgggactcgcgctcctaccaagaagcgcatcaaggagctggatagattggcagttcgactggaagcccttctgaaagaggcaaatcaggtccttgatagtgattctctgaagaaaattccatcctggattaaaggctgggaatcacgctggaagggtaggactaaaggtggtgagctgattagtgaaggggaagaggagctttacaatttagctaccagaatgagggagaggtttcaagatctatttgatgacgaatatcaccctgatgtatattcaataagagcaacccaggttcctcgagcatcagctagtgcagtggcatttgggttgggactactttctgggaaaggaaagcttggacaagggaagaaccgagccttttctgttctgagtgagagtcgtgcaagtgatatttgtctgagattctttgacagctgtgagacatacaaggcatacaggaaaaggaaggagcctgatgtagagaagcaaaaggaaccaattctagagcatgtcacagctgcacttgtcaatcgttatcacctaaaatttacaactcgcgatgtttcttccctctggtttctttgtaagcaggaagcatctttgttgaatacaacaaatcaagcttgtgggctttttaatgaagctgaggttcgttttctggagtggacagatgatttggagggttttgttctaaaaggctatggtgagtcaattaactacaggatgggactgccattgctcaaggatgttgtccagtcaatggaagaagcaatcatagctagagaagaaaaccgtgctgatggtacgtttgaaaaggcaaggctccgatttgcacatgcagaaactgttgttccttttagctgccttcttggtctttttcttgaaggtccagaaattgagaagatacagagagaggaagcattggacctaccccctttgccgccacagggaagaaactggaagggcagtgttgttgcgccttttgctggtaacaatatgctggttttatatcaatgtccaagcaaaatttcggatggcagcacaatctctggaggccgaaacaactcttacttagttcaagttctacacaacgaagtcccagtttcaatgcctgggtgcggcaacaaagatttctgtccgttcgaggagttcaaggagaaaattgtgaaaccgcacctgaagcacgactacaacatgatatgcaaggtcaaatccccagcggcaagcgaggagcctgcctcgttcgcctccagggtgtccagtttcttcctaggactcctctcgcagaaagggtaccgcggtgtgggcgccgagggcgtcaagaccgagctgtaggcgtcaagacctagcttagcacggtgccgtctcctctcaccgtctgcgagcacgatcaggaaccagactaacccatgcactaacccgcagtgtttttgtacggggcgagtcgaatgtgtaggacaccaccacaggaggcgccagttcggttgtctccagggccagacgcctctgatactgtagtagcaataacataaataataaatgtgtttcgattcggactccctttcgcgcagaaagaaacaaatgcatgaatgaatgaatgaaatagtacgtgataagcatcttctggggaaaaaagaaataagataacgaattagagactgaaaaggaaaacacgaactaactcgattcatgaaagtttcaggcaccgaattggattggatccttgtcgcctagagaggcacactgaacgttctgatagttgacgtgtactgtacttggccactccgtccatttgctagcttcttttctttggcctgccgtctgtagaaatctcaatgtaatgccgtcgtct

SEQ ID NO: 11597 - DNA, 2373 bp, Zea Mays
atgggtgggcgggtcctgcagtggaccgctccatgcgcttggaaggaaggaggagggcggcgtcgagagcccgatcgaggtcgttcgaggcaccgcagcagtccctcgccggagactcgccatcaccaaacgacttcgacgtcagctgccttcgttcaagattggtgccgaaaaaaggaagcgcaaccgtcgcacgtatcttcatcgtcgttgattcggtcgtccgctctagatccgacccgagcaaggtaaaatacttcgtatttgtatgtggatccaaagtttagggttgatctgcacacaatattttgcgcttgccccagatcgactctttgtttgttgattcattttttggatctactgattactttagttctaacctttgaaatgaatacaaagattggaaagcagacaagaatgaactgttatgttatttagcctatgaaaatcatttgtcatgcttcatgtgttgcagtggtgagatgaaattagtgtgtgcttctatgatctcttgcaatgatgagatgaaattagtgtgttcattctcacattagtgtaaacagtccacaaaattcagtttaccgaggatgcaagcagaaattcagacctggtaattggagttcttgaatttgtttcgtggctgctgtcctcatacacttcatatactttgagttatttaaatgttcacctctaacattttacaaagttcactttgttgttgacgtactggatgtgtttaatggctgacttaaatttagttgacaacaattttgtagctagttcaaaccctgtgcgatgttgatgattgaacttattaggacttgatcactaacttcaaaatctgtttcatgtagaccatggattcggagaacgaaatgcttcgaaaagccctggctaatttggtgagagctgtagcgttgtgccgacattgtagatgtcatgcacgatgccttccagccatttaactcaccagagttcaatgaatttaactgggccttagttgagatcgaggacctcgccaaggacctttgatcagttagcactggaaaccaagtgggagctgtgaaccatagacccatgtcatgataaggacgccgcagatccagatgatgtgcttccaattgactacgaatcaccaaacaatgatgacggctacgtcggctacgacgacggacgtgattactctagcgacagctcctattattactagcttagctggtagtcaaataaatgtaggagtatggaatgaaggatcgtttatgttggttgcatgttgaacaatttgaagtatgtgtcatgtcgagtcctattattactagcttagctggtaaagaaccagatgatgttgtctagcttttgttggttgtatgttgaacaattcgaagtattccaagtattgtttacttgtgacatgttgtggctgtccagattcactgattattgttgcttgtgtgaaccaaatgctgcattgttgattttgattcgaaatggtcatgactctttgctgtgtccacttcattttacagaatgacatcagactggaaccatctgatgccaaagtatggcagcttcctcagccaagcagatcttgataatttggaccccgaccactttggtaataacctgcagttggatggaaacgcagagggatctaccccaccatcttcagtgaagaaggcaactcaaccaactaagctagcaaacttcttctcagaagatgatatgaggctttgtcatgcttggcttgcagtcagttgtgacccgatagttagcacaggccagaagcgtcaaggtttctggaatcgaattactgaggcttacaactcgagacatggaactatgccagaaaggactactaaatctttgatgagtaggtgggacagcatcaaaacacagtgttcaatcttctctgggtacatgactgttgtccttcgacaaaaccccagtggcctctctgatgcaacaaggatgaatcgaaatggatggaccatcacatgggtcagcaaaatcagagatctaacccagtttcaaatcaatcccacactgtcgacgttgatgcattcgtccaaggaaaaggcaaagaaggcccgatctgtggacacatcgtccacggattcaaagtacctgacccggatgggtgaactttcattggaacatttgtctgtttacaaatcagtagcctcaactaaggaaaggaagttggagtccatgaacagagtaaacaggcagaaactgatcctagagaagaagctgaaccttgagaaagtgaagatagatcggcaaaaactaaaggaggacaaggaagaggaggtaatgatcccaaacatggatctaagggtaaacgaacagaggacgatcttcaagtgctggtag

SEQ ID NO: 11598 - DNA, 834 bp, Zea Mays
atcagaagggccacgttctggattcttaaattaagcacaccaaggactcctttgctctttggacagagctgcggttgattttgaaaagaaggcacactctgataacctcgaacaaagtaaagcaatggagaaaaatatgattgctgtggctagtgagattgagaggcttcgaggagagcttgcaaatgctgaaaaaggggccactgctgtcaacccagcagcagctgttggtaactctgggtatgctgcgccttatggcaattctgcgtcaacatatactggaatgtatggcaatcctgatgcaacgtataccgcgcaggcttatcctgacgcttatagcactaatcagggtcacatgcacaccgtcgccaatccgcattacatgagtcaacctgttccctatggacaatacgagagccagcacaccaatgttcaaagatgactggctgcaagagatagctttgactcgcctgccatctcattgtaacaggatagtcgcagaatccaccatgttacattgaaagtgctgaagtcctcatgttcatgattttttttttatttatttggctaatttgttccagaatcgatgggttgaattttggagcaaaaacctctcgcgcctctccatttactaccctgatgattcctcagttagtgatggtgttattcagggacgatgatgcctctagccttttacgaatgcgaccgtccatgctcgccgagatcaagcttagggcatatttgggagtaaagtatttttatagtttcttgataatgctatgtttttaataatattttagtattttatatcataagatgtttggttgtgtttct

SEQ ID NO: 11599 - DNA, 9134 bp, Zea Mays
atgaggaccggcggcggcggcgcggtctggggcgggggagagagcagcgccttgggaggtccctgctcttgcgcgtgggaatgcagagggggcgagctcggctggcttcagatcccgacgacgctcggccatgacgagggagcagaggagggcgcaggatgggatttgaaattctctaggttacgttggctgcaattagcccttcattactcaatgattggtgatctagagcagtcactgaatttactcgctgaggttaatcttgcggaagaaggtgtattgcaactgctattggcatctattcataggttatctagtaggactggaagtgataatgaagccacagtgtcatccaagttaatggttttagctgttcgctttgcaacaagaatgataaaatgttacgggttacagaagcaaaccacagacaataattcagtaaagcttcatgaaatggctctccttttgatggcaataagaagtatccagagccgagtctctgcaaagaatcagaattctgtttggatgggagatgataagagctcattgaaaataggtacagaagtatttcagcatgattcttcagttccagttgttgtactggatggtgtttcatcagggccatcgggtgggttagatactcatgacaggcaagagttggttcctgtgtgtgttcctgatagcaacagcatgttagctctaacaccagttgggtcatctcttagtgcttcaacttttcatgatattgatactaataaaaggactacccaagttggaagtcaaaattttcaaggaaatatcaaggagatgattaacagatgggaaatgaataactttgacttaaaaattgtagtcagagaagcactgcagtctggtcgcctacctttggcagttcttcagttgcagcttttgcgccagagggaattagtttccaatgattattctgaagatgctttctctgaagttcatgaaattggaaggtccattgtgtatgacctgttgatgaagggtgaaactggattggctgtagcaacactagaaaggctaggaaatgatgtagagtcggacctaagacaacttatgcaaggtactgtcaggaggtcactaaggctacaaattgctgacgagatgaagaagcgtgggtacataacaccagatgactggaagatgctagaaactataacactaattgagcgtctctaccctagcagcagcttctggaacacatacttttacagggagaatgtcattcgtgatgctgcaaaaattgttacactgccaggagacgataaacctgtattggctctaaatattcgcaaccaccccattattgaatgtggtgatgttgacggagcagtgcttggttcttgggtgaacattaatgattgcactaaggagttttctgggagcaacatttctgatggttattgggcctgtgctgctgtgtggtcggatgcttggggtccgagaactgtggaccgtatattgctggaccagccttatcatgtacatgctcatgtcccatgggaatctcagtttgaatattttgttgctcataatgatgtggggaaagtctgcgaactcctggacatgattcccaatagcatactttcagaagggattattagagtaaacgtgaacagtttacaagctcctgccaacactctttctgatttaacagtccctgattacaacatgtacatatgtgactcagaagagcttgaacctttctgtgtggagataccacatgttaaagtatttagatctttgtggaatcatgagtcaacattatatattcgaatggtaatgcagcaggaattggcaaagagacacatctttatgaaagagtattggcaaagtactactgaaattatacctttgcttgctcgtgctggcatacttataaaggttggtctaaaggaagaatgttctacaatattttctgcttcagagattccagatgatgcccatcaccagggccgtgaaggcgcactgcataagctaatcatacgtttctgtgtgcaatataacttgccatatctactggacctctatctggacacctgtaatttgactcctgataaggattgtatccgtttactcaaagaaaacacaggtgattgcaagtgggcacaatggttactcttctccaggatcaaaggttatgagtatgaggcatcattctctaatgcacgttggaatttgtcaaagaaaatggtcaataatagtaatcctacggctgttgagatagatgaaatgttgtatacagtagatgatatggcagaacgaattggtgaaatgtctgcattagctaccttgatgtatgcttcagcaccaattcagaaatccatatgtactggaagtgtgaacagaagtggttcgtcttcccagtgcacattggagaacctggctccttgtctccagcaatttccaacactatggaaaacccttttttcagcttgttttggccaagatgaatatgggtgtttaaactactctgctgcgtatggaaaaagatcaatttcagagtacttgagatggcgctatagcgttttttcctctgctggaggagacacttcgttgttgcaaatgcttccatgttgggtcccaaagtctgttagaagattaattcaactatttgaacagggcccttttggaatgcaacttctatcaactgccccatcatctgaagagttattcactcacggtgtctccaattatatatacaattctactggatataccgaagccaatgcactgtccttagaagcatcgatccaaaaaagtgttgaagaagaattatattcttcccttgaggagaaagatgtgagagtggaacaccatttgcaccgtggtcgagccttagctgctttcaggcatcttattgctaagagggcttcacagttgaaatcagctagtgcacgtcaagtgatatccgcacagtctaatgttcaagcagatgtacaattgatacttgctcctctaagtcaagttgaacgatcaattcttatatcggtggctccactagctattacaaactttgaggactcgactctagttgcttcctgtatattcttgttggaactttgtggcctgtgtgccaacatgcttcgtttagatattgctgcactacgacgcatctcttcctactacaagtcagttcaagaaaataaacatgttgatctatctccaccaaggggcccagagctccatgtgcagtcccatggagctggtatagctcctgctctagctcgagcgctagctgaagattatgtccagtctgatcatctgcatgttttggagcagactcaaacctcgatggctcccaagcgggaacagacacaatatcctcttatttctattctgcaacaccttgaaaaagcaagtttgccatcattggaggaaggtaaaacttgtgggttttggcttttgactggtgttggtgatgcatctctttaccggtcgcaacagaatgaagcaagtcaacactggaatttggttactgaattctgtcaggcacactatctcccactaagtacaaaatatcttgcattactggccaatgacaatgattgggttggttttttaacagaagctcagatagctggattttctattgaagctgttattgaagtggcagccaaagagatcagggattcaagactgagggcccacatactgactgttctaaaaaatatgatatcacttcgaaggaaatcatctggtaatgtaccttcaggaagcagtgatccatctttctcttctgttgatggcaataatcccatggaacttttctgcattcttggagtctgtgaaaagcaaaaaaaccctggggaggcactcctaattaaagcaaaacaaatgcagtggtctttgcttgccatgattgcctcatgctttccggatgtaactcctctcacatgcttaagtgtttggcttgagattacagccgcaagggagatgtcctcgatcaaggtggatgatgtttccttgaaaatagcaaagaatgttggatctgctgttgaagccacaaataaattgccaagcactagcagaaatgttgaatttcgttacaataggaagaatccaaagcgaagacggttcctggaagcgtcacatgaaaagttatgtttctcaatagatagcacatgtgggccagattctgctgcaacttccaatcctatcagtattgttgaccatcagggaataggaaagccaatctcaggagaaaccataatgtccgttgatattgatgaaaggcttgcatctttatcaaacatggtagcagtgctttgcgaacaacaactgtttctaccattacttagagcttttgaaatgtttttgccttcctgctcccttctttccttcattcgttctctccaggcattttctcaaatgcgtcttcccgaggcttctgcacgtttggcatccttttcagcaagaataaaagatgaagcctctcatactcaactaaactcttccaaagaagtgtcagtaatagcagaatgggtggccactacagctgtaaaagctgcagatgctgtcctttcaaactgttcatcaatttatgagaagaggtgtctactgcagcttctttcagcagtggattttgctgatggtggcacttcatcatcttactttagccgaagatattggaagattaatctgtctgaaccatctttgtgtaaagatactgatgtgtacaactggaatgatttgatggatgatgcttctcttttaacatcattagaaaaggacggtcaatgggagcaagctcgaacttgggcaagacatctggagtcaagtggcatagcttgggaatctactcttgatcatgtcactgaatcacagtgcttgaattttagtaccattcgtcaatgatgtgcagcttggtagcatacccaaaccatcacatgtttgctgtctgaggcagaagccatggttgctgaatggaaggagtttctttgggatatcccacaagaacgtgcagccttgtggggtcactgtcaatctctctttatgagatattctttccctcctttaaaggctggattatttttccttaagcatgccgaagcagtaggaaaagagataccagcacaagagcttcatgaaatattattgctctctttacaatggctaagtggaactatgactaaatcctctccggtctatcctcttcatcttttgcgggaaattgagactagggtgtggctcctggctgttgagtcagagagtcaatccaaggttgatggtgaatttgccacttctgctgttgctcataacaaagctgttggaaacagtagcagtattatagaacatactgctgatatcatcacaaaaatagacagtaacatgagcttgccgcacatgaaaattacagaaaggaatagcacacgggacagtttatcataccaacatgtgcaactctttgagtctaacagtgaagcatcttcaacaacaataaataacacgcgagcaaagcgaaggatgaaaacaaattcaccacttaaacgaggtgtcaatgacaatattgaaagtagagctaatgagctggataacaattctaacactttacatagttcaaagattggtgaacaagctagaaatttgctctctgaagaggaatttgtaaagatggaagcatctttatctggttgggaacaaaatgttaggcctgtagatatggagaaggctgtgctctctttactggaatttgggcaaataactgctgctaagcaactccaacaaaagctgtctccatcatatattcctgaagaacttgtccttgttgatgttgctttaagaattgccaaaaacagcagtaatggagagatcaatttgtcatgctttgacacacaggctcttcggatacttcagtcactgagagtagcaaatagctgcgatatgattagcccatcacaggttatggagatactagctgcgaaatgtggtgagggtcgtgggcgagctcttattaggagaataataggagttgttcgaactgctagattattgggactcccattttccgaagcatttgagaaacaaccaattgaacttctacagttgctttccctgaaagctcaggattcttttgatgaagcgaaatttctagtggagacacacatcatgcctgcatctagcattgcaagaattctagctgattcgttcctaaaggggcttttggccgcacatcgtggaggctatttggattcccaaaaggaagagggtcctgcacctctattgtggagatcaagtgacttcttaaagtgggcaaaactatgtccatcagaatcagaaattggccatgctttgatgcgtttggtaatgactggacatgaagtaccacatgcttgtgaggttgaactcctaatattgtcgcaccacttctacatgtcatcttcttgtcttgatggagtggatgttctcgtcacatttgcagcaaatagagtggactcatatgttttagaggaggatttttcttgtttagctcgtttgatcactggagtgagcaatttccattccttgagcttcattctttcaatccttgtagagaatggccaattggagttgctgcttcaaaagtattctgccactgacacagccacagggacgcttgcatcggttcgaggatttaggatggctgttattacatcactgaaacagtttatcccgaatgatgacgacgctctctctatggtatacaagcactttgacatgaagcatgaagctgcttctctccttgaatcacgtgcagagcaatacatgaacagctggttatcacgatatgataaggaacggcgaaatgatgagcttctggacgctatgcatcatcttgtagagacagctgaggttctttcaactattgatgctggccaaagaacacatcgtgcttgtgcccgtgcttctcttctgtcacttcagatccgaataccagatcttttgtggattggtctttctgagaccaatgcccggcggatttttgtggaacaatctaggttccaggaagctcttattgttgctgaagcatacaacataaatcaacctatagaatgggccccagtcttttggaatcaaatgctaaaaccggatctaatcgagcaattcgtggctgagtttgtctcagtgctgcccctgcagccaccaatgcttctcgagcttgcaaggttttacagggcggaggttgcagccaggggggagcagtcacacttctctgtctggctttcacctggaggcttgcctgcagagtgggtgaaacatcttggtagatccttcaggagcctgctgcgtagaacaagggacatgaggctgaggctgcagttggcaactctggcgacaggcttcattgacgtccttgttatttgcaatagagttttggacaaagtcccggacaatgctggcccgctgatcctaaggaagggacatggtggagcataccttcctctcatgtagatatttcccttctctttttggtgcattggattcagaacttaattcttggcagttaggctatatattgaaaggcagatgaatcttgcaaatattatatgtatcagctttctttggttcagcatctttaaagtcaagcttggctgcagtcttggacatggattctcatcgatgatgccatgaaagacttttgtgattgtatgtgcagcattttgagcggaaaagctggcagaaatgggatttttgcagcttcatccggcaggtgttttcgcacccatgatatattgtatgttttgcatgtacgaagatccgccccgtatttgttttcctcttttttttttggttttgcaagtgtcatgtaggtcgatttgctgtctgtgatttggactgcaagtctgcaaccagacggcagatgcgtcgagacgtcgagtgtccagtccagcgaaagcgtaaatacaaagcacatggacgttaaccagacggcagatagcctttgtttgttgttctactggtaatgttcttattttctaaccatggttttacaacccaggggatcttgtcctggcaactgctgagatcaactcatcacaagttgaatctcagagctctatcggatacctgtactcaggcagtcttcaaaacgttttctactattccccgagtgaagtctttagcatggggatactgttctgatgcttttgatgactcaagttttaatgaaattctagtggtatcaagtgatgcttctatcacagtccatgcattctgccattctcgcaaaagcacactaacagttaattcaatgtctgatgctaaagagttgcatggggagtggaaagagtggcgccctactgaatgttcagtgttggaggatggtgagtcaggtccagataattggttttgttcttttcctaactacagtcactgcgtctgtttctaatggaaaaataccaagccagattgcccatgaaatctttattgcctaattcagcagaagttgtatcctttagcatatatgacattactctctctttcttgaaatattggtatagcaaatgttctctgaagactatggcggaaactgacagtgaatcaccacgacgttttcttagagcatcgtgcagttgtcagtgggagtgtctaaaagttttgtctagctcgtcatgttatttgatcggcttagttctgactcctaatgaatcagtacgttgtgaggcccatccatccaatgcggagtgtattttggttactgttctggagctaaaccactggggcatacagtggaactttgtggcagaccttcaggatgtatctgatggtattacgccaagtccaaaatgggttgattttcagttatcagatgtgtttcttgcctgccttaatacagcaggttttgttgccatttggaacgtgaaaactggtggtcttgtgacgtcattcagtgttcttcaacaatgcagaactgatctggagatgcctctgaggagctctatgtccattgtgacaaatttggacgagggaaatatccatgttgagaactttgttggcagaatgtttaagcggatgggatttgaaattctctaggttacgttggctgcaattagcccttcattactcaatgattggtgatctagagcaatagtatcagaagcagataaaaataaaatcacagtacaacacat

SEQ ID NO: 11600 - DNA, 10947 bp, Zea Mays
cccatgccgaagccaccagcgaaatgaacggaagaagagagcggagggaacaactgccgcacggcacggagacagacgcggacagaccgagcgattggtcggcgaccacctcacctccgccgccatccactcctcggctcgggctccacgcaatgttactcgttaccatcattagctgttgatgggcatatgaacgatgtccacatctcgtcagatagatgatgggcctgctgtactacagttatgcagatggacattgctacaaccccatctcaaactatcaaaatttcgagaggcttttatatctccaacaaggcgtctttttggactgctctcagaccatggggatcttgtcctggcaactgctgagatcaactcatcacaagttgaatctcatagagctctatcggatacctgtactcaggcagtcttcaaaacgttttctactattccccgagtgaagtctttagcatggggatactgttctgatgcttttgatgactcaagttttaatgaaattctagtggtatcaagtgatgcttctatcacagtccatgcattctgccattctcgcaaaagcacactaacagttaattcaatgtctgatgctaaagagttgcatggggagtggaaagagtggcgccctactgaatgttcagtgttggaggatggtgagtcaggtccagaaaattggttttgttctttcctaactacagtcactgcgtctgtttctaatggaaaataccaagccagattgcccatgaaatctttattgcctaattcagcagaagttgtatcctttagcatatatgacattactctctctttcttgaaatattggtatagcaaatgttctctgaagactatggcggaaactgacagtgaatcaccacgacgttttcttagagcatcgtgcagttgtcagtgggagtgtctaaaagttttgtctagctcgtcatgttatttgatcggcttagttctgactcctaatgaatcagtacgttgtgaggcccatccatccaatgcggagtgtattttggttactgttctggagctaaaccactggggcatacagtggaactttgtggcagaccttcaggatgtatctgatggtattacgccaagtccaaaatgggttgattttcagttatcagatgtgtttcttgcctgccttaatacagcaggttttgttgccatttggaacgtgaaaactggtggtcttgtgacgtcattcagtgttcttcaacaatgcagaactgatctggagatgcctctgaggagctctatgtccattgtgacaaatttggacgagggaaatatccatgttgagaactttgttggcagaatgtttaagcggttagttttggcatcatattcttatcttcttgctgttgtagatgaggttggagtagtgtatgtgttctatgcggatgacatcttaaacttcaaagctaatgtgcacgaaaactttgatctgcctgttatgaatcagtttgctgattgtttttctatctgggaagctgctggtcatgagataggaagtctatcattttgtgctaatcagtccatacaacaagggtcacttagtctaaccaaattggttcctgagttctcagggaaaagcgatgatattgtcaggcctagagaaagaagaaaatatagatgcgatgaaaatgaagtggacagctggccaagtggctttgtcactgcagggcagatgaaagttggggcaggttatcgtcgcacaaattcctcttgtttctttaggaggataattcttcctccatgcagatcacagcaggatgtaattagcctgtgtccacttggactaactagaatttttaaaggttctattgcggatggaaacgagcatgtcaaaatttttcattccgagttgcttatgtattcatcttttcttggcaaaggagatattgatattggttttatggacgaaatgcttccatttaaaaaggattccacttttgtcggagattctgttgtttgctcctgccagggatatttgtatttaattacccagtatggcctttctgtggtccttcctccagtttctatatcatccttttcatctcaatgtgacgctatcaaattctggcaaatgggtcctgctgctggtagcacatgcaatgctctgaacttactatctgttgacaaatcagacacaagctggaaaacctggcaaatagaagtcctggatagagctttgttgtatgaaggtcccgcactagcagacaggctctgttgggagaatggatgggatttgaaattctctaggttacgttggctgcaattagcccttcattactcaatgattggtgatctagagcagtcactgaatttactcgctgaggttaatcttgcggaagaaggtgtattgcaactgctattggcatctattcataggttatctagtaggactggaagtgataatgaagccacagtgtcatccaagttaatggttttagctgttcgctttgcaacaagaatgataaaatgttacgggttacagaagcaaaccacagacaataattcagtaaagcttcatgaaatggctctccttttgatggcaataagaagtatccagagccgagtctctgcaaagaatcagaattctgtttggatgggagatgataagagctcattgaaaatagggccatcgggtgggttagatactcatgacaggcaagagttggttcctgtgtgtgttcctgatagcaacagcatgttagctctaacaccagttgggtcatctcttagtgcttcaacttttcatgatattgatactaataaaaggactacccaagttggaagtcaaaattttcaaggaaatatcaaggagatgattaacagatgggaaatgaataactttgacttaaaaattgtagtcagagaagcactgcagtctggtcgcctacctttggcagttcttcagttgcagcttttgcgccagagggaattagtttccaatgattattctgaagatgctttctctgaagttcatgaaattggaaggtccattgtgtatgacctgttgatgaagggtgaaactggattggctgtagcaacactagaaaggctaggaaatgatgtagagtcggacctaagacaacttatgcaaggtactgtcaggaggtcactaaggctacaaattgctgacgagatgaagaagcgtgggtacataacaccagatgactggaagatgctagaaactataacactaattgagcgtctctaccctagcagcagcttctggaacacatacttttacagggagaatgtcattcgtgatgctgcaaaaattgttacactgccaggagacgataaacctgtattggctctaaatattcgcaaccaccccattattgaatgtggtgatgttgacggagcagtgcttggttcttgggtgaacattaatgattgcactaaggagttttctgggagcaacatttctgatggttattgggcctgtgctgctgtgtggtcggatgcttggggtccgagaactgtggaccgtatattgctggaccagccttatcatgtacatgctcatgtcccatgggaatctcagtttgaatattttgttgctcataatgatgtggggaaagtctgcgaactcctggacatgattcccaatagcatactttcagaagggattattagagtaaacgtgaacagtttacaagctcctgccaacactctttctgatttaacagtccctgattacaacatgtacatatgtgactcagaagagcttgaacctttctgtgtggagataccacatgttaaagtatttagatctttgtggaatcatgagtcaacattatatattcgaatggtaatgcagcaggaattggcaaagagacacatctttatgaaagagtattggcaaagtactactgaaattatacctttgcttgctcgtgctggcatacttataaaggttggtctaaaggaagaatgttctacaatattttctgcttcagagattccagatgatgcccatcaccagggccgtgaaggcgcactgcataagctaatcatacgtttctgtgtgcaatataacttgccatatctactggacctctatctggacacctgtaatttgactcctgataaggattgtatccgtttactcaaagaaaacacaggtgattgcaagtgggcacaatggttactcttctccaggatcaaaggttatgagtatgaggcatcattctctaatgcacgttggaatttgtcaaagaaaatggtcaataatagtaatcctacggctgttgagatagatgaaatgttgtatacagtagatgatatggcagaacgaattggtgaaatgtctgcattagctaccttgatgtatgcttcagcaccaattcagaaatccatatgtactggaagtgtgaacagaagtggttcgtcttcccagtgcacattggagaacctggctccttgtctccagcaatttccaacactatggaaaacccttttttcagcttgttttggccaagatgaatatgggtgtttaaactactctgctggtaatgcgtatggaaaaagatcaatttcagagtacttgagatggcgctatagcgttttttcctctgctggaggagacacttcgttgttgcaaatgcttccatgttgggtcccaaagtctgttagaagattaattcaactatttgaacagggcccttttggaatgcaacttctatcaactgccccatcatctgaagagttattcactcacggtgtctccaattatatatacaattctactggatataccgaagccaatgcactgtccttagaagcatcgatccaaaaaagtgttgaagaagaattatattcttcccttgaggagaaagatgtgagagtggaacaccatttgcaccgtggtcgagccttagctgctttcaggcatcttattgctaagagggcttcacagttgaaatcagctagtgcacgtcaagtgatatccgcacagtctaatgttcaagcagatgtacaattgatacttgctcctctaagtcaagttgaacgatcaattcttatatcggtggctccactagctattacaaactttgaggactcgactctagttgcttcctgtatattcttgttggaactttgtggcctgtgtgccaacatgcttcgtttagatattgctgcactacgacgcatctcttcctactacaagtcagttcaagaaaataaacatgttgatctatctccaccaaggggcccagagctccatgtgcagtcccatggagctggtatagctcctgctctagctcgagcgctagctgaagattatgtccagtctgatcatctgcatgttttggagcagactcaaacctcgatggctcccaagcgggaacagacacaatatcctcttatttctattctgcaacaccttgaaaaagcaagtttgccatcattggaggaaggtaaaacttgtgggttttggcttttgactggtgttggtgatgcatctctttaccggtcgcaacagaatgaagcaagtcaacactggaatttggttactgaattctgtcaggcacactatctcccactaagtacaaaatatcttgcattactggccaatgacaatgattgggttggttttttaacagaagctcagatagctggattttctattgaagctgttattgaagtggcagccaaagagatcagggattcaagactgagggcccacatactgactgttctaaaaaatatgatatcacttcgaaggaaatcatctggtaatgtaccttcaggaagcagtgatccatctttctcttctgttgatggcaataatcccatggaacttttctgcattcttggagtctgtgaaaagcaaaaaaaccctggggaggcactcctaattaaagcaaaacaaatgcagtggtctttgcttgccatgattgcctcatgctttccggatgtaactcctctcacatgcttaagtgtttggcttgagattacagccgcaagggagatgtcctcgatcaaggtggatgatgtttccttgaaaatagcaaagaatgttggatctgctgttgaagccacaaataaattgccaagcactagcagaaatgttgaatttcgttacaataggaagaatccaaagcgaagacggttcctggaagcgtcacatgaaaagttatgtttctcaatagatagcacatgtgggccagattctgctgcaacttccaatcctatcagtattgttgaccatcagggaataggaaagccaatctcaggagaaaccataatgtccgttgatattgatgaaaggcttgcatctttatcaaacatggtagcagtgctttgcgaacaacaactgtttctaccattacttagagcttttgaaatgtttttgccttcctgctcccttctttccttcattcgttctctccaggcattttctcaaatgcgtcttcccgaggcttctgcacgtttggcatccttttcagcaagaataaaagatgaagcctctcatactcaactaaactcttccaaagaagtgtcagtaatagcagaatgggtggccactacagctgtaaaagctgcagatgctgtcctttcaaactgttcatcaatttatgagaagaggtgtctactgcagcttctttcagcagtggattttgctgatggtggcacttcatcatcttactttagccgaagatattggaagattaatctgtctgaaccatctttgtgtaaagatactgatgtgtacaactggaatgatttgatggatgatgcttctcttttaacatcattagaaaaggacggtcaatgggagcaagctcgaacttgggcaagacatctggagtcaagtggcatagcttgggaatctactcttgatcatgtcactgaatcacaggcagaagccatggttgctgaatggaaggagtttctttgggatatcccacaagaacgtgcagccttgtggggtcactgtcaatctctctttatgagatattctttccctcctttaaaggctggattatttttccttaagcatgccgaagcagtaggaaaagagataccagcacaagagcttcatgaaatattattgctctctttacaatggctaagtggaactatgactaaatcctctccggtctatcctcttcatcttttgcgggaaattgagactagggtgtggctcctggctgttgagtcagagagtcaatccaaggttgatggtgaatttgccacttctgctgttgctcataacaaagctgttggaaacagtagcagtattatagaacatactgctgatatcatcacaaaaatagacagtaacatgagcttgccgcacatgaaaattacagaaaggaatagcacacgggacagtttatcataccaacatgtgcaactctttgagtctaacagtgaagcatcttcaacaacaataaataacacgcgagcaaagcgaaggatgaaaacaaattcaccacttaaacgaggtgtcaatgacaatattgaaagtagagctaatgagctggataacaattctaacactttacatagttcaaagattggtgaacaagctagaaatttgctctctgaagaggaatttgtaaagatggaagcatctttatctggttgggaacaaaatgttaggcctgtagatatggagaaggctgtgctctctttactggaatttgggcaaataactgctgctaagcaactccaacaaaagctgtctccatcatatattcctgaagaacttgtccttgttgatgttgctttaagaattgccaaaaacagcagtaatggagagatcaatttgtcatgctttgacacacaggctcttcggatacttcagtcactgagagtagcaaatagctgcgatatgattagcccatcacaggttatggagatactagctgcgaaatgtggtgagggtcgtgggcgagctcttattaggagaataataggagttgttcgaactgctagattattgggactcccattttccgaagcatttgagaaacaaccaattgaacttctacagttgctttccctgaaagctcaggattcttttgatgaagcgaaatttctagtggagacacacatcatgcctgcatctagcattgcaagaattctagctgattcgttcctaaaggggcttttggccgcacatcgtggaggctatttggattcccaaaaggaagagggtcctgcacctctattgtggagatcaagtgacttcttaaagtgggcaaaactatgtccatcagaatcagaaattggccatgctttgatgcgtttggtaatgactggacatgaagtaccacatgcttgtgaggttgaactcctaatattgtcgcaccacttctacatgtcatcttcttgtcttgatggagtggatgttctcgtcacatttgcagcaaatagagtggactcatatgttttagaggaggatttttcttgtttagctcgtttgatcactggagtgagcaatttccattccttgagcttcattctttcaatccttgtagagaatggccaattggagttgctgcttcaaaagtattctgccactgacacagccacagggacgcttgcatcggttcgaggatttaggatggctgttattacatcactgaaacagtttatcccgaatgatgacgacgctctctctatggtatacaagcactttgacatgaagcatgaagctgcttctctccttgaatcacgtgcagagcaatacatgaacagctggttatcacgatatgataaggaacggcgaaatgatgagcttctggacgctatgcatcatcttgtagagacagctgaggttctttcaactattgatgctggccaaagaacacatcgtgcttgtgcccgtgcttctcttctgtcacttcagatccgaataccagatcttttgtggattggtctttctgagaccaatgcccggcggatttttgtggaacaatctaggttccaggaagctcttattgttgctgaagcatacaacataaatcaacctatagaatgggccccagtcttttggaatcaaatgctaaaaccggatctaatcgagcaattcgtggctgagtttgtctcagtgctgcccctgcagccaccaatgcttctcgagcttgcaaggttttacagggcggaggttgcagccaggggggagcagtcacacttctctgtctggctttcacctggaggcttgcctgcagagtgggtgaaacatcttggtagatccttcaggagcctgctgcgtagaacaagggacgtccttgttatttgcaatagagttttggacaaagtcccggacaatgctggcccgctgatcctaaggaagggacatggtggagcataccttcctctcatgtagatatttcccttctctttttggtgcattggattcagaacttaattcttggcagttaggctatatattgaaaggcagatgaatcttgcaaatattatatgtatcagctttctttggttcagcatctttaaagtcaagcttggctgcagtcttggacatggattctcatcgatgatgccatgaaagacttttgtgattgtatgtgcagcattttgagcggaaaagctggcagaaatgggatttttgcagcttcatccggcaggtgttttcgcacccatgatatattgtatgttttgcatgtacgaagatccgccccgtatttgttttcctcttttttttttggttttgcaagtgtcatgtaggtcgatttgctgtctgtgatttggactgcaagtctgcaaccagacggcagatgcgtcgagacgtcgagtgtccagtccagcgaaagcgtaaatacaaagcacatggacgttaaccagacggcagatagcctttgtttgttgttctactggcagtcttcaaaacgttttctactattccccgagtgaagtctttagcatggggatactgttctgatgcttttgatgactcaagttttaatgaaattctagtggtatcaagtgatgcttctatcacagtccatgcattctgccattctcgcaaaagcacactaacagttaattcaatgtctgatgctaaagagttgcatggggagtggaaagagtggcgccctactgaatgttcagtgttggaggatggtgagtcaggtccagataattggttttgttcttttcctaactacagtcactgcgtctgtttctaatggaaaaataccaagccagattgcccatgaaatctttattgcctaattcagcagaagttgtatcctttagcatatatgacattactctctctttcttgaaatattggtatagcaaatgttctctgaagactatggcggaaactgacagtgaatcaccacgacgttttcttagagcatcgtgcagttgtcagtgggagtgtctaaaagttttgtctagctcgtcatgttatttgatcggcttagttctgactcctaatgaatcagtacgttgtgaggcccatccatccaatgcggagtgtattttggttactgttctggagctaaaccactggggcatacagtggaactttgtggcagaccttcaggatgtatctgatggtattacgccaagtccaaaatgggttgattttcagttatcagatgtgtttcttgcctgccttaatacagcaggttttgttgccatttggaacgtgaaaactggtggtcttgtgacgtcattcagtgttcttcaacaatgcagaactgatctggagatgcctctgaggagctctatgtccattgtgacaaatttggacgagggaaatatccatgttgagaactttgttggcagaatgtttaagcggatgggatttgaaattctctaggttacgttggctgcaattagcccttcattactcaatgattggtgatctagagcaatagtatcagaagcagataaaaataaaatcacagtacaacacat

SEQ ID NO: 11601 - DNA, 2408 bp, Zea Mays
cccaccctggcatgaggccccatgccgaagccaccagcgaaatgaacggaagaagagagcggagggaacaactgccgcacggcacggagacagacgcggacagaccgagcgattggtcggcgaccacctcacctccgccgccatccactcctcggctcgggctccacgcaatgttactcgttaccatcattagctgttgatgggcatatgaacgatgtccacatctcgtcagatagatgatgggcctgctgtactacagttatgcagatggacattgctacaaccccatctcaaactatcaaaatttcgagaggcttttatatctccaacaaggcgtctttttggactgctctcagaccatggggatcttgtcctggcaactgctgagatcaactcatcacaagttgaatctcatagagctctatcggatacctgtactcaggcagtcttcaaaacgttttctactattccccgagtgaagtctttagcatggggatactgttctgatgcttttgatgactcaagttttaatgaaattctagtggtatcaagtgatgcttctatcacagtccatgcattctgccattctcgcaaaagcacactaacagttaattcaatgtctgatgctaaagagttgcatggggagtggaaagagtggcgccctactgaatgttcagtgttggaggatggtgagtcaggtccagaaaattggttttgttctttcctaactacagtcactgcgtctgtttctaatggaaaataccaagccagattgcccatgaaatctttattgcctaattcagcagaagttgtatcctttagcatatatgacattactctctctttcttgaaatattggtatagcaaatgttctctgaagactatggcggaaactgacagtgaatcaccacgacgttttcttagagcatcgtgcagttgtcagtgggagtgtctaaaagttttgtctagctcgtcatgttatttgatcggcttagttctgactcctaatgaatcagtacgttgtgaggcccatccatccaatgcggagtgtattttggttactgttctggagctaaaccactggggcatacagtggaactttgtggcagaccttcaggatgtatctgatggtattacgccaagtccaaaatgggttgattttcagttatcagatgtgtttcttgcctgccttaatacagcaggttttgttgccatttggaacgtgaaaactggtggtcttgtgacgtcattcagtgttcttcaacaatgcagaactgatctggagatgcctctgaggagctctatgtccattgtgacaaatttggacgagggaaatatccatgttgagaactttgttggcagaatgtttaagcggttagttttggcatcatattcttatcttcttgctgttgtagatgaggttggagtagtgtatgtgttctatgcggatgacatcttaaacttcaaagctaatgtgcacgaaaactttgatctgcctgttatgaatcagtttgctgattgtttttctatctgggaagctgctggtcatgagataggaagtctatcattttgtgctaatcagtccatacaacaagggtcacttagtctaaccaaattggttcctgagttctcagggaaaagcgatgatattgtcaggcctagagaaagaagaaaatatagatgcgatgaaaatgaagtggacagctggccaagtggctttgtcactgcagggcagatgaaagttggggcaggttatcgtcgcacaaattcctcttgtttctttaggaggataattcttcctccatgcagatcacagcaggatgtaattagcctgtgtccacttggactaactagaatttttaaaggttctattgcggatggaaacgagcatgtcaaaatttttcattccgagttgcttatgtattcatcttttcttggcaaaggagatattgatattggttttatggacgaaatgcttccatttaaaaaggattccacttttgtcggagattctgttgtttgctcctgccagggatatttgtatttaattacccagtatggcctttctgtggtccttcctccagtttctatatcatccttttcatctcaatgtgacgctatcaaattctggcaaatgggtcctgctgctggtagcacatgcaatgctctgaacttactatctgttgacaaatcagacacaagctggaaaacctggcaaatagaagtcctggatagagctttgttgtatgaaggtcccgcactagcagacaggctctgttgggagaatggatgggatttgaaattctctaggttacgttggctgcaattagcccttcattactcaatgattggtgatctagagcaatagtatcagaagcagataaaaataaaatcacagtacaacacat

SEQ ID NO: 11602 - DNA, 8999 bp, Zea Mays
atgaggaccggcggcggcggcgcggtctggggcgggggagagagcagcgccttgggaggtccctgctcttgcgcgtgggaatgcagagggggcgagctcggctggcttcagatcccgacgacgctcggccatgacgagggagcagaggagggcgcaggatgggatttgaaattctctaggttacgttggctgcaattagcccttcattactcaatgattggtgatctagagcagtcactgaatttactcgctgaggttaatcttgcggaagaaggtgtattgcaactgctattggcatctattcataggttatctagtaggactggaagtgataatgaagccacagtgtcatccaaaccatttaaggcactctatttttgggtcatggaactttacaggttaatggttttagctgttcgctttgcaacaagaatgataaaatgttacgggttacagaagcaaaccacagacaataattcagtaaagcttcatgaaatggctctccttttgatggcaataagaagtatccagagccgagtctctgcaaagaatcagaattctgtttggatgcagggagatgataagagctcattgaaaatagggccatcgggtgggttagatactcatgacaggcaagagttggttcctgtgtgtgttcctgatagcaacagcatgttagctctaacaccagttgggtcatctcttagtgcttcaacttttcatgatattgatactaataaaaggactacccaagttggaagtcaaaattttcaaggaaatatcaaggagatgattaacagatgggaaatgaataactttgacttaaaaattgtagtcagagaagcactgcagtctggtcgcctacctttggcagttcttcagttgcagcttttgcgccagagggaattagtttccaatgattattctgaagatgctttctctgaagttcatgaaattggaaggtccattgtgtatgacctgttgatgaagggtgaaactggattggctgtagcaacactagaaaggctaggaaatgatgtagagtcggacctaagacaacttatgcaaggtactgtcaggaggtcactaaggctacaaattgctgacgagatgaagaagcgtgggtacataacaccagatgactggaagatgctagaaactataacactaattgagcgtctctaccctagcagcagcttctggaacacatacttttacagggagaatgtcattcgtgatgctgcaaaaattgttacactgccaggagacgataaacctgtattggctctaaatattcgcaaccaccccattattgaatgtggtgatgttgacggagcagtgcttggttcttgggtgaacattaatgattgcactaaggagttttctgggagcaacatttctgatggttattgggcctgtgctgctgtgtggtcggatgcttggggtccgagaactgtggaccgtatattgctggaccagccttatcatgtacatgctcatgtcccatgggaatctcagtttgaatattttgttgctcataatgatgtggggaaagtctgcgaactcctggacatgattcccaatagcatactttcagaagggattattagagtaaacgtgaacagtttacaagctcctgccaacactctttctgatttaacagtccctgattacaacatgtacatatgtgactcagaagagcttgaacctttctgtgtggagataccacatgttaaagtatttagatctttgtggaatcatgagtcaacattatatattcgaatggtaatgcagcaggaattggcaaagagacacatctttatgaaagagtattggcaaagtactactgaaattatacctttgcttgctcgtgctggcatacttataaaggttggtctaaaggaagaatgttctacaatattttctgcttcagagattccagatgatgcccatcaccagggccgtgaaggcgcactgcataagctaatcatacgtttctgtgtgcaatataacttgccatatctactggacctctatctggacacctgtaatttgactcctgataaggattgtatccgtttactcaaagaaaacacaggtgattgcaagtgggcacaatggttactcttctccaggatcaaaggttatgagtatgaggcatcattctctaatgcacgttggaatttgtcaaagaaaatggtcaataatagtaatcctacggctgttgagatagatgaaatgttgtatacagtagatgatatggcagaacgaattggtgaaatgtctgcattagctaccttgatgtatgcttcagcaccaattcagaaatccatatgtactggaagtgtgaacagaagtggttcgtcttcccagtgcacattggagaacctggctccttgtctccagcaatttccaacactatggaaaacccttttttcagcttgttttggccaagatgaatatgggtgtttaaactactctgctggtaatgcgtatggaaaaagatcaatttcagagtacttgagatggcgctatagcgttttttcctctgctggaggagacacttcgttgttgcaaatgcttccatgttgggtcccaaagtctgttagaagattaattcaactatttgaacagggcccttttggaatgcaacttctatcaactgccccatcatctgaagagttattcactcacggtgtctccaattatatatacaattctactggatataccgaagccaatgcactgtccttagaagcatcgatccaaaaaagtgttgaagaagaattatattcttcccttgaggagaaagatgtgagagtggaacaccatttgcaccgtggtcgagccttagctgctttcaggcatcttattgctaagagggcttcacagttgaaatcagctagtgcacgtcaagtgatatccgcacagtctaatgttcaagcagatgtacaattgatacttgctcctctaagtcaagttgaacgatcaattcttatatcggtggctccactagctattacaaactttgaggactcgactctagttgcttcctgtatattcttgttggaactttgtggcctgtgtgccaacatgcttcgtttagatattgctgcactacgacgcatctcttcctactacaagtcagttcaagaaaataaacatgttgatctatctccaccaaggggcccagagctccatgtgcagtcccatggagctggtatagctcctgctctagctcgagcgctagctgaagattatgtccagtctgatcatctgcatgttttggagcagactcaaacctcgatggctcccaagcgggaacagacacaatatcctcttatttctattctgcaacaccttgaaaaagcaagtttgccatcattggaggaaggtaaaacttgtgggttttggcttttgactggtgttggtgatgcatctctttaccggtcgcaacagaatgaagcaagtcaacactggaatttggttactgaattctgtcaggcacactatctcccactaagtacaaaatatcttgcattactggccaatgacaatgattgggttggttttttaacagaagctcagatagctggattttctattgaagctgttattgaagtggcagccaaagagatcagggattcaagactgagggcccacatactgactgttctaaaaaatatgatatcacttcgaaggaaatcatctggtaatgtaccttcaggaagcagtgatccatctttctcttctgttgatggcaataatcccatggaacttttctgcattcttggagtctgtgaaaagcaaaaaaaccctggggaggcactcctaattaaagcaaaacaaatgcagtggtctttgcttgccatgattgcctcatgctttccggatgtaactcctctcacatgcttaagtgtttggcttgagattacagccgcaagggagatgtcctcgatcaaggtggatgatgtttccttgaaaatagcaaagaatgttggatctgctgttgaagccacaaataaattgccaagcactagcagaaatgttgaatttcgttacaataggaagaatccaaagcgaagacggttcctggaagcgtcacatgaaaagttatgtttctcaatagatagcacatgtgggccagattctgctgcaacttccaatcctatcagtattgttgaccatcagggaataggaaagccaatctcaggagaaaccataatgtccgttgatattgatgaaaggcttgcatctttatcaaacatggtagcagtgctttgcgaacaacaactgtttctaccattacttagagcttttgaaatgtttttgccttcctgctcccttctttccttcattcgttctctccaggcattttctcaaatgcgtcttcccgaggcttctgcacgtttggcatccttttcagcaagaataaaagatgaagcctctcatactcaactaaactcttccaaagaagtgtcagtaatagcagaatgggtggccactacagctgtaaaagctgcagatgctgtcctttcaaactgttcatcaatttatgagaagagaaaaggacggtcaatgggagcaagctcgaacttgggcaagacatctggagtcaagtggcatagcttgggaatctactcttgatcatgtcactgaatcacaggcagaagccatggttgctgaatggaaggagtttctttgggatatcccacaagaacgtgcagccttgtggggtcactgtcaatctctctttatgagatattctttccctcctttaaaggctggattatttttccttaagcatgccgaagcagtaggaaaagagataccagcacaagagcttcatgaaatattattgctctctttacaatggctaagtggaactatgactaaatcctctccggtctatcctcttcatcttttgcgggaaattgagactagggtgtggctcctggctgttgagtcagagagtcaatccaaggttgatggtgaatttgccacttctgctgttgctcataacaaagctgttggaaacagtagcagtattatagaacatactgctgatatcatcacaaaaatagacagtaacatgagcttgccgcacatgaaaattacagaaaggaatagcacacgggacagtttatcataccaacatgtgcaactctttgagtctaacagtgaagcatcttcaacaacaataaataacacgcgagcaaagcgaaggatgaaaacaaattcaccacttaaacgaggtgtcaatgacaatattgaaagtagagctaatgagctggataacaattctaacactttacatagttcaaagattggtgaacaagctagaaatttgctctctgaagaggaatttgtaaagatggaagcatctttatctggttgggaacaaaatgttaggcctgtagatatggagaaggctgtgctctctttactggaatttgggcaaataactgctgctaagcaactccaacaaaagctgtctccatcatatattcctgaagaacttgtccttgttgatgttgctttaagaattgccaaaaacagcagtaatggagagatcaatttgtcatgctttgacacacaggctcttcggatacttcagtcactgagagtagcaaatagctgcgatatgattagcccatcacaggttatggagatactagctgcgaaatgtggtgagggtcgtgggcgagctcttattaggagaataataggagttgttcgaactgctagattattgggactcccattttccgaagcatttgagaaacaaccaattgaacttctacagttgctttccctgaaagctcaggattcttttgatgaagcgaaatttctagtggagacacacatcatgcctgcatctagcattgcaagaattctagctgattcgttcctaaaggggcttttggccgcacatcgtggaggctatttggattcccaaaaggaagagggtcctgcacctctattgtggagatcaagtgacttcttaaagtgggcaaaactatgtccatcagaatcagaaattggccatgctttgatgcgtttggtaatgactggacatgaagtaccacatgcttgtgaggttgaactcctaatattgtcgcaccacttctacatgtcatcttcttgtcttgatggagtggatgttctcgtcacatttgcagcaaatagagtggactcatatgttttagaggaggatttttcttgtttagctcgtttgatcactggagtgagcaatttccattccttgagcttcattctttcaatccttgtagagaatggccaattggagttgctgcttcaaaagtattctgccactgacacagccacagggacgcttgcatcggttcgaggatttaggatggctgttattacatcactgaaacagtttatcccgaatgatgacgacgctctctctatggtatacaagcactttgacatgaagcatgaagctgcttctctccttgaatcacgtgcagagcaatacatgaacagctggttatcacgatatgataaggaacggcgaaatgatgagcttctggacgctatgcatcatcttgtagagacagctgaggttctttcaactattgatgctggccaaagaacacatcgtgcttgtgcccgtgcttctcttctgtcacttcagatccgaataccagatcttttgtggattggtctttctgagaccaatgcccggcggatttttgtggaacaatctaggttccaggaagctcttattgttgctgaagcatacaacataaatcaacctatagaatgggccccagtcttttggaatcaaatgctaaaaccggatctaatcgagcaattcgtggctgagtttgtctcagtgctgcccctgcagccaccaatgcttctcgagcttgcaaggttttacagggcggaggttgcagccaggggggagcagtcacacttctctgtctggctttcacctggaggcttgcctgcagagtgggtgaaacatcttggtagatccttcaggagcctgctgcgtagaacaagggacatgaggctgaggctgcagttggcaactctggcgacaggcttcattgacgtccttgttatttgcaatagagttttggacaaagtcccggacaatgctggcccgctgatcctaaggaagggacatggtggagcataccttcctctcatgtagatatttcccttctctttttggtgcattggattcagaacttaattcttggcagttaggctatatattgaaaggcagatgaatcttgcaaatattatatgtatcagctttctttggttcagcatctttaaagtcaagcttggctgcagtcttggacatggattctcatcgatgatgccatgaaagacttttgtgattgtatgtgcagcattttgagcggaaaagctggcagaaatgggatttttgcagcttcatccggcaggtgttttcgcacccatgatatattgtatgttttgcatgtacgaagatccgccccgtatttgttttcctcttttttttttggttttgcaagtgtcatgtaggtcgatttgctgtctgtgatttggactgcaagtctgcaaccagacggcagatgcgtcgagacgtcgagtgtccagtccagcgaaagcgtaaatacaaagcacatggacgttaaccagacggcagatagcctttgtttgttgttctactggtaatgttcttattttctaaccatggttttacaacccaggggatcttgtcctggcaactgctgagatcaactcatcacaagttgaatctcagagctctatcggatacctgtactcaggcagtcttcaaaacgttttctactattccccgagtgaagtctttagcatggggatactgttctgatgcttttgatgactcaagttttaatgaaattctagtggtatcaagtgatgcttctatcacagtccatgcattctgccattctcgcaaaagcacactaacagttaattcaatgtctgatgctaaagagttgcatggggagtggaaagagtggcgccctactgaatgttcagtgttggaggatggtgagtcaggtccagataattggttttgttcttttcctaactacagtcactgcgtctgtttctaatggaaaaataccaagccagattgcccatgaaatctttattgcctaattcagcagaagttgtatcctttagcatatatgacattactctctctttcttgaaatattggtatagcaaatgttctctgaagactatggcggaaactgacagtgaatcaccacgacgttttcttagagcatcgtgcagttgtcagtgggagtgtctaaaagttttgtctagctcgtcatgttatttgatcggcttagttctgactcctaatgaatcagtacgttgtgaggcccatccatccaatgcggagtgtattttggttactgttctggagctaaaccactggggcatacagtggaactttgtggcagaccttcaggatgtatctgatggtattacgccaagtccaaaatgggttgattttcagttatcagatgtgtttcttgcctgccttaatacagcaggttttgttgccatttggaacgtgaaaactggtggtcttgtgacgtcattcagtgttcttcaacaatgcagaactgatctggagatgcctctgaggagctctatgtccattgtgacaaatttggacgagggaaatatccatgttgagaactttgttggcagaatgtttaagcggttagttttggcatcatattcttatcttcttgctgttgtagatgaggttggagtagtgtatgtgttctatgcggatgacatcttaaacttcaaagctaatgtgcacgaaaactttgatctgcctgttatgaatcagtttgctgattgtttttctatctgggaagctgctggtcatgagataggaagtctatcattttgtgctaatcagtccatacaacaagggtcacttagggggtgtttggtttcta

SEQ ID NO: 11603 - DNA, 9022 bp, Zea Mays
atgaggaccggcggcggcggcgcggtctggggcgggggagagagcagcgccttgggaggtccctgctcttgcgcgtgggaatgcagagggggcgagctcggctggcttcagatcccgacgacgctcggccatgacgagggagcagaggagggcgcaggatgggatttgaaattctctaggttacgttggctgcaattagcccttcattactcaatgattggtgatctagagcagtcactgaatttactcgctgaggttaatcttgcggaagaaggtgtattgcaactgctattggcatctattcataggttatctagtaggactggaagtgataatgaagccacagtgtcatccaagttaatggttttagctgttcgctttgcaacaagaatgataaaatgttacgggttacagaagcaaaccacagacaataattcagtaaagcttcatgaaatggctctccttttgatggcaataagaagtatccagagccgagtctctgcaaagaatcagaattctgtttggatgcagggagatgataagagctcattgaaaataggtacagaagtatttcagcatgattcttcagttccagttgttgtactggatggtgtttcatcagggccatcgggtgggttagatactcatgacaggcaagagttggttcctgtgtgtgttcctgatagcaacagcatgttagctctaacaccagttgggtcatctcttagtgcttcaacttttcatgatattgatactaataaaaggactacccaagttggaagtcaaaattttcaaggaaatatcaaggagatgattaacagatgggaaatgaataactttgacttaaaaattgtagtcagagaagcactgcagtctggtcgcctacctttggcagttcttcagttgcagcttttgcgccagagggaattagtttccaatgattattctgaagatgctttctctgaagttcatgaaattggaaggtccattgtgtatgacctgttgatgaagggtgaaactggattggctgtagcaacactagaaaggctaggaaatgatgtagagtcggacctaagacaacttatgcaaggtactgtcaggaggtcactaaggctacaaattgctgacgagatgaagaagcgtgggtacataacaccagatgactggaagatgctagaaactataacactaattgagcgtctctaccctagcagcagcttctggaacacatacttttacagggagaatgtcattcgtgatgctgcaaaaattgttacactgccaggagacgataaacctgtattggctctaaatattcgcaaccaccccattattgaatgtggtgatgttgacggagcagtgcttggttcttgggtgaacattaatgattgcactaaggagttttctgggagcaacatttctgatggttattgggcctgtgctgctgtgtggtcggatgcttggggtccgagaactgtggaccgtatattgctggaccagccttatcatgtacatgctcatgtcccatgggaatctcagtttgaatattttgttgctcataatgatgtggggaaagtctgcgaactcctggacatgattcccaatagcatactttcagaagggattattagagtaaacgtgaacagtttacaagctcctgccaacactctttctgatttaacagtccctgattacaacatgtacatatgtgactcagaagagcttgaacctttctgtgtggagataccacatgttaaagtatttagatctttgtggaatcatgagtcaacattatatattcgaatggtaatgcagcaggaattggcaaagagacacatctttatgaaagagtattggcaaagtactactgaaattatacctttgcttgctcgtgctggcatacttataaaggttggtctaaaggaagaatgttctacaatattttctgcttcagagattccagatgatgcccatcaccagggccgtgaaggcgcactgcataagctaatcatacgtttctgtgtgcaatataacttgccatatctactggacctctatctggacacctgtaatttgactcctgataaggattgtatccgtttactcaaagaaaacacaggtgattgcaagtgggcacaatggttactcttctccaggatcaaaggttatgagtatgaggcatcattctctaatgcacgttggaatttgtcaaagaaaatggtcaataatagtaatcctacggctgttgagatagatgaaatgttgtatacagtagatgatatggcagaacgaattggtgaaatgtctgcattagctaccttgatgtatgcttcagcaccaattcagaaatccatatgtactggaagtgtgaacagaagtggttcgtcttcccagtgcacattggagaacctggctccttgtctccagcaatttccaacactatggaaaacccttttttcagcttgttttggccaagatgaatatgggtgtttaaactactctgctggtaatgcgtatggaaaaagatcaatttcagagtacttgagatggcgctatagcgttttttcctctgctggaggagacacttcgttgttgcaaatgcttccatgttgggtcccaaagtctgttagaagattaattcaactatttgaacaggagaaagatgtgagagtggaacaccatttgcaccgtggtcgagccttagctgctttcaggcatcttattgctaagagggcttcacagttgaaatcagctagtgcacgtcaagtgatatccgcacagtctaatgttcaagcagatgtacaattgatacttgctcctctaagtcaagttgaacgatcaattcttatatcggtggctccactagctattacaaactttgaggactcgactctagttgcttcctgtatattcttgttggaactttgtggcctgtgtgccaacatgcttcgtttagatattgctgcactacgacgcatctcttcctactacaagtcagttcaagaaaataaacatgttgatctatctccaccaaggggcccagagctccatgtgcagtcccatggagctggtatagctcctgctctagctcgagcgctagctgaagattatgtccagtctgatcatctgcatgttttggagcagactcaaacctcgatggctcccaagcgggaacagacacaatatcctcttatttctattctgcaacaccttgaaaaagcaagtttgccatcattggaggaaggtaaaacttgtgggttttggcttttgactggtgttggtgatgcatctctttaccggtcgcaacagaatgaagcaagtcaacactggaatttggttactgaattctgtcaggcacactatctcccactaagtacaaaatatcttgcattactggccaatgacaatgattgggttggttttttaacagaagctcagatagctggattttctattgaagctgttattgaagtggcagccaaagagatcagggattcaagactgagggcccacatactgactgttctaaaaaatatgatatcacttcgaaggaaatcatctggtaatgtaccttcaggaagcagtgatccatctttctcttctgttgatggcaataatcccatggaacttttctgcattcttggagtctgtgaaaagcaaaaaaaccctggggaggcactcctaattaaagcaaaacaaatgcagtggtctttgcttgccatgattgcctcatgctttccggatgtaactcctctcacatgcttaagtgtttggcttgagattacagccgcaagggagatgtcctcgatcaaggtggatgatgtttccttgaaaatagcaaagaatgttggatctgctgttgaagccacaaataaattgccaagcactagcagaaatgttgaatttcgttacaataggaagaatccaaagcgaagacggttcctggaagcgtcacatgaaaagttatgtttctcaatagatagcacatgtgggccagattctgctgcaacttccaatcctatcagtattgttgaccatcagggaataggaaagccaatctcaggagaaaccataatgtccgttgatattgatgaaaggcttgcatctttatcaaacatggtagcagtgctttgcgaacaacaactgtttctaccattacttagagcttttgaaatgtttttgccttcctgctcccttctttccttcattcgttctctccaggcattttctcaaatgcgtcttcccgaggcttctgcacgtttggcatccttttcagcaagaataaaagatgaagcctctcatactcaactaaactcttccaaagaagtgtcagtaatagcagaatgggtggccactacagctgtaaaagctgcagatgctgtcctttcaaactgttcatcaatttatgagaagaggtgtctactgcagcttctttcagcagtggattttgctgatggtggcacttcatcatcttactttagccgaagatattggaagattaatctgtctgaaccatctttgtgtaaagatactgatgtgtacaactggaatgatttgatggatgatgcttctcttttaacatcattagaaaaggacggtcaatgggagcaagctcgaacttgggcaagacatctggagtcaagtggcatagcttgggaatctactcttgatcatgtcactgaatcacaggcagaagccatggttgctgaatggaaggagtttctttgggatatcccacaagaacgtgcagccttgtggggtcactgtcaatctctctttatgagatattctttccctcctttaaaggctggattatttttccttaagcatgccgaagcagtaggaaaagagataccagcacaagagcttcatgaaatattattgctctctttacaatggctaagtggaactatgactaaatcctctccggtctatcctcttcatcttttgcgggaaattgagactagggtgtggctcctggctgttgagtcagagagtcaatccaaggttgatggtgaatttgccacttctgctgttgctcataacaaagctgttggaaacagtagcagtattatagaacatactgctgatatcatcacaaaaatagacagtaacatgagcttgccgcacatgaaaattacagaaaggaatagcacacgggacagtttatcataccaacatgtgcaactctttgagtctaacagtgaagcatcttcaacaacaataaataacacgcgagcaaagcgaaggatgaaaacaaattcaccacttaaacgaggtgtcaatgacaatattgaaagtagagctaatgagctggataacaattctaacactttacatagttcaaagattggtgaacaagctagaaatttgctctctgaagaggaatttgtaaagatggaagcatctttatctggttgggaacaaaatgttaggcctgtagatatggagaaggctgtgctctctttactggaatttgggcaaataactgctgctaagcaactccaacaaaagctgtctccatcatatattcctgaagaacttgtccttgttgatgttgctttaagaattgccaaaaacagcagtaatggagagatcaatttgtcatgctttgacacacaggctcttcggatacttcagtcactgagagtagcaaatagctgcgatatgattagcccatcacaggttatggagatactagctgcgaaatgtggtgagggtcgtgggcgagctcttattaggagaataataggagttgttcgaactgctagattattgggactcccattttccgaagcatttgagaaacaaccaattgaacttctacagttgctttccctgaaagctcaggattcttttgatgaagcgaaatttctagtggagacacacatcatgcctgcatctagcattgcaagaattctagctgattcgttcctaaaggggcttttggccgcacatcgtggaggctatttggattcccaaaaggaagagggtcctgcacctctattgtggagatcaagtgacttcttaaagtgggcaaaactatgtccatcagaatcagaaattggccatgctttgatgcgtttggtaatgactggacatgaagtaccacatgcttgtgaggttgaactcctaatattgtcgcaccacttctacatgtcatcttcttgtcttgatggagtggatgttctcgtcacatttgcagcaaatagagtggactcatatgttttagaggaggatttttcttgtttagctcgtttgatcactggagtgagcaatttccattccttgagcttcattctttcaatccttgtagagaatggccaattggagttgctgcttcaaaagtattctgccactgacacagccacagggacgcttgcatcggttcgaggatttaggatggctgttattacatcactgaaacagtttatcccgaatgatgacgacgctctctctatggtatacaagcactttgacatgaagcatgaagctgcttctctccttgaatcacgtgcagagcaatacatgaacagctggttatcacgatatgataaggaacggcgaaatgatgagcttctggacgctatgcatcatcttgtagagacagctgaggttctttcaactattgatgctggccaaagaacacatcgtgcttgtgcccgtgcttctcttctgtcacttcagatccgaataccagatcttttgtggattggtctttctgagaccaatgcccggcggatttttgtggaacaatctaggttccaggaagctcttattgttgctgaagcatacaacataaatcaacctatagaatgggccccagtcttttggaatcaaatgctaaaaccggatctaatcgagcaattcgtggctgagtttgtctcagtgctgcccctgcagccaccaatgcttctcgagcttgcaaggttttacagggcggaggttgcagccaggggggagcagtcacacttctctgtctggctttcacctggaggcttgcctgcagagtgggtgaaacatcttggtagatccttcaggagcctgctgcgtagaacaagggacatgaggctgaggctgcagttggcaactctggcgacaggcttcattgacgtccttgttatttgcaatagagttttggacaaagtcccggacaatgctggcccgctgatcctaaggaagggacatggtggagcataccttcctctcatgtagatatttcccttctctttttggtgcattggattcagaacttaattcttggcagttaggctatatattgaaaggcagatgaatcttgcaaatattatatgtatcagctttctttggttcagcatctttaaagtcaagcttggctgcagtcttggacatggattctcatcgatgatgccatgaaagacttttgtgattgtatgtgcagcattttgagcggaaaagctggcagaaatgggatttttgcagcttcatccggcaggtgttttcgcacccatgatatattgtatgttttgcatgtacgaagatccgccccgtatttgttttcctcttttttttttggttttgcaagtgtcatgtaggtcgatttgctgtctgtgatttggactgcaagtctgcaaccagacggcagatgcgtcgagacgtcgagtgtccagtccagcgaaagcgtaaatacaaagcacatggacgttaaccagacggcagatagcctttgtttgttgttctactggtaatgttcttattttctaaccatggttttacaacccaggggatcttgtcctggcaactgctgagatcaactcatcacaagttgaatctcagagctctatcggatacctgtactcaggcagtcttcaaaacgttttctactattccccgagtgaagtctttagcatggggatactgttctgatgcttttgatgactcaagttttaatgaaattctagtggtatcaagtgatgcttctatcacagtccatgcattctgccattctcgcaaaagcacactaacagttaattcaatgtctgatgctaaagagttgcatggggagtggaaagagtggcgccctactgaatgttcagtgttggaggatggtgagtcaggtccagataattggttttgttcttttcctaactacagtcactgcgtctgtttctaatggaaaaataccaagccagattgcccatgaaatctttattgcctaattcagcagaagttgtatcctttagcatatatgacattactctctctttcttgaaatattggtatagcaaatgttctctgaagactatggcggaaactgacagtgaatcaccacgacgttttcttagagcatcgtgcagttgtcagtgggagtgtctaaaagttttgtctagctcgtcatgttatttgatcggcttagttctgactcctaatgaatcagtacgttgtgaggcccatccatccaatgcggagtgtattttggttactgttctggagctaaaccactggggcatacagtggaactttgtggcagaccttcaggatgtatctgatggtattacgccaagtccaaaatgggttgattttcagttatcagatgtgtttcttgcctgccttaatacagcaggttttgttgccatttggaacgtgaaaactggtggtcttgtgacgtcattcagtgttcttcaacaatgcagaactgatctggagatgcctctgaggagctctatgtccattgtgacaaatttggacgagggaaatatccatgttgagaactttgttggcagaatgtttaagcggttagttttggcatcatattcttatcttcttgctgttgtagatgaggttggagtagtgtatgtgttctatgcggatgacatcttaaacttcaaagctaatgtgcacgaaaactttgatctgcctgttatgaatcagtttgctgattgtttttctatctgggaagctgctggtcatgagataggaagtctatcattttgtgctaatcagtccatacaacaagggtcacttagggggtgtttggtttcta

SEQ ID NO: 11604 - DNA, 9380 bp, Zea Mays
atgaggaccggcggcggcggcgcggtctggggcgggggagagagcagcgccttgggaggtccctgctcttgcgcgtgggaatgcagagggggcgagctcggctggcttcagatcccgacgacgctcggccatgacgagggagcagaggagggcgcaggatgggatttgaaattctctaggttacgttggctgcaattagcccttcattactcaatgattggtgatctagagcagtcactgaatttactcgctgaggttaatcttgcggaagaaggtgtattgcaactgctattggcatctattcataggttatctagtaggactggaagtgataatgaagccacagtgtcatccaaaccatttaaggcactctatttttgggtcatggaactttacaggttaatggttttagctgttcgctttgcaacaagaatgataaaatgttacgggttacagaagcaaaccacagacaataattcagtaaagcttcatgaaatggctctccttttgatggcaataagaagtatccagagccgagtctctgcaaagaatcagaattctgtttggatgttatcttcaaatgatcattttcttaatgctgtgcctacactgcagcagggagatgataagagctcattgaaaatagggccatcgggtgggttagatactcatgacaggcaagagttggttcctgtgtgtgttcctgatagcaacagcatgttagctctaacaccagttgggtcatctcttagtgcttcaacttttcatgatattgatactaataaaaggactacccaagttggaagtcaaaattttcaaggaaatatcaaggagatgattaacagatgggaaatgaataactttgacttaaaaattgtagtcagagaagcactgcagtctggtcgcctacctttggcagttcttcagttgcagcttttgcgccagagggaattagtttccaatgattattctgaagatgctttctctgaagttcatgaaattggaaggtccattgtgtatgacctgttgatgaagggtgaaactggattggctgtagcaacactagaaaggctaggaaatgatgtagagtcggacctaagacaacttatgcaaggtactgtcaggaggtcactaaggctacaaattgctgacgagatgaagaagcgtgggtacataacaccagatgactggaagatgctagaaactataacactaattgaggtttgattatacacatgctttagctcatttgtttactcaccctcttcaatatatcttaatgctgatcaacatttttccctgtggaaaagcgtctctaccctagcagcagcttctggaacacatacttttacagggagaatgtcattcgtgatgctgcaaaaattgttacactgccaggagacgataaacctgtattggctctaaatattcgcaaccaccccattattgaatgtggtgatgttgacggagcagtgcttggttcttgggtgaacattaatgattgcactaaggagttttctgggagcaacatttctgatggttattgggcctgtgctgctgtgtggtcggatgcttggggtccgagaactgtggaccgtatattgctggaccagccttatcatgtacatgctcatgtcccatgggaatctcagtttgaatattttgttgctcataatgatgtggggaaagtctgcgaactcctggacatgattcccaatagcatactttcagaagggattattagagtaaacgtgaacagtttacaagctcctgccaacactctttctgatttaacagtccctgattacaacatgtacatatgtgactcagaagagcttgaacctttctgtgtggagataccacatgttaaagtatttagatctttgtggaatcatgagtcaacattatatattcgaatggtaatgcagcaggaattggcaaagagacacatctttatgaaagagtattggcaaagtactactgaaattatacctttgcttgctcgtgctggcatacttataaaggttggtctaaaggaagaatgttctacaatattttctgcttcagagattccagatgatgcccatcaccagggccgtgaaggcgcactgcataagctaatcatacgtttctgtgtgcaatataacttgccatatctactggacctctatctggacacctgtaatttgactcctgataaggattgtatccgtttactcaaagaaaacacaggtgattgcaagtgggcacaatggttactcttctccaggatcaaaggttatgagtatgaggcatcattctctaatgcacgttggaatttgtcaaagaaaatggtcaataatagtaatcctacggctgttgagatagatgaaatgttgtatacagtagatgatatggcagaacgaattggtgaaatgtctgcattagctaccttgatgtatgcttcagcaccaattcagaaatccatatgtactggaagtgtgaacagaagtggttcgtcttcccagtgcacattggagaacctggctccttgtctccagcaatttccaacactatggaaaacccttttttcagcttgttttggccaagatgaatatgggtgtttaaactactctgctgcgtatggaaaaagatcaatttcagagtacttgagatggcgctatagcgttttttcctctgctggaggagacacttcgttgttgcaaatgcttccatgttgggtcccaaagtctgttagaagattaattcaactatttgaacagggcccttttggaatgcaacttctatcaactgccccatcatctgaagagttattcactcacggtgtctccaattatatatacaattctactggatataccgaagccaatgcactgtccttagaagcatcgatccaaaaaagtgttgaagaagaattatattcttcccttgaggagaaagatgtgagagtggaacaccatttgcaccgtggtcgagccttagctgctttcaggcatcttattgctaagagggcttcacagttgaaatcagctagtgcacgtcaagtgatatccgcacagtctaatgttcaagcagatgtacaattgatacttgctcctctaagtcaagttgaacgatcaattcttatatcggtggctccactagctattacaaactttgaggactcgactctagttgcttcctgtatattcttgttggaactttgtggcctgtgtgccaacatgcttcgtttagatattgctgcactacgacgcatctcttcctactacaagtcagttcaagaaaataaacatgttgatctatctccaccaaggggcccagagctccatgtgcagtcccatggagctggtatagctcctgctctagctcgagcgctagctgaagattatgtccagtctgatcatctgcatgttttggagcagactcaaacctcgatggctcccaagcgggaacagacacaatatcctcttatttctattctgcaacaccttgaaaaagcaagtttgccatcattggaggaaggtaaaacttgtgggttttggcttttgactggtgttggtgatgcatctctttaccggtcgcaacagaatgaagcaagtcaacactggaatttggttactgaattctgtcaggcacactatctcccactaagtacaaaatatcttgcattactggccaatgacaatgattgggttggttttttaacagaagctcagatagctggattttctattgaagctgttattgaagtggcagccaaagagatcagggattcaagactgagggcccacatactgactgttctaaaaaatatgatatcacttcgaaggaaatcatctggtaatgtaccttcaggaagcagtgatccatctttctcttctgttgatggcaataatcccatggaacttttctgcattcttggagtctgtgaaaagcaaaaaaaccctggggaggcactcctaattaaagcaaaacaaatgcagtggtctttgcttgccatgattgcctcatgctttccggatgtaactcctctcacatgcttaagtgtttggcttgagattacagccgcaagggagatgtcctcgatcaaggtggatgatgtttccttgaaaatagcaaagaatgttggatctgctgttgaagccacaaataaattgccaagcactagcagaaatgttgaatttcgttacaataggaagaatccaaagcgaagacggttcctggaagcgtcacatgaaaagttatgtttctcaatagatagcacatgtgggccagattctgctgcaacttccaatcctatcagtattgttgaccatcagggaataggaaagccaatctcaggagaaaccataatgtccgttgatattgatgaaaggcttgcatctttatcaaacatggtagcagtgctttgcgaacaacaactgtttctaccattacttagagcttttgaaatgtttttgccttcctgctcccttctttccttcattcgttctctccaggcattttctcaaatgcgtcttcccgaggcttctgcacgtttggcatccttttcagcaagaataaaagatgaagcctctcatactcaactaaactcttccaaagaagtgtcagtaatagcagaatgggtggccactacagctgtaaaagctgcagatgctgtcctttcaaactgttcatcaatttatgagaagaggtgtctactgcagcttctttcagcagtggattttgctgatggtggcacttcatcatcttactttagccgaagatattggaagattaatctgtctgaaccatctttgtgtaaagatactgatgtgtacaactggaatgatttgatggatgatgcttctcttttaacatcattagaaaaggacggtcaatgggagcaagctcgaacttgggcaagacatctggagtcaagtggcatagcttgggaatctactcttgatcatgtcactgaatcacaggcagaagccatggttgctgaatggaaggagtttctttgggatatcccacaagaacgtgcagccttgtggggtcactgtcaatctctctttatgagatattctttccctcctttaaaggctggattatttttccttaagcatgccgaagcagtaggaaaagagataccagcacaagagcttcatgaaatattattgctctctttacaatggctaagtggaactatgactaaatcctctccgtaagcttaatctttttatttatgttcacattgtgctcaatcttatcttctccttgccgattagcacttccgttttgcagggtctatcctcttcatcttttgcgggaaattgagactagggtgtggctcctggctgttgagtcagagagtcaatccaaggttgatggtgaatttgccacttctgctgttgctcataacaaagctgttggaaacagtagcagtattatagaacatactgctgatatcatcacaaaaatagacagtaacatgagcttgccgcacatgaaaattacagaaaggaatagcacacgggacagtttatcataccaacatgtgcaactctttgagtctaacagtgaagcatcttcaacaacaataaataacacgcgagcaaagcgaaggatgaaaacaaattcaccacttaaacgaggtgtcaatgacaatattgaaagtagagctaatgagctggataacaattctaacactttacatagttcaaagattggtgaacaagctagaaatttgctctctgaagaggaatttgtaaagatggaagcatctttatctggttgggaacaaaatgttaggcctgtagatatggagaaggctgtgctctctttactggaatttgggcaaataactgctgctaagcaactccaacaaaagctgtctccatcatatattcctgaagaacttgtccttgttgatgttgctttaagaattgccaaaaacagcagtaatggagagatcaatttgtcatgctttgacacacaggctcttcggatacttcagtcactgagagtagcaaatagctgcgatatgattagcccatcacaggttatggagatactagctgcgaaatgtggtgagggtcgtgggcgagctcttattaggagaataataggagttgttcgaactgctagattattgggactcccattttccgaagcatttgagaaacaaccaattgaacttctacagttgctttccctgaaagctcaggattcttttgatgaagcgaaatttctagtggagacacacatcatgcctgcatctagcattgcaagaattctagctgattcgttcctaaaggggcttttggccgcacatcgtggaggctatttggattcccaaaaggaagagggtcctgcacctctattgtggagatcaagtgacttcttaaagtgggcaaaactatgtccatcagaatcagaaattggccatgctttgatgcgtttggtaatgactggacatgaagtaccacatgcttgtgaggttgaactcctaatattgtcgcaccacttctacatgtcatcttcttgtcttgatggagtggatgttctcgtcacatttgcagcaaatagagtggactcatatgttttagaggaggatttttcttgtttagctcgtttgatcactggagtgagcaatttccattccttgagcttcattctttcaatccttgtagagaatggccaattggagttgctgcttcaaaagtattctgccactgacacagccacagggacgcttgcatcggttcgaggatttaggatggctgttattacatcactgaaacagtttatcccgaatgatgacgacgctctctctatggtatacaagcactttgacatgaagcatgaagctgcttctctccttgaatcacgtgcagagcaatacatgaacagctggttatcacgatatgataaggaacggcgaaatgatgagcttctggacgctatgcatcatcttgtagagacagctgaggttctttcaactattgatgctggccaaagaacacatcgtgcttgtgcccgtgcttctcttctgtcacttcagatccgaataccagatcttttgtggattggtctttctgagaccaatgcccggcggatttttgtggaacaatctaggttccaggaagctcttattgttgctgaagcatacaacataaatcaacctatagaatgggccccagtcttttggaatcaaatgctaaaaccggatctaatcgagcaattcgtggctgagtttgtctcagtgctgcccctgcagccaccaatgcttctcgagcttgcaaggttttacagggcggaggttgcagccaggggggagcagtcacacttctctgtctggctttcacctggaggcttgcctgcagagtgggtgaaacatcttggtagatccttcaggagcctgctgcgtagaacaagggacatgaggctgaggctgcagttggcaactctggcgacaggcttcattgacgtccttgttatttgcaatagagttttggacaaagtcccggacaatgctggcccgctgatcctaaggaagggacatggtggagcataccttcctctcatgtagatatttcccttctctttttggtgcattggattcagaacttaattcttggcagttaggctatatattgaaaggcagatgaatcttgcaaatattatatgtatcagctttctttggttcagcatctttaaagtcaagcttggctgcagtcttggacatggattctcatcgatgatgccatgaaagacttttgtgattgtatgtgcagcattttgagcggaaaagctggcagaaatgggatttttgcagcttcatccggcaggtgttttcgcacccatgatatattgtatgttttgcatgtacgaagatccgccccgtatttgttttcctcttttttttttggttttgcaagtgtcatgtaggtcgatttgctgtctgtgatttggactgcaagtctgcaaccagacggcagatgcgtcgagacgtcgagtgtccagtccagcgaaagcgtaaatacaaagcacatggacgttaaccagacggcagatagcctttgtttgttgttctactggtaatgttcttattttctaaccatggttttacaacccaggggatcttgtcctggcaactgctgagatcaactcatcacaagttgaatctcagagctctatcggatacctgtactcaggcagtcttcaaaacgttttctactattccccgagtgaagtctttagcatggggatactgttctgatgcttttgatgactcaagttttaatgaaattctagtggtatcaagtgatgcttctatcacagtccatgcattctgccattctcgcaaaagcacactaacagttaattcaatgtctgatgctaaagagttgcatggggagtggaaagagtggcgccctactgaatgttcagtgttggaggatggtgagtcaggtccagataattggttttgttcttttcctaactacagtcactgcgtctgtttctaatggaaaaataccaagccagattgcccatgaaatctttattgcctaattcagcagaagttgtatcctttagcatatatgacattactctctctttcttgaaatattggtatagcaaatgttctctgaagactatggcggaaactgacagtgaatcaccacgacgttttcttagagcatcgtgcagttgtcagtgggagtgtctaaaagttttgtctagctcgtcatgttatttgatcggcttagttctgactcctaatgaatcagtacgttgtgaggcccatccatccaatgcggagtgtattttggttactgttctggagctaaaccactggggcatacagtggaactttgtggcagaccttcaggatgtatctgatggtattacgccaagtccaaaatgggttgattttcagttatcagatgtgtttcttgcctgccttaatacagcaggttttgttgccatttggaacgtgaaaactggtggtcttgtgacgtcattcagtgttcttcaacaatgcagaactgatctggagatgcctctgaggagctctatgtccattgtgacaaatttggacgagggaaatatccatgttgagaactttgttggcagaatgtttaagcggttagttttggcatcatattcttatcttcttgctgttgtagatgaggttggagtagtgtatgtgttctatgcggatgacatcttaaacttcaaagctaatgtgcacgaaaactttgatctgcctgttatgaatcagtttgctgattgtttttctatctgggaagctgctggtcatgagataggaagtctatcattttgtgctaatcagtccatacaacaagggtcacttagggggtgtttggtttcta

SEQ ID NO: 11605 - DNA, 9016 bp, Zea Mays
atgaggaccggcggcggcggcgcggtctggggcgggggagagagcagcgccttgggaggtccctgctcttgcgcgtgggaatgcagagggggcgagctcggctggcttcagatcccgacgacgctcggccatgacgagggagcagaggagggcgcaggatgggatttgaaattctctaggttacgttggctgcaattagcccttcattactcaatgattggtgatctagagcagtcactgaatttactcgctgaggttaatcttgcggaagaaggtgtattgcaactgctattggcatctattcataggttatctagtaggactggaagtgataatgaagccacagtgtcatccaagttaatggttttagctgttcgctttgcaacaagaatgataaaatgttacgggttacagaagcaaaccacagacaataattcagtaaagcttcatgaaatggctctccttttgatggcaataagaagtatccagagccgagtctctgcaaagaatcagaattctgtttggatgcagggagatgataagagctcattgaaaataggtacagaagtatttcagcatgattcttcagttccagttgttgtactggatggtgtttcatcagggccatcgggtgggttagatactcatgacaggcaagagttggttcctgtgtgtgttcctgatagcaacagcatgttagctctaacaccagttgggtcatctcttagtgcttcaacttttcatgatattgatactaataaaaggactacccaagttggaagtcaaaattttcaaggaaatatcaaggagatgattaacagatgggaaatgaataactttgacttaaaaattgtagtcagagaagcactgcagtctggtcgcctacctttggcagttcttcagttgcagcttttgcgccagagggaattagtttccaatgattattctgaagatgctttctctgaagttcatgaaattggaaggtccattgtgtatgacctgttgatgaagggtgaaactggattggctgtagcaacactagaaaggctaggaaatgatgtagagtcggacctaagacaacttatgcaaggtactgtcaggaggtcactaaggctacaaattgctgacgagatgaagaagcgtgggtacataacaccagatgactggaagatgctagaaactataacactaattgagcgtctctaccctagcagcagcttctggaacacatacttttacagggagaatgtcattcgtgatgctgcaaaaattgttacactgccaggagacgataaacctgtattggctctaaatattcgcaaccaccccattattgaatgtggtgatgttgacggagcagtgcttggttcttgggtgaacattaatgattgcactaaggagttttctgggagcaacatttctgatggttattgggcctgtgctgctgtgtggtcggatgcttggggtccgagaactgtggaccgtatattgctggaccagccttatcatgtacatgctcatgtcccatgggaatctcagtttgaatattttgttgctcataatgatgtggggaaagtctgcgaactcctggacatgattcccaatagcatactttcagaagggattattagagtaaacgtgaacagtttacaagctcctgccaacactctttctgatttaacagtccctgattacaacatgtacatatgtgactcagaagagcttgaacctttctgtgtggagataccacatgttaaagtatttagatctttgtggaatcatgagtcaacattatatattcgaatggtaatgcagcaggaattggcaaagagacacatctttatgaaagagtattggcaaagtactactgaaattatacctttgcttgctcgtgctggcatacttataaaggttggtctaaaggaagaatgttctacaatattttctgcttcagagattccagatgatgcccatcaccagggccgtgaaggcgcactgcataagctaatcatacgtttctgtgtgcaatataacttgccatatctactggacctctatctggacacctgtaatttgactcctgataaggattgtatccgtttactcaaagaaaacacaggtgattgcaagtgggcacaatggttactcttctccaggatcaaaggttatgagtatgaggcatcattctctaatgcacgttggaatttgtcaaagaaaatggtcaataatagtaatcctacggctgttgagatagatgaaatgttgtatacagtagatgatatggcagaacgaattggtgaaatgtctgcattagctaccttgatgtatgcttcagcaccaattcagaaatccatatgtactggaagtgtgaacagaagtggttcgtcttcccagtgcacattggagaacctggctccttgtctccagcaatttccaacactatggaaaacccttttttcagcttgttttggccaagatgaatatgggtgtttaaactactctgctggtaatgcgtatggaaaaagatcaatttcagagtacttgagatggcgctatagcgttttttcctctgctggaggagacacttcgttgttgcaaatgcttccatgttgggtcccaaagtctgttagaagattaattcaactatttgaacagggcccttttggaatgcaacttctatcaactgccccatcatctgaagagttattcactcacggtgtctccaattatatatacaattctactggatataccgaagccaatgcactgtccttagaagcatcgatccaaaaaagtgttgaagaagaattatattcttcccttgaggagaaagatgtgagagtggaacaccatttgcaccgtggtcgagccttagctgctttcaggcatcttattgctaagagggcttcacagttgaaatcagctagtgcacgtcaagtgatatccgcacagtctaatgttcaagcagatgtacaattgatacttgctcctctaagtcaagttgaacgatcaattcttatatcggtggctccactagctattacaaactttgaggactcgactctagttgcttcctgtatattcttgttggaactttgtggcctgtgtgccaacatgcttcgtttagatattgctgcactacgacgcatctcttcctactacaagtcagttcaagaaaataaacatgttgatctatctccaccaaggggcccagagctccatgtgcagtcccatggagctggtatagctcctgctctagctcgagcgctagctgaagattatgtccagtctgatcatctgcatgttttggagcagactcaaacctcgatggctcccaagcgggaacagacacaatatcctcttatttctattctgcaacaccttgaaaaagcaagtttgccatcattggaggaaggtaaaacttgtgggttttggcttttgactggtgttggtgatgcatctctttaccggtcgcaacagaatgaagcaagtcaacactggaatttggttactgaattctgtcaggcacactatctcccactaagtacaaaatatcttgcattactggccaatgacaatgattgggttggttttttaacagaagctcagatagctggattttctattgaagctgttattgaagtggcagccaaagagatcagggattcaagactgagggcccacatactgactgttctaaaaaatatgatatcacttcgaaggaaatcatctggtaatgtaccttcaggaagcagtgatccatctttctcttctgttgatggcaataatcccatggaacttttctgcattcttggagtctgtgaaaagcaaaaaaaccctggggaggcactcctaattaaagcaaaacaaatgcagtggtctttgcttgccatgattgcctcatgctttccggatgtaactcctctcacatgcttaagtgtttggcttgagattacagccgcaagggagatgtcctcgatcaaggtggatgatgtttccttgaaaatagcaaagaatgttggatctgctgttgaagccacaaataaattgccaagcactagcagaaatgttgaatttcgttacaataggaagaatccaaagcgaagacggttcctggaagcgtcacatgaaaagttatgtttctcaatagatagcacatgtgggccagattctgctgcaacttccaatcctatcagtattgttgaccatcagggaataggaaagccaatctcaggagaaaccataatgtccgttgatattgatgaaaggcttgcatctttatcaaacatggtagcagtgctttgcgaacaacaactgtttctaccattacttagagcttttgaaatgtttttgccttcctgctcccttctttccttcattcgttctctccaggcattttctcaaatgcgtcttcccgaggcttctgcacgtttggcatccttttcagcaagaataaaagatgaagcctctcatactcaactaaactcttccaaagaagtgtcagtaatagcagaatgggtggccactacagctgtaaaagctgcagatgctgtcctttcaaactgttcatcaatttatgagaagaggtgtctactgcagcttctttcagcagtggattttgctgatggtggcacttcatcatcttactttagccgaagatattggaagattaatctgtctgaaccatctttgtgtaaagatactgatgtgtacaactggaatgatttgatggatgatgcttctcttttaacatcattagaaaaggacggtcaatgggagcaagctcgaacttgggcaagacatctggagtcaagtggcatagcttgggaatctactcttgatcatgtcactgaatcacaggcagaagccatggttgctgaatggaaggagtttctttgggatatcccacaagaacgtgcagccttgtggggtcactgtcaatctctctttatgagatattctttccctcctttaaaggctggattatttttccttaagcatgccgaagcagtaggaaaagagataccagcacaagagcttcatgaaatattattgctctctttacaatggctaagtggaactatgactaaatcctctccggtctatcctcttcatcttttgcgggaaattgagactagggtgtggctcctggctgttgagtcagagagtcaatccaaggttgatggtgaatttgccacttctgctgttgctcataacaaagctgttggaaacagtagcagtattatagaacatactgctgatatcatcacaaaaatagacagtaacatgagcttgccgcacatgaaaattacagaaaggaatagcacacgggacagtttatcataccaacatgtgcaactctttgagtctaacagtgaagcatcttcaacaacaataaataacacgcgagcaaagcgaaggatgaaaacaaattcaccacttaaacgaggtgtcaatgacaatattgaaagtagagctaatgagctggataacaattctaacactttacatagttcaaagattggtgaacaagctagaaatttgctctctgaagaggaatttgtaaagatggaagcatctttatctggttgggaacaaaatgttaggcctgtagatatggagaaggctgtgctctctttactggaatttgggcaaataactgctgctaagcaactccaacaaaagctgtctccatcatatattcctgaagaacttgtccttgttgatgttgctttaagaattgccaaaaacagcagtaatggagagatcaatttgtcatgctttgacacacaggctcttcggatacttcagtcactgagagtagcaaatagctgcgatatgattagcccatcacaggttatggagatactagctgcgaaatgtggtgagggtcgtgggcgagctcttattaggagaataataggagttgttcgaactgctagattattgggactcccattttccgaagcatttgagaaacaaccaattgaacttctacagttgctttccctgaaagctcaggattcttttgatgaagcgaaatttctagtggagacacacatcatgcctgcatctagcattgcaagaattctagctgattcgttcctaaaggggcttttggccgcacatcgtggaggctatttggattcccaaaaggaagagggtcctgcacctctattgtggagatcaagtgacttcttaaagtgggcaaaactatgtccatcagaatcagaaattggccatgctttgatgcgtttggtaatgactggacatgaagtaccacatgcttgtgaggttgaactcctaatattgtcgcaccacttctacatgtcatcttcttgtcttgatggagtggatgttctcgtcacatttgcagcaaatagagtggactcatatgttttagaggaggatttttcttgtttagctcgtttgatcactggagtgagcaatttccattccttgagcttcattctttcaatccttgtagagaatggccaattggagttgctgcttcaaaagtattctgccactgacacagccacagggacgcttgcatcggttcgaggatttaggatggctgttattacatcactgaaacagtttatcccgaatgatgacgacgctctctctatggtatacaagcactttgacatgaagcatgaagctgcttctctccttgaatcacgtgcagagcaatacatgaacagctggttatcacgatatgataaggaacggcgaaatgatgagcttctggacgctatgcatcatcttgtagagacagctgaggttctttcaactattgatgctggccaaagaacacatcgtgcttgtgcccgtgcttctcttctgtcacttcagatccgaataccagatcttttgtggattggtctttctgagaccaatgcccggcggatttttgtggaacaatctaggttccaggaagctcttattgttgctgaagcatacaacataaatcaacctatagaatgggccccagtcttttggaatcaaatgctaaaaccggatctaatcgagcaattcgtggctgagtttgtctcagtgctgcccctgcagccaccaatgcttctcgagcttgcaaggttttacagggcggaggttgcagccaggggggagcagtcacacttctctgtctggctttcacctggaggcttgcctgcagagtgggtgaaacatcttggtagatccttcaggagcctgctgcgtagaacaagggacatgaggctgaggctgcagttggcaactctggcgacaggcttcattgacgtccttgttatttgcaatagagttttggacaaagtcccggacaatgctggcccgctgatcctaaggaagggacatggtggagcataccttcctctcatgtagatatttcccttctctttttggtgcattggattcagaacttaattcttggcagttaggctatatattgaaaggcagatgaatcttgcaaatattatatgtatcagctttctttggttcagcatctttaaagtcaagcttggctgcagtcttggacatggattctcatcgatgatgccatgaaagacttttgtgattgtatgtgcagcattttgagcggaaaagctggcagaaatgggatttttgcagcttcatccggcaggtgttttcgcacccatgatatattgtatgttttgcatgtacgaagatccgccccgtatttgttttcctcttttttttttggttttgcaagtgtcatgtaggtcgatttgctgtctgtgatttggactgcaagtctgcaaccagacggcagatgcgtcgagacgtcgagtgtccagtccagcgaaagcgtaaatacaaagcacatggacgttaaccagacggcagatagcctttgtttgttgttctactggtaatgttcttattttctaaccatggttttacaacccaggggatcttgtcctggcaactgctgagatcaactcatcacaagttgaatctcagagctctatcggatacctgtactcaggcagtcttcaaaacgttttctactattccccgagtgaagtctttagcatggggatactgttctgatgcttttgatgactcaagttttaatgaaattctagtggtatcaagtgatgcttctatcacagtccatgcattctgccattctcgcaaaagcacactaacagttaattcaatgtctgatgctaaagagttgcatggggagtggaaagagtggcgccctactgaatgttcagtgttggaggatgcaaatgttctctgaagactatggcggaaactgacagtgaatcaccacgacgttttcttagagcatcgtgcagttgtcagtgggagtgtctaaaagttttgtctagctcgtcatgttatttgatcggcttagttctgactcctaatgaatcagtacgttgtgaggcccatccatccaatgcggagtgtattttggttactgttctggagctaaaccactggggcatacagtggaactttgtggcagaccttcaggatgtatctgatggtattacgccaagtccaaaatgggttgattttcagttatcagatgtgtttcttgcctgccttaatacagcaggttttgttgccatttggaacgtgaaaactggtggtcttgtgacgtcattcagtgttcttcaacaatgcagaactgatctggagatgcctctgaggagctctatgtccattgtgacaaatttggacgagggaaatatccatgttgagaactttgttggcagaatgtttaagcggttagttttggcatcatattcttatcttcttgctgttgtagatgaggttggagtagtgtatgtgttctatgcggatgacatcttaaacttcaaagctaatgtgcacgaaaactttgatctgcctgttatgaatcagtttgctgattgtttttctatctgggaagctgctggtcatgagataggaagtctatcattttgtgctaatcagtccatacaacaagggtcacttagggggtgtttggtttcta

SEQ ID NO: 11606 - DNA, 9055 bp, Zea Mays
atgaggaccggcggcggcggcgcggtctggggcgggggagagagcagcgccttgggaggtccctgctcttgcgcgtgggaatgcagagggggcgagctcggctggcttcagatcccgacgacgctcggccatgacgagggagcagaggagggcgcaggatgggatttgaaattctctaggttacgttggctgcaattagcccttcattactcaatgattggtgatctagagcagtcactgaatttactcgctgaggttaatcttgcggaagaaggtgtattgcaactgctattggcatctattcataggttatctagtaggactggaagtgataatgaagccacagtgtcatccaaaccatttaaggcactctatttttgggtcatggaactttacaggttaatggttttagctgttcgctttgcaacaagaatgataaaatgttacgggttacagaagcaaaccacagacaataattcagtaaagcttcatgaaatggctctccttttgatggcaataagaagtatccagagccgagtctctgcaaagaatcagaattctgtttggatgggagatgataagagctcattgaaaataggtacagaagtatttcagcatgattcttcagttccagttgttgtactggatggtgtttcatcagggccatcgggtgggttagatactcatgacaggcaagagttggttcctgtgtgtgttcctgatagcaacagcatgttagctctaacaccagttgggtcatctcttagtgcttcaacttttcatgatattgatactaataaaaggactacccaagttggaagtcaaaattttcaaggaaatatcaaggagatgattaacagatgggaaatgaataactttgacttaaaaattgtagtcagagaagcactgcagtctggtcgcctacctttggcagttcttcagttgcagcttttgcgccagagggaattagtttccaatgattattctgaagatgctttctctgaagttcatgaaattggaaggtccattgtgtatgacctgttgatgaagggtgaaactggattggctgtagcaacactagaaaggctaggaaatgatgtagagtcggacctaagacaacttatgcaaggtactgtcaggaggtcactaaggctacaaattgctgacgagatgaagaagcgtgggtacataacaccagatgactggaagatgctagaaactataacactaattgagcgtctctaccctagcagcagcttctggaacacatacttttacagggagaatgtcattcgtgatgctgcaaaaattgttacactgccaggagacgataaacctgtattggctctaaatattcgcaaccaccccattattgaatgtggtgatgttgacggagcagtgcttggttcttgggtgaacattaatgattgcactaaggagttttctgggagcaacatttctgatggttattgggcctgtgctgctgtgtggtcggatgcttggggtccgagaactgtggaccgtatattgctggaccagccttatcatgtacatgctcatgtcccatgggaatctcagtttgaatattttgttgctcataatgatgtggggaaagtctgcgaactcctggacatgattcccaatagcatactttcagaagggattattagagtaaacgtgaacagtttacaagctcctgccaacactctttctgatttaacagtccctgattacaacatgtacatatgtgactcagaagagcttgaacctttctgtgtggagataccacatgttaaagtatttagatctttgtggaatcatgagtcaacattatatattcgaatggtaatgcagcaggaattggcaaagagacacatctttatgaaagagtattggcaaagtactactgaaattatacctttgcttgctcgtgctggcatacttataaaggttggtctaaaggaagaatgttctacaatattttctgcttcagagattccagatgatgcccatcaccagggccgtgaaggcgcactgcataagctaatcatacgtttctgtgtgcaatataacttgccatatctactggacctctatctggacacctgtaatttgactcctgataaggattgtatccgtttactcaaagaaaacacaggtgattgcaagtgggcacaatggttactcttctccaggatcaaaggttatgagtatgaggcatcattctctaatgcacgttggaatttgtcaaagaaaatggtcaataatagtaatcctacggctgttgagatagatgaaatgttgtatacagtagatgatatggcagaacgaattggtgaaatgtctgcattagctaccttgatgtatgcttcagcaccaattcagaaatccatatgtactggaagtgtgaacagaagtggttcgtcttcccagtgcacattggagaacctggctccttgtctccagcaatttccaacactatggaaaacccttttttcagcttgttttggccaagatgaatatgggtgtttaaactactctgctggtaatgcgtatggaaaaagatcaatttcagagtacttgagatggcgctatagcgttttttcctctgctggaggagacacttcgttgttgcaaatgcttccatgttgggtcccaaagtctgttagaagattaattcaactatttgaacagggcccttttggaatgcaacttctatcaactgccccatcatctgaagagttattcactcacggtgtctccaattatatatacaattctactggatataccgaagccaatgcactgtccttagaagcatcgatccaaaaaagtgttgaagaagaattatattcttcccttgaggagaaagatgtgagagtggaacaccatttgcaccgtggtcgagccttagctgctttcaggcatcttattgctaagagggcttcacagttgaaatcagctagtgcacgtcaagtgatatccgcacagtctaatgttcaagcagatgtacaattgatacttgctcctctaagtcaagttgaacgatcaattcttatatcggtggctccactagctattacaaactttgaggactcgactctagttgcttcctgtatattcttgttggaactttgtggcctgtgtgccaacatgcttcgtttagatattgctgcactacgacgcatctcttcctactacaagtcagttcaagaaaataaacatgttgatctatctccaccaaggggcccagagctccatgtgcagtcccatggagctggtatagctcctgctctagctcgagcgctagctgaagattatgtccagtctgatcatctgcatgttttggagcagactcaaacctcgatggctcccaagcgggaacagacacaatatcctcttatttctattctgcaacaccttgaaaaagcaagtttgccatcattggaggaaggtaaaacttgtgggttttggcttttgactggtgttggtgatgcatctctttaccggtcgcaacagaatgaagcaagtcaacactggaatttggttactgaattctgtcaggcacactatctcccactaagtacaaaatatcttgcattactggccaatgacaatgattgggttggttttttaacagaagctcagatagctggattttctattgaagctgttattgaagtggcagccaaagagatcagggattcaagactgagggcccacatactgactgttctaaaaaatatgatatcacttcgaaggaaatcatctggtaatgtaccttcaggaagcagtgatccatctttctcttctgttgatggcaataatcccatggaacttttctgcattcttggagtctgtgaaaagcaaaaaaaccctggggaggcactcctaattaaagcaaaacaaatgcagtggtctttgcttgccatgattgcctcatgctttccggatgtaactcctctcacatgcttaagtgtttggcttgagattacagccgcaagggagatgtcctcgatcaaggtggatgatgtttccttgaaaatagcaaagaatgttggatctgctgttgaagccacaaataaattgccaagcactagcagaaatgttgaatttcgttacaataggaagaatccaaagcgaagacggttcctggaagcgtcacatgaaaagttatgtttctcaatagatagcacatgtgggccagattctgctgcaacttccaatcctatcagtattgttgaccatcagggaataggaaagccaatctcaggagaaaccataatgtccgttgatattgatgaaaggcttgcatctttatcaaacatggtagcagtgctttgcgaacaacaactgtttctaccattacttagagcttttgaaatgtttttgccttcctgctcccttctttccttcattcgttctctccaggcattttctcaaatgcgtcttcccgaggcttctgcacgtttggcatccttttcagcaagaataaaagatgaagcctctcatactcaactaaactcttccaaagaagtgtcagtaatagcagaatgggtggccactacagctgtaaaagctgcagatgctgtcctttcaaactgttcatcaatttatgagaagaggtgtctactgcagcttctttcagcagtggattttgctgatggtggcacttcatcatcttactttagccgaagatattggaagattaatctgtctgaaccatctttgtgtaaagatactgatgtgtacaactggaatgatttgatggatgatgcttctcttttaacatcattagaaaaggacggtcaatgggagcaagctcgaacttgggcaagacatctggagtcaagtggcatagcttgggaatctactcttgatcatgtcactgaatcacaggcagaagccatggttgctgaatggaaggagtttctttgggatatcccacaagaacgtgcagccttgtggggtcactgtcaatctctctttatgagatattctttccctcctttaaaggctggattatttttccttaagcatgccgaagcagtaggaaaagagataccagcacaagagcttcatgaaatattattgctctctttacaatggctaagtggaactatgactaaatcctctccggtctatcctcttcatcttttgcgggaaattgagactagggtgtggctcctggctgttgagtcagagagtcaatccaaggttgatggtgaatttgccacttctgctgttgctcataacaaagctgttggaaacagtagcagtattatagaacatactgctgatatcatcacaaaaatagacagtaacatgagcttgccgcacatgaaaattacagaaaggaatagcacacgggacagtttatcataccaacatgtgcaactctttgagtctaacagtgaagcatcttcaacaacaataaataacacgcgagcaaagcgaaggatgaaaacaaattcaccacttaaacgaggtgtcaatgacaatattgaaagtagagctaatgagctggataacaattctaacactttacatagttcaaagattggtgaacaagctagaaatttgctctctgaagaggaatttgtaaagatggaagcatctttatctggttgggaacaaaatgttaggcctgtagatatggagaaggctgtgctctctttactggaatttgggcaaataactgctgctaagcaactccaacaaaagctgtctccatcatatattcctgaagaacttgtccttgttgatgttgctttaagaattgccaaaaacagcagtaatggagagatcaatttgtcatgctttgacacacaggctcttcggatacttcagtcactgagagtagcaaatagctgcgatatgattagcccatcacaggttatggagatactagctgcgaaatgtggtgagggtcgtgggcgagctcttattaggagaataataggagttgttcgaactgctagattattgggactcccattttccgaagcatttgagaaacaaccaattgaacttctacagttgctttccctgaaagctcaggattcttttgatgaagcgaaatttctagtggagacacacatcatgcctgcatctagcattgcaagaattctagctgattcgttcctaaaggggcttttggccgcacatcgtggaggctatttggattcccaaaaggaagagggtcctgcacctctattgtggagatcaagtgacttcttaaagtgggcaaaactatgtccatcagaatcagaaattggccatgctttgatgcgtttggtaatgactggacatgaagtaccacatgcttgtgaggttgaactcctaatattgtcgcaccacttctacatgtcatcttcttgtcttgatggagtggatgttctcgtcacatttgcagcaaatagagtggactcatatgttttagaggaggatttttcttgtttagctcgtttgatcactggagtgagcaatttccattccttgagcttcattctttcaatccttgtagagaatggccaattggagttgctgcttcaaaagtattctgccactgacacagccacagggacgcttgcatcggttcgaggatttaggatggctgttattacatcactgaaacagtttatcccgaatgatgacgacgctctctctatggtatacaagcactttgacatgaagcatgaagctgcttctctccttgaatcacgtgcagagcaatacatgaacagctggttatcacgatatgataaggaacggcgaaatgatgagcttctggacgctatgcatcatcttgtagagacagctgaggttctttcaactattgatgctggccaaagaacacatcgtgcttgtgcccgtgcttctcttctgtcacttcagatccgaataccagatcttttgtggattggtctttctgagaccaatgcccggcggatttttgtggaacaatctaggttccaggaagctcttattgttgctgaagcatacaacataaatcaacctatagaatgggccccagtcttttggaatcaaatgctaaaaccggatctaatcgagcaattcgtggctgagtttgtctcagtgctgcccctgcagccaccaatgcttctcgagcttgcaaggttttacagggcggaggttgcagccaggggggagcagtcacacttctctgtctggctttcacctggaggcttgcctgcagagtgggtgaaacatcttggtagatccttcaggagcctgctgcgtagaacaagggacatgaggctgaggctgcagttggcaactctggcgacaggcttcattgacgtccttgttatttgcaatagagttttggacaaagtcccggacaatgctggcccgctgatcctaaggaagggacatggtggagcataccttcctctcatgtagatatttcccttctctttttggtgcattggattcagaacttaattcttggcagttaggctatatattgaaaggcagatgaatcttgcaaatattatatgtatcagctttctttggttcagcatctttaaagtcaagcttggctgcagtcttggacatggattctcatcgatgatgccatgaaagacttttgtgattgtatgtgcagcattttgagcggaaaagctggcagaaatgggatttttgcagcttcatccggcaggtgttttcgcacccatgatatattgtatgttttgcatgtacgaagatccgccccgtatttgttttcctcttttttttttggttttgcaagtgtcatgtaggtcgatttgctgtctgtgatttggactgcaagtctgcaaccagacggcagatgcgtcgagacgtcgagtgtccagtccagcgaaagcgtaaatacaaagcacatggacgttaaccagacggcagatagcctttgtttgttgttctactggtaatgttcttattttctaaccatggttttacaacccaggggatcttgtcctggcaactgctgagatcaactcatcacaagttgaatctcagagctctatcggatacctgtactcaggcagtcttcaaaacgttttctactattccccgagtgaagtctttagcatggggatactgttctgatgcttttgatgactcaagttttaatgaaattctagtggtatcaagtgatgcttctatcacagtccatgcattctgccattctcgcaaaagcacactaacagttaattcaatgtctgatgctaaagagttgcatggggagtggaaagagtggcgccctactgaatgttcagtgttggaggatgcaaatgttctctgaagactatggcggaaactgacagtgaatcaccacgacgttttcttagagcatcgtgcagttgtcagtgggagtgtctaaaagttttgtctagctcgtcatgttatttgatcggcttagttctgactcctaatgaatcagtacgttgtgaggcccatccatccaatgcggagtgtattttggttactgttctggagctaaaccactggggcatacagtggaactttgtggcagaccttcaggatgtatctgatggtattacgccaagtccaaaatgggttgattttcagttatcagatgtgtttcttgcctgccttaatacagcaggttttgttgccatttggaacgtgaaaactggtggtcttgtgacgtcattcagtgttcttcaacaatgcagaactgatctggagatgcctctgaggagctctatgtccattgtgacaaatttggacgagggaaatatccatgttgagaactttgttggcagaatgtttaagcggttagttttggcatcatattcttatcttcttgctgttgtagatgaggttggagtagtgtatgtgttctatgcggatgacatcttaaacttcaaagctaatgtgcacgaaaactttgatctgcctgttatgaatcagtttgctgattgtttttctatctgggaagctgctggtcatgagataggaagtctatcattttgtgctaatcagtccatacaacaagggtcacttagggggtgtttggtttcta

SEQ ID NO: 11607 - DNA, 11199 bp, Zea Mays
cggagggaacaactgccgcacggcacggagacagacgcggacagaccgagcgattggtcggcgaccacctcacctccgccgccatccactcctcggctcgggctccacgcaatgttactcgttaccatcattagctgttgatgggcatatgaacgatgtccacatctcgtcagatagatgatgggcctgctgtactacagttatgcagatggacattgctacaaccccatctcaaactatcaaaatttcgagaggcttttatatctccaacaaggcgtctttttggactgctctcagaccatggggatcttgtcctggcaactgctgagatcaactcatcacaagttgaatctcatagagctctatcggatacctgtactcaggcagtcttcaaaacgttttctactattccccgagtgaagtctttagcatggggatactgttctgatgcttttgatgactcaagttttaatgaaattctagtggtatcaagtgatgcttctatcacagtccatgcattctgccattctcgcaaaagcacactaacagttaattcaatgtctgatgctaaagagttgcatggggagtggaaagagtggcgccctactgaatgttcagtgttggaggatggtgagtcaggtccagaaaattggttttgttctttcctaactacagtcactgcgtctgtttctaatggaaaataccaagccagattgcccatgaaatctttattgcctaattcagcagaagttgtatcctttagcatatatgacattactctctctttcttgaaatattggtatagcaaatgttctctgaagactatggcggaaactgacagtgaatcaccacgacgttttcttagagcatcgtgcagttgtcagtgggagtgtctaaaagttttgtctagctcgtcatgttatttgatcggcttagttctgactcctaatgaatcagtacgttgtgaggcccatccatccaatgcggagtgtattttggttactgttctggagctaaaccactggggcatacagtggaactttgtggcagaccttcaggatgtatctgatggtattacgccaagtccaaaatgggttgattttcagttatcagatgtgtttcttgcctgccttaatacagcaggttttgttgccatttggaacgtgaaaactggtggtcttgtgacgtcattcagtgttcttcaacaatgcagaactgatctggagatgcctctgaggagctctatgtccattgtgacaaatttggacgagggaaatatccatgttgagaactttgttggcagaatgtttaagcggttagttttggcatcatattcttatcttcttgctgttgtagatgaggttggagtagtgtatgtgttctatgcggatgacatcttaaacttcaaagctaatgtgcacgaaaactttgatctgcctgttatgaatcagtttgctgattgtttttctatctgggaagctgctggtcatgagataggaagtctatcattttgtgctaatcagtccatacaacaagggtcacttagtctaaccaaattggttcctgagttctcagggaaaagcgatgatattgtcaggcctagagaaagaagaaaatatagatgcgatgaaaatgaagtggacagctggccaagtggctttgtcactgcagggcagatgaaagttggggcaggttatcgtcgcacaaattcctcttgtttctttaggaggataattcttcctccatgcagatcacagcaggatgtaattagcctgtgtccacttggactaactagaatttttaaaggttctattgcggatggaaacgagcatgtcaaaatttttcattccgagttgcttatgtattcatcttttcttggcaaaggagatattgatattggttttatggacgaaatgcttccatttaaaaaggattccacttttgtcggagattctgttgtttgctcctgccagggatatttgtatttaattacccagtatggcctttctgtggtccttcctccagtttctatatcatccttttcatctcaatgtgacgctatcaaattctggcaaatgggtcctgctgctggtagcacatgcaatgctctgaacttactatctgttgacaaatcagacacaagctggaaaacctggcaaatagaagtcctggatagagctttgttgtatgaaggtcccgcactagcagacaggctctgttgggagaatggatgggatttgaaattctctaggttacgttggctgcaattagcccttcattactcaatgattggtgatctagagcagtcactgaatttactcgctgaggttaatcttgcggaagaaggtgtattgcaactgctattggcatctattcataggttatctagtaggactggaagtgataatgaagccacagtgtcatccaagttaatggttttagctgttcgctttgcaacaagaatgataaaatgttacgggttacagaagcaaaccacagacaataattcagtaaagcttcatgaaatggctctccttttgatggcaataagaagtatccagagccgagtctctgcaaagaatcagaattctgtttggatgggagatgataagagctcattgaaaatagggccatcgggtgggttagatactcatgacaggcaagagttggttcctgtgtgtgttcctgatagcaacagcatgttagctctaacaccagttgggtcatctcttagtgcttcaacttttcatgatattgatactaataaaaggactacccaagttggaagtcaaaattttcaaggaaatatcaaggagatgattaacagatgggaaatgaataactttgacttaaaaattgtagtcagagaagcactgcagtctggtcgcctacctttggcagttcttcagttgcagcttttgcgccagagggaattagtttccaatgattattctgaagatgctttctctgaagttcatgaaattggaaggtccattgtgtatgacctgttgatgaagggtgaaactggattggctgtagcaacactagaaaggctaggaaatgatgtagagtcggacctaagacaacttatgcaaggtactgtcaggaggtcactaaggctacaaattgctgacgagatgaagaagcgtgggtacataacaccagatgactggaagatgctagaaactataacactaattgagcgtctctaccctagcagcagcttctggaacacatacttttacagggagaatgtcattcgtgatgctgcaaaaattgttacactgccaggagacgataaacctgtattggctctaaatattcgcaaccaccccattattgaatgtggtgatgttgacggagcagtgcttggttcttgggtgaacattaatgattgcactaaggagttttctgggagcaacatttctgatggttattgggcctgtgctgctgtgtggtcggatgcttggggtccgagaactgtggaccgtatattgctggaccagccttatcatgtacatgctcatgtcccatgggaatctcagtttgaatattttgttgctcataatgatgtggggaaagtctgcgaactcctggacatgattcccaatagcatactttcagaagggattattagagtaaacgtgaacagtttacaagctcctgccaacactctttctgatttaacagtccctgattacaacatgtacatatgtgactcagaagagcttgaacctttctgtgtggagataccacatgttaaagtatttagatctttgtggaatcatgagtcaacattatatattcgaatggtaatgcagcaggaattggcaaagagacacatctttatgaaagagtattggcaaagtactactgaaattatacctttgcttgctcgtgctggcatacttataaaggttggtctaaaggaagaatgttctacaatattttctgcttcagagattccagatgatgcccatcaccagggccgtgaaggcgcactgcataagctaatcatacgtttctgtgtgcaatataacttgccatatctactggacctctatctggacacctgtaatttgactcctgataaggattgtatccgtttactcaaagaaaacacaggtgattgcaagtgggcacaatggttactcttctccaggatcaaaggttatgagtatgaggcatcattctctaatgcacgttggaatttgtcaaagaaaatggtcaataatagtaatcctacggctgttgagatagatgaaatgttgtatacagtagatgatatggcagaacgaattggtgaaatgtctgcattagctaccttgatgtatgcttcagcaccaattcagaaatccatatgtactggaagtgtgaacagaagtggttcgtcttcccagtgcacattggagaacctggctccttgtctccagcaatttccaacactatggaaaacccttttttcagcttgttttggccaagatgaatatgggtgtttaaactactctgctggtaatgcgtatggaaaaagatcaatttcagagtacttgagatggcgctatagcgttttttcctctgctggaggagacacttcgttgttgcaaatgcttccatgttgggtcccaaagtctgttagaagattaattcaactatttgaacagggcccttttggaatgcaacttctatcaactgccccatcatctgaagagttattcactcacggtgtctccaattatatatacaattctactggatataccgaagccaatgcactgtccttagaagcatcgatccaaaaaagtgttgaagaagaattatattcttcccttgaggagaaagatgtgagagtggaacaccatttgcaccgtggtcgagccttagctgctttcaggcatcttattgctaagagggcttcacagttgaaatcagctagtgcacgtcaagtgatatccgcacagtctaatgttcaagcagatgtacaattgatacttgctcctctaagtcaagttgaacgatcaattcttatatcggtggctccactagctattacaaactttgaggactcgactctagttgcttcctgtatattcttgttggaactttgtggcctgtgtgccaacatgcttcgtttagatattgctgcactacgacgcatctcttcctactacaagtcagttcaagaaaataaacatgttgatctatctccaccaaggggcccagagctccatgtgcagtcccatggagctggtatagctcctgctctagctcgagcgctagctgaagattatgtccagtctgatcatctgcatgttttggagcagactcaaacctcgatggctcccaagcgggaacagacacaatatcctcttatttctattctgcaacaccttgaaaaagcaagtttgccatcattggaggaaggtaaaacttgtgggttttggcttttgactggtgttggtgatgcatctctttaccggtcgcaacagaatgaagcaagtcaacactggaatttggttactgaattctgtcaggcacactatctcccactaagtacaaaatatcttgcattactggccaatgacaatgattgggttggttttttaacagaagctcagatagctggattttctattgaagctgttattgaagtggcagccaaagagatcagggattcaagactgagggcccacatactgactgttctaaaaaatatgatatcacttcgaaggaaatcatctggtaatgtaccttcaggaagcagtgatccatctttctcttctgttgatggcaataatcccatggaacttttctgcattcttggagtctgtgaaaagcaaaaaaaccctggggaggcactcctaattaaagcaaaacaaatgcagtggtctttgcttgccatgattgcctcatgctttccggatgtaactcctctcacatgcttaagtgtttggcttgagattacagccgcaagggagatgtcctcgatcaaggtggatgatgtttccttgaaaatagcaaagaatgttggatctgctgttgaagccacaaataaattgccaagcactagcagaaatgttgaatttcgttacaataggaagaatccaaagcgaagacggttcctggaagcgtcacatgaaaagttatgtttctcaatagatagcacatgtgggccagattctgctgcaacttccaatcctatcagtattgttgaccatcagggaataggaaagccaatctcaggagaaaccataatgtccgttgatattgatgaaaggcttgcatctttatcaaacatggtagcagtgctttgcgaacaacaactgtttctaccattacttagagcttttgaaatgtttttgccttcctgctcccttctttccttcattcgttctctccaggcattttctcaaatgcgtcttcccgaggcttctgcacgtttggcatccttttcagcaagaataaaagatgaagcctctcatactcaactaaactcttccaaagaagtgtcagtaatagcagaatgggtggccactacagctgtaaaagctgcagatgctgtcctttcaaactgttcatcaatttatgagaagaggtgtctactgcagcttctttcagcagtggattttgctgatggtggcacttcatcatcttactttagccgaagatattggaagattaatctgtctgaaccatctttgtgtaaagatactgatgtgtacaactggaatgatttgatggatgatgcttctcttttaacatcattagaaaaggacggtcaatgggagcaagctcgaacttgggcaagacatctggagtcaagtggcatagcttgggaatctactcttgatcatgtcactgaatcacaggcagaagccatggttgctgaatggaaggagtttctttgggatatcccacaagaacgtgcagccttgtggggtcactgtcaatctctctttatgagatattctttccctcctttaaaggctggattatttttccttaagcatgccgaagcagtaggaaaagagataccagcacaagagcttcatgaaatattattgctctctttacaatggctaagtggaactatgactaaatcctctccggtctatcctcttcatcttttgcgggaaattgagactagggtgtggctcctggctgttgagtcagagagtcaatccaaggttgatggtgaatttgccacttctgctgttgctcataacaaagctgttggaaacagtagcagtattatagaacatactgctgatatcatcacaaaaatagacagtaacatgagcttgccgcacatgaaaattacagaaaggaatagcacacgggacagtttatcataccaacatgtgcaactctttgagtctaacagtgaagcatcttcaacaacaataaataacacgcgagcaaagcgaaggatgaaaacaaattcaccacttaaacgaggtgtcaatgacaatattgaaagtagagctaatgagctggataacaattctaacactttacatagttcaaagattggtgaacaagctagaaatttgctctctgaagaggaatttgtaaagatggaagcatctttatctggttgggaacaaaatgttaggcctgtagatatggagaaggctgtgctctctttactggaatttgggcaaataactgctgctaagcaactccaacaaaagctgtctccatcatatattcctgaagaacttgtccttgttgatgttgctttaagaattgccaaaaacagcagtaatggagagatcaatttgtcatgctttgacacacaggctcttcggatacttcagtcactgagagtagcaaatagctgcgatatgattagcccatcacaggttatggagatactagctgcgaaatgtggtgagggtcgtgggcgagctcttattaggagaataataggagttgttcgaactgctagattattgggactcccattttccgaagcatttgagaaacaaccaattgaacttctacagttgctttccctgaaagctcaggattcttttgatgaagcgaaatttctagtggagacacacatcatgcctgcatctagcattgcaagaattctagctgattcgttcctaaaggggcttttggccgcacatcgtggaggctatttggattcccaaaaggaagagggtcctgcacctctattgtggagatcaagtgacttcttaaagtgggcaaaactatgtccatcagaatcagaaattggccatgctttgatgcgtttggtaatgactggacatgaagtaccacatgcttgtgaggttgaactcctaatattgtcgcaccacttctacatgtcatcttcttgtcttgatggagtggatgttctcgtcacatttgcagcaaatagagtggactcatatgttttagaggaggatttttcttgtttagctcgtttgatcactggagtgagcaatttccattccttgagcttcattctttcaatccttgtagagaatggccaattggagttgctgcttcaaaagtattctgccactgacacagccacagggacgcttgcatcggttcgaggatttaggatggctgttattacatcactgaaacagtttatcccgaatgatgacgacgctctctctatggtatacaagcactttgacatgaagcatgaagctgcttctctccttgaatcacgtgcagagcaatacatgaacagctggttatcacgatatgataaggaacggcgaaatgatgagcttctggacgctatgcatcatcttgtagagacagctgaggttctttcaactattgatgctggccaaagaacacatcgtgcttgtgcccgtgcttctcttctgtcacttcagatccgaataccagatcttttgtggattggtctttctgagaccaatgcccggcggatttttgtggaacaatctaggttccaggaagctcttattgttgctgaagcatacaacataaatcaacctatagaatgggccccagtcttttggaatcaaatgctaaaaccggatctaatcgagcaattcgtggctgagtttgtctcagtgctgcccctgcagccaccaatgcttctcgagcttgcaaggttttacagggcggaggttgcagccaggggggagcagtcacacttctctgtctggctttcacctggaggcttgcctgcagagtgggtgaaacatcttggtagatccttcaggagcctgctgcgtagaacaagggacatgaggctgaggctgcagttggcaactctggcgacaggcttcattgacgtccttgttatttgcaatagagttttggacaaagtcccggacaatgctggcccgctgatcctaaggaagggacatggtggagcataccttcctctcatgtagatatttcccttctctttttggtgcattggattcagaacttaattcttggcagttaggctatatattgaaaggcagatgaatcttgcaaatattatatgtatcagctttctttggttcagcatctttaaagtcaagcttggctgcagtcttggacatggattctcatcgatgatgccatgaaagacttttgtgattgtatgtgcagcattttgagcggaaaagctggcagaaatgggatttttgcagcttcatccggcaggtgttttcgcacccatgatatattgtatgttttgcatgtacgaagatccgccccgtatttgttttcctcttttttttttggttttgcaagtgtcatgtaggtcgatttgctgtctgtgatttggactgcaagtctgcaaccagacggcagatgcgtcgagacgtcgagtgtccagtccagcgaaagcgtaaatacaaagcacatggacgttaaccagacggcagatagcctttgtttgttgttctactggtaatgttcttattttctaaccatggttttacaacccaggggatcttgtcctggcaactgctgagatcaactcatcacaagttgaatctcagagctctatcggatacctgtactcaggcagtcttcaaaacgttttctactattccccgagtgaagtctttagcatggggatactgttctgatgcttttgatgactcaagttttaatgaaattctagtggtatcaagtgatgcttctatcacagtccatgcattctgccattctcgcaaaagcacactaacagttaattcaatgtctgatgctaaagagttgcatggggagtggaaagagtggcgccctactgaatgttcagtgttggaggatggtgagtcaggtccagataattggttttgttcttttcctaactacagtcactgcgtctgtttctaatggaaaaataccaagccagattgcccatgaaatctttattgcctaattcagcagaagttgtatcctttagcatatatgacattactctctctttcttgaaatattggtatagcaaatgttctctgaagactatggcggaaactgacagtgaatcaccacgacgttttcttagagcatcgtgcagttgtcagtgggagtgtctaaaagttttgtctagctcgtcatgttatttgatcggcttagttctgactcctaatgaatcagtacgttgtgaggcccatccatccaatgcggagtgtattttggttactgttctggagctaaaccactggggcatacagtggaactttgtggcagaccttcaggatgtatctgatggtattacgccaagtccaaaatgggttgattttcagttatcagatgtgtttcttgcctgccttaatacagcaggttttgttgccatttggaacgtgaaaactggtggtcttgtgacgtcattcagtgttcttcaacaatgcagaactgatctggagatgcctctgaggagctctatgtccattgtgacaaatttggacgagggaaatatccatgttgagaactttgttggcagaatgtttaagcggttagttttggcatcatattcttatcttcttgctgttgtagatgaggttggagtagtgtatgtgttctatgcggatgacatcttaaacttcaaagctaatgtgcacgaaaactttgatctgcctgttatgaatcagtttgctgattgtttttctatctgggaagctgctggtcatgagataggaagtctatcattttgtgctaatcagtccatacaacaagggtcacttagggggtgtttggtttcta

SEQ ID NO: 11608 - DNA, 11253 bp, Zea Mays
cggagggaacaactgccgcacggcacggagacagacgcggacagaccgagcgattggtcggcgaccacctcacctccgccgccatccactcctcggctcgggctccacgcaatgttactcgttaccatcattagctgttgatgggcatatgaacgatgtccacatctcgtcagatagatgatgggcctgctgtactacagttatgcagatggacattgctacaaccccatctcaaactatcaaaatttcgagaggcttttatatctccaacaaggcgtctttttggactgctctcagaccatggggatcttgtcctggcaactgctgagatcaactcatcacaagttgaatctcatagagctctatcggatacctgtactcaggcagtcttcaaaacgttttctactattccccgagtgaagtctttagcatggggatactgttctgatgcttttgatgactcaagttttaatgaaattctagtggtatcaagtgatgcttctatcacagtccatgcattctgccattctcgcaaaagcacactaacagttaattcaatgtctgatgctaaagagttgcatggggagtggaaagagtggcgccctactgaatgttcagtgttggaggatggtgagtcaggtccagaaaattggttttgttctttcctaactacagtcactgcgtctgtttctaatggaaaataccaagccagattgcccatgaaatctttattgcctaattcagcagaagttgtatcctttagcatatatgacattactctctctttcttgaaatattggtatagcaaatgttctctgaagactatggcggaaactgacagtgaatcaccacgacgttttcttagagcatcgtgcagttgtcagtgggagtgtctaaaagttttgtctagctcgtcatgttatttgatcggcttagttctgactcctaatgaatcagtacgttgtgaggcccatccatccaatgcggagtgtattttggttactgttctggagctaaaccactggggcatacagtggaactttgtggcagaccttcaggatgtatctgatggtattacgccaagtccaaaatgggttgattttcagttatcagatgtgtttcttgcctgccttaatacagcaggttttgttgccatttggaacgtgaaaactggtggtcttgtgacgtcattcagtgttcttcaacaatgcagaactgatctggagatgcctctgaggagctctatgtccattgtgacaaatttggacgagggaaatatccatgttgagaactttgttggcagaatgtttaagcggttagttttggcatcatattcttatcttcttgctgttgtagatgaggttggagtagtgtatgtgttctatgcggatgacatcttaaacttcaaagctaatgtgcacgaaaactttgatctgcctgttatgaatcagtttgctgattgtttttctatctgggaagctgctggtcatgagataggaagtctatcattttgtgctaatcagtccatacaacaagggtcacttagtctaaccaaattggttcctgagttctcagggaaaagcgatgatattgtcaggcctagagaaagaagaaaatatagatgcgatgaaaatgaagtggacagctggccaagtggctttgtcactgcagggcagatgaaagttggggcaggttatcgtcgcacaaattcctcttgtttctttaggaggataattcttcctccatgcagatcacagcaggatgtaattagcctgtgtccacttggactaactagaatttttaaaggttctattgcggatggaaacgagcatgtcaaaatttttcattccgagttgcttatgtattcatcttttcttggcaaaggagatattgatattggttttatggacgaaatgcttccatttaaaaaggattccacttttgtcggagattctgttgtttgctcctgccagggatatttgtatttaattacccagtatggcctttctgtggtccttcctccagtttctatatcatccttttcatctcaatgtgacgctatcaaattctggcaaatgggtcctgctgctggtagcacatgcaatgctctgaacttactatctgttgacaaatcagacacaagctggaaaacctggcaaatagaagtcctggatagagctttgttgtatgaaggtcccgcactagcagacaggctctgttgggagaatggatgggatttgaaattctctaggttacgttggctgcaattagcccttcattactcaatgattggtgatctagagcagtcactgaatttactcgctgaggttaatcttgcggaagaaggtgtattgcaactgctattggcatctattcataggttatctagtaggactggaagtgataatgaagccacagtgtcatccaagttaatggttttagctgttcgctttgcaacaagaatgataaaatgttacgggttacagaagcaaaccacagtaaagcttcatgaaatggctctccttttgatggcaataagaagtatccagagccgagtctctgcaaagaatcagaattctgtttggatgcagggagatgataagagctcattgaaaataggtacagaagtatttcagcatgattcttcagttccagttgttgtactggatggtgtttcatcagggccatcgggtgggttagatactcatgacaggcaagagttggttcctgtgtgtgttcctgatagcaacagcatgttagctctaacaccagttgggtcatctcttagtgcttcaacttttcatgatattgatactaataaaaggactacccaagttggaagtcaaaattttcaaggaaatatcaaggagatgattaacagatgggaaatgaataactttgacttaaaaattgtagtcagagaagcactgcagtctggtcgcctacctttggcagttcttcagttgcagcttttgcgccagagggaattagtttccaatgattattctgaagatgctttctctgaagttcatgaaattggaaggtccattgtgtatgacctgttgatgaagggtgaaactggattggctgtagcaacactagaaaggctaggaaatgatgtagagtcggacctaagacaacttatgcaaggtactgtcaggaggtcactaaggctacaaattgctgacgagatgaagaagcgtgggtacataacaccagatgactggaagatgctagaaactataacactaattgagcgtctctaccctagcagcagcttctggaacacatacttttacagggagaatgtcattcgtgatgctgcaaaaattgttacactgccaggagacgataaacctgtattggctctaaatattcgcaaccaccccattattgaatgtggtgatgttgacggagcagtgcttggttcttgggtgaacattaatgattgcactaaggagttttctgggagcaacatttctgatggttattgggcctgtgctgctgtgtggtcggatgcttggggtccgagaactgtggaccgtatattgctggaccagccttatcatgtacatgctcatgtcccatgggaatctcagtttgaatattttgttgctcataatgatgtggggaaagtctgcgaactcctggacatgattcccaatagcatactttcagaagggattattagagtaaacgtgaacagtttacaagctcctgccaacactctttctgatttaacagtccctgattacaacatgtacatatgtgactcagaagagcttgaacctttctgtgtggagataccacatgttaaagtatttagatctttgtggaatcatgagtcaacattatatattcgaatggtaatgcagcaggaattggcaaagagacacatctttatgaaagagtattggcaaagtactactgaaattatacctttgcttgctcgtgctggcatacttataaaggttggtctaaaggaagaatgttctacaatattttctgcttcagagattccagatgatgcccatcaccagggccgtgaaggcgcactgcataagctaatcatacgtttctgtgtgcaatataacttgccatatctactggacctctatctggacacctgtaatttgactcctgataaggattgtatccgtttactcaaagaaaacacaggtgattgcaagtgggcacaatggttactcttctccaggatcaaaggttatgagtatgaggcatcattctctaatgcacgttggaatttgtcaaagaaaatggtcaataatagtaatcctacggctgttgagatagatgaaatgttgtatacagtagatgatatggcagaacgaattggtgaaatgtctgcattagctaccttgatgtatgcttcagcaccaattcagaaatccatatgtactggaagtgtgaacagaagtggttcgtcttcccagtgcacattggagaacctggctccttgtctccagcaatttccaacactatggaaaacccttttttcagcttgttttggccaagatgaatatgggtgtttaaactactctgctggtaatgcgtatggaaaaagatcaatttcagagtacttgagatggcgctatagcgttttttcctctgctggaggagacacttcgttgttgcaaatgcttccatgttgggtcccaaagtctgttagaagattaattcaactatttgaacagggcccttttggaatgcaacttctatcaactgccccatcatctgaagagttattcactcacggtgtctccaattatatatacaattctactggatataccgaagccaatgcactgtccttagaagcatcgatccaaaaaagtgttgaagaagaattatattcttcccttgaggagaaagatgtgagagtggaacaccatttgcaccgtggtcgagccttagctgctttcaggcatcttattgctaagagggcttcacagttgaaatcagctagtgcacgtcaagtgatatccgcacagtctaatgttcaagcagatgtacaattgatacttgctcctctaagtcaagttgaacgatcaattcttatatcggtggctccactagctattacaaactttgaggactcgactctagttgcttcctgtatattcttgttggaactttgtggcctgtgtgccaacatgcttcgtttagatattgctgcactacgacgcatctcttcctactacaagtcagttcaagaaaataaacatgttgatctatctccaccaaggggcccagagctccatgtgcagtcccatggagctggtatagctcctgctctagctcgagcgctagctgaagattatgtccagtctgatcatctgcatgttttggagcagactcaaacctcgatggctcccaagcgggaacagacacaatatcctcttatttctattctgcaacaccttgaaaaagcaagtttgccatcattggaggaaggtaaaacttgtgggttttggcttttgactggtgttggtgatgcatctctttaccggtcgcaacagaatgaagcaagtcaacactggaatttggttactgaattctgtcaggcacactatctcccactaagtacaaaatatcttgcattactggccaatgacaatgattgggttggttttttaacagaagctcagatagctggattttctattgaagctgttattgaagtggcagccaaagagatcagggattcaagactgagggcccacatactgactgttctaaaaaatatgatatcacttcgaaggaaatcatctggtaatgtaccttcaggaagcagtgatccatctttctcttctgttgatggcaataatcccatggaacttttctgcattcttggagtctgtgaaaagcaaaaaaaccctggggaggcactcctaattaaagcaaaacaaatgcagtggtctttgcttgccatgattgcctcatgctttccggatgtaactcctctcacatgcttaagtgtttggcttgagattacagccgcaagggagatgtcctcgatcaaggtggatgatgtttccttgaaaatagcaaagaatgttggatctgctgttgaagccacaaataaattgccaagcactagcagaaatgttgaatttcgttacaataggaagaatccaaagcgaagacggttcctggaagcgtcacatgaaaagttatgtttctcaatagatagcacatgtgggccagattctgctgcaacttccaatcctatcagtattgttgaccatcagggaataggaaagccaatctcaggagaaaccataatgtccgttgatattgatgaaaggcttgcatctttatcaaacatggtagcagtgctttgcgaacaacaactgtttctaccattacttagagcttttgaaatgtttttgccttcctgctcccttctttccttcattcgttctctccaggcattttctcaaatgcgtcttcccgaggcttctgcacgtttggcatccttttcagcaagaataaaagatgaagcctctcatactcaactaaactcttccaaagaagtgtcagtaatagcagaatgggtggccactacagctgtaaaagctgcagatgctgtcctttcaaactgttcatcaatttatgagaagaggtgtctactgcagcttctttcagcagtggattttgctgatggtggcacttcatcatcttactttagccgaagatattggaagattaatctgtctgaaccatctttgtgtaaagatactgatgtgtacaactggaatgatttgatggatgatgcttctcttttaacatcattagaaaaggacggtcaatgggagcaagctcgaacttgggcaagacatctggagtcaagtggcatagcttgggaatctactcttgatcatgtcactgaatcacaggcagaagccatggttgctgaatggaaggagtttctttgggatatcccacaagaacgtgcagccttgtggggtcactgtcaatctctctttatgagatattctttccctcctttaaaggctggattatttttccttaagcatgccgaagcagtaggaaaagagataccagcacaagagcttcatgaaatattattgctctctttacaatggctaagtggaactatgactaaatcctctccggtctatcctcttcatcttttgcgggaaattgagactagggtgtggctcctggctgttgagtcagagagtcaatccaaggttgatggtgaatttgccacttctgctgttgctcataacaaagctgttggaaacagtagcagtattatagaacatactgctgatatcatcacaaaaatagacagtaacatgagcttgccgcacatgaaaattacagaaaggaatagcacacgggacagtttatcataccaacatgtgcaactctttgagtctaacagtgaagcatcttcaacaacaataaataacacgcgagcaaagcgaaggatgaaaacaaattcaccacttaaacgaggtgtcaatgacaatattgaaagtagagctaatgagctggataacaattctaacactttacatagttcaaagattggtgaacaagctagaaatttgctctctgaagaggaatttgtaaagatggaagcatctttatctggttgggaacaaaatgttaggcctgtagatatggagaaggctgtgctctctttactggaatttgggcaaataactgctgctaagcaactccaacaaaagctgtctccatcatatattcctgaagaacttgtccttgttgatgttgctttaagaattgccaaaaacagcagtaatggagagatcaatttgtcatgctttgacacacaggctcttcggatacttcagtcactgagagtagcaaatagctgcgatatgattagcccatcacaggttatggagatactagctgcgaaatgtggtgagggtcgtgggcgagctcttattaggagaataataggagttgttcgaactgctagattattgggactcccattttccgaagcatttgagaaacaaccaattgaacttctacagttgctttccctgaaagctcaggattcttttgatgaagcgaaatttctagtggagacacacatcatgcctgcatctagcattgcaagaattctagctgattcgttcctaaaggggcttttggccgcacatcgtggaggctatttggattcccaaaaggaagagggtcctgcacctctattgtggagatcaagtgacttcttaaagtgggcaaaactatgtccatcagaatcagaaattggccatgctttgatgcgtttggtaatgactggacatgaagtaccacatgcttgtgaggttgaactcctaatattgtcgcaccacttctacatgtcatcttcttgtcttgatggagtggatgttctcgtcacatttgcagcaaatagagtggactcatatgttttagaggaggatttttcttgtttagctcgtttgatcactggagtgagcaatttccattccttgagcttcattctttcaatccttgtagagaatggccaattggagttgctgcttcaaaagtattctgccactgacacagccacagggacgcttgcatcggttcgaggatttaggatggctgttattacatcactgaaacagtttatcccgaatgatgacgacgctctctctatggtatacaagcactttgacatgaagcatgaagctgcttctctccttgaatcacgtgcagagcaatacatgaacagctggttatcacgatatgataaggaacggcgaaatgatgagcttctggacgctatgcatcatcttgtagagacagctgaggttctttcaactattgatgctggccaaagaacacatcgtgcttgtgcccgtgcttctcttctgtcacttcagatccgaataccagatcttttgtggattggtctttctgagaccaatgcccggcggatttttgtggaacaatctaggttccaggaagctcttattgttgctgaagcatacaacataaatcaacctatagaatgggccccagtcttttggaatcaaatgctaaaaccggatctaatcgagcaattcgtggctgagtttgtctcagtgctgcccctgcagccaccaatgcttctcgagcttgcaaggttttacagggcggaggttgcagccaggggggagcagtcacacttctctgtctggctttcacctggaggcttgcctgcagagtgggtgaaacatcttggtagatccttcaggagcctgctgcgtagaacaagggacatgaggctgaggctgcagttggcaactctggcgacaggcttcattgacgtccttgttatttgcaatagagttttggacaaagtcccggacaatgctggcccgctgatcctaaggaagggacatggtggagcataccttcctctcatgtagatatttcccttctctttttggtgcattggattcagaacttaattcttggcagttaggctatatattgaaaggcagatgaatcttgcaaatattatatgtatcagctttctttggttcagcatctttaaagtcaagcttggctgcagtcttggacatggattctcatcgatgatgccatgaaagacttttgtgattgtatgtgcagcattttgagcggaaaagctggcagaaatgggatttttgcagcttcatccggcaggtgttttcgcacccatgatatattgtatgttttgcatgtacgaagatccgccccgtatttgttttcctcttttttttttggttttgcaagtgtcatgtaggtcgatttgctgtctgtgatttggactgcaagtctgcaaccagacggcagatgcgtcgagacgtcgagtgtccagtccagcgaaagcgtaaatacaaagcacatggacgttaaccagacggcagatagcctttgtttgttgttctactggtaatgttcttattttctaaccatggttttacaacccaggggatcttgtcctggcaactgctgagatcaactcatcacaagttgaatctcagagctctatcggatacctgtactcaggcagtcttcaaaacgttttctactattccccgagtgaagtctttagcatggggatactgttctgatgcttttgatgactcaagttttaatgaaattctagtggtatcaagtgatgcttctatcacagtccatgcattctgccattctcgcaaaagcacactaacagttaattcaatgtctgatgctaaagagttgcatggggagtggaaagagtggcgccctactgaatgttcagtgttggaggatggtgagtcaggtccagataattggttttgttcttttcctaactacagtcactgcgtctgtttctaatggaaaaataccaagccagattgcccatgaaatctttattgcctaattcagcagaagttgtatcctttagcatatatgacattactctctctttcttgaaatattggtatagcaaatgttctctgaagactatggcggaaactgacagtgaatcaccacgacgttttcttagagcatcgtgcagttgtcagtgggagtgtctaaaagttttgtctagctcgtcatgttatttgatcggcttagttctgactcctaatgaatcagtacgttgtgaggcccatccatccaatgcggagtgtattttggttactgttctggagctaaaccactggggcatacagtggaactttgtggcagaccttcaggatgtatctgatggtattacgccaagtccaaaatgggttgattttcagttatcagatgtgtttcttgcctgccttaatacagcaggttttgttgccatttggaacgtgaaaactggtggtcttgtgacgtcattcagtgttcttcaacaatgcagaactgatctggagatgcctctgaggagctctatgtccattgtgacaaatttggacgagggaaatatccatgttgagaactttgttggcagaatgtttaagcggttagttttggcatcatattcttatcttcttgctgttgtagatgaggttggagtagtgtatgtgttctatgcggatgacatcttaaacttcaaagctaatgtgcacgaaaactttgatctgcctgttatgaatcagtttgctgattgtttttctatctgggaagctgctggtcatgagataggaagtctatcattttgtgctaatcagtccatacaacaagggtcacttagggggtgtttggtttcta

SEQ ID NO: 11609 - DNA, 11258 bp, Zea Mays
cggagggaacaactgccgcacggcacggagacagacgcggacagaccgagcgattggtcggcgaccacctcacctccgccgccatccactcctcggctcgggctccacgcaatgttactcgttaccatcattagctgttgatgggcatatgaacgatgtccacatctcgtcagatagatgatgggcctgctgtactacagttatgcagatggacattgctacaaccccatctcaaactatcaaaatttcgagaggcttttatatctccaacaaggcgtctttttggactgctctcagaccatggggatcttgtcctggcaactgctgagatcaactcatcacaagttgaatctcatagagctctatcggatacctgtactcaggcagtcttcaaaacgttttctactattccccgagtgaagtctttagcatggggatactgttctgatgcttttgatgactcaagttttaatgaaattctagtggtatcaagtgatgcttctatcacagtccatgcattctgccattctcgcaaaagcacactaacagttaattcaatgtctgatgctaaagagttgcatggggagtggaaagagtggcgccctactgaatgttcagtgttggaggatggtgagtcaggtccagaaaattggttttgttctttcctaactacagtcactgcgtctgtttctaatggaaaataccaagccagattgcccatgaaatctttattgcctaattcagcagaagttgtatcctttagcatatatgacattactctctctttcttgaaatattggtatagcaaatgttctctgaagactatggcggaaactgacagtgaatcaccacgacgttttcttagagcatcgtgcagttgtcagtgggagtgtctaaaagttttgtctagctcgtcatgttatttgatcggcttagttctgactcctaatgaatcagtacgttgtgaggcccatccatccaatgcggagtgtattttggttactgttctggagctaaaccactggggcatacagtggaactttgtggcagaccttcaggatgtatctgatggtattacgccaagtccaaaatgggttgattttcagttatcagatgtgtttcttgcctgccttaatacagcaggttttgttgccatttggaacgtgaaaactggtggtcttgtgacgtcattcagtgttcttcaacaatgcagaactgatctggagatgcctctgaggagctctatgtccattgtgacaaatttggacgagggaaatatccatgttgagaactttgttggcagaatgtttaagcggttagttttggcatcatattcttatcttcttgctgttgtagatgaggttggagtagtgtatgtgttctatgcggatgacatcttaaacttcaaagctaatgtgcacgaaaactttgatctgcctgttatgaatcagtttgctgattgtttttctatctgggaagctgctggtcatgagataggaagtctatcattttgtgctaatcagtccatacaacaagggtcacttagtctaaccaaattggttcctgagttctcagggaaaagcgatgatattgtcaggcctagagaaagaagaaaatatagatgcgatgaaaatgaagtggacagctggccaagtggctttgtcactgcagggcagatgaaagttggggcaggttatcgtcgcacaaattcctcttgtttctttaggaggataattcttcctccatgcagatcacagcaggatgtaattagcctgtgtccacttggactaactagaatttttaaaggttctattgcggatggaaacgagcatgtcaaaatttttcattccgagttgcttatgtattcatcttttcttggcaaaggagatattgatattggttttatggacgaaatgcttccatttaaaaaggattccacttttgtcggagattctgttgtttgctcctgccagggatatttgtatttaattacccagtatggcctttctgtggtccttcctccagtttctatatcatccttttcatctcaatgtgacgctatcaaattctggcaaatgggtcctgctgctggtagcacatgcaatgctctgaacttactatctgttgacaaatcagacacaagctggaaaacctggcaaatagaagtcctggatagagctttgttgtatgaaggtcccgcactagcagacaggctctgttgggagaatggatgggatttgaaattctctaggttacgttggctgcaattagcccttcattactcaatgattggtgatctagagcagtcactgaatttactcgctgaggttaatcttgcggaagaaggtgtattgcaactgctattggcatctattcataggttatctagtaggactggaagtgataatgaagccacagtgtcatccaagttaatggttttagctgttcgctttgcaacaagaatgataaaatgttacgggttacagaagcaaaccacagacaataattcagtaaagcttcatgaaatggctctccttttgatggcaataagaagtatccagagccgagtctctgcaaagaatcagaattctgtttggatgggagatgataagagctcattgaaaataggtacagaagtatttcagcatgattcttcagttccagttgttgtactggatggtgtttcatcagggccatcgggtgggttagatactcatgacaggcaagagttggttcctgtgtgtgttcctgatagcaacagcatgttagctctaacaccagttgggtcatctcttagtgcttcaacttttcatgatattgatactaataaaaggactacccaagttggaagtcaaaattttcaaggaaatatcaaggagatgattaacagatgggaaatgaataactttgacttaaaaattgtagtcagagaagcactgcagtctggtcgcctacctttggcagttcttcagttgcagcttttgcgccagagggaattagtttccaatgattattctgaagatgctttctctgaagttcatgaaattggaaggtccattgtgtatgacctgttgatgaagggtgaaactggattggctgtagcaacactagaaaggctaggaaatgatgtagagtcggacctaagacaacttatgcaaggtactgtcaggaggtcactaaggctacaaattgctgacgagatgaagaagcgtgggtacataacaccagatgactggaagatgctagaaactataacactaattgagcgtctctaccctagcagcagcttctggaacacatacttttacagggagaatgtcattcgtgatgctgcaaaaattgttacactgccaggagacgataaacctgtattggctctaaatattcgcaaccaccccattattgaatgtggtgatgttgacggagcagtgcttggttcttgggtgaacattaatgattgcactaaggagttttctgggagcaacatttctgatggttattgggcctgtgctgctgtgtggtcggatgcttggggtccgagaactgtggaccgtatattgctggaccagccttatcatgtacatgctcatgtcccatgggaatctcagtttgaatattttgttgctcataatgatgtggggaaagtctgcgaactcctggacatgattcccaatagcatactttcagaagggattattagagtaaacgtgaacagtttacaagctcctgccaacactctttctgatttaacagtccctgattacaacatgtacatatgtgactcagaagagcttgaacctttctgtgtggagataccacatgttaaagtatttagatctttgtggaatcatgagtcaacattatatattcgaatggtaatgcagcaggaattggcaaagagacacatctttatgaaagagtattggcaaagtactactgaaattatacctttgcttgctcgtgctggcatacttataaaggttggtctaaaggaagaatgttctacaatattttctgcttcagagattccagatgatgcccatcaccagggccgtgaaggcgcactgcataagctaatcatacgtttctgtgtgcaatataacttgccatatctactggacctctatctggacacctgtaatttgactcctgataaggattgtatccgtttactcaaagaaaacacaggtgattgcaagtgggcacaatggttactcttctccaggatcaaaggttatgagtatgaggcatcattctctaatgcacgttggaatttgtcaaagaaaatggtcaataatagtaatcctacggctgttgagatagatgaaatgttgtatacagtagatgatatggcagaacgaattggtgaaatgtctgcattagctaccttgatgtatgcttcagcaccaattcagaaatccatatgtactggaagtgtgaacagaagtggttcgtcttcccagtgcacattggagaacctggctccttgtctccagcaatttccaacactatggaaaacccttttttcagcttgttttggccaagatgaatatgggtgtttaaactactctgctggtaatgcgtatggaaaaagatcaatttcagagtacttgagatggcgctatagcgttttttcctctgctggaggagacacttcgttgttgcaaatgcttccatgttgggtcccaaagtctgttagaagattaattcaactatttgaacagggcccttttggaatgcaacttctatcaactgccccatcatctgaagagttattcactcacggtgtctccaattatatatacaattctactggatataccgaagccaatgcactgtccttagaagcatcgatccaaaaaagtgttgaagaagaattatattcttcccttgaggagaaagatgtgagagtggaacaccatttgcaccgtggtcgagccttagctgctttcaggcatcttattgctaagagggcttcacagttgaaatcagctagtgcacgtcaagtgatatccgcacagtctaatgttcaagcagatgtacaattgatacttgctcctctaagtcaagttgaacgatcaattcttatatcggtggctccactagctattacaaactttgaggactcgactctagttgcttcctgtatattcttgttggaactttgtggcctgtgtgccaacatgcttcgtttagatattgctgcactacgacgcatctcttcctactacaagtcagttcaagaaaataaacatgttgatctatctccaccaaggggcccagagctccatgtgcagtcccatggagctggtatagctcctgctctagctcgagcgctagctgaagattatgtccagtctgatcatctgcatgttttggagcagactcaaacctcgatggctcccaagcgggaacagacacaatatcctcttatttctattctgcaacaccttgaaaaagcaagtttgccatcattggaggaaggtaaaacttgtgggttttggcttttgactggtgttggtgatgcatctctttaccggtcgcaacagaatgaagcaagtcaacactggaatttggttactgaattctgtcaggcacactatctcccactaagtacaaaatatcttgcattactggccaatgacaatgattgggttggttttttaacagaagctcagatagctggattttctattgaagctgttattgaagtggcagccaaagagatcagggattcaagactgagggcccacatactgactgttctaaaaaatatgatatcacttcgaaggaaatcatctggtaatgtaccttcaggaagcagtgatccatctttctcttctgttgatggcaataatcccatggaacttttctgcattcttggagtctgtgaaaagcaaaaaaaccctggggaggcactcctaattaaagcaaaacaaatgcagtggtctttgcttgccatgattgcctcatgctttccggatgtaactcctctcacatgcttaagtgtttggcttgagattacagccgcaagggagatgtcctcgatcaaggtggatgatgtttccttgaaaatagcaaagaatgttggatctgctgttgaagccacaaataaattgccaagcactagcagaaatgttgaatttcgttacaataggaagaatccaaagcgaagacggttcctggaagcgtcacatgaaaagttatgtttctcaatagatagcacatgtgggccagattctgctgcaacttccaatcctatcagtattgttgaccatcagggaataggaaagccaatctcaggagaaaccataatgtccgttgatattgatgaaaggcttgcatctttatcaaacatggtagcagtgctttgcgaacaacaactgtttctaccattacttagagcttttgaaatgtttttgccttcctgctcccttctttccttcattcgttctctccaggcattttctcaaatgcgtcttcccgaggcttctgcacgtttggcatccttttcagcaagaataaaagatgaagcctctcatactcaactaaactcttccaaagaagtgtcagtaatagcagaatgggtggccactacagctgtaaaagctgcagatgctgtcctttcaaactgttcatcaatttatgagaagaggtgtctactgcagcttctttcagcagtggattttgctgatggtggcacttcatcatcttactttagccgaagatattggaagattaatctgtctgaaccatctttgtgtaaagatactgatgtgtacaactggaatgatttgatggatgatgcttctcttttaacatcattagaaaaggacggtcaatgggagcaagctcgaacttgggcaagacatctggagtcaagtggcatagcttgggaatctactcttgatcatgtcactgaatcacagaagccatggttgctgaatggaaggagtttctttgggatatcccacaagaacgtgcagccttgtggggtcactgtcaatctctctttatgagatattctttccctcctttaaaggctggattatttttccttaagcatgccgaagcagtaggaaaagagataccagcacaagagcttcatgaaatattattgctctctttacaatggctaagtggaactatgactaaatcctctccggtctatcctcttcatcttttgcgggaaattgagactagggtgtggctcctggctgttgagtcagagagtcaatccaaggttgatggtgaatttgccacttctgctgttgctcataacaaagctgttggaaacagtagcagtattatagaacatactgctgatatcatcacaaaaatagacagtaacatgagcttgccgcacatgaaaattacagaaaggaatagcacacgggacagtttatcataccaacatgtgcaactctttgagtctaacagtgaagcatcttcaacaacaataaataacacgcgagcaaagcgaaggatgaaaacaaattcaccacttaaacgaggtgtcaatgacaatattgaaagtagagctaatgagctggataacaattctaacactttacatagttcaaagattggtgaacaagctagaaatttgctctctgaagaggaatttgtaaagatggaagcatctttatctggttgggaacaaaatgttaggcctgtagatatggagaaggctgtgctctctttactggaatttgggcaaataactgctgctaagcaactccaacaaaagctgtctccatcatatattcctgaagaacttgtccttgttgatgttgctttaagaattgccaaaaacagcagtaatggagagatcaatttgtcatgctttgacacacaggctcttcggatacttcagtcactgagagtagcaaatagctgcgatatgattagcccatcacaggttatggagatactagctgcgaaatgtggtgagggtcgtgggcgagctcttattaggagaataataggagttgttcgaactgctagattattgggactcccattttccgaagcatttgagaaacaaccaattgaacttctacagttgctttccctgaaagctcaggattcttttgatgaagcgaaatttctagtggagacacacatcatgcctgcatctagcattgcaagaattctagctgattcgttcctaaaggggcttttggccgcacatcgtggaggctatttggattcccaaaaggaagagggtcctgcacctctattgtggagatcaagtgacttcttaaagtgggcaaaactatgtccatcagaatcagaaattggccatgctttgatgcgtttggtaatgactggacatgaagtaccacatgcttgtgaggttgaactcctaatattgtcgcaccacttctacatgtcatcttcttgtcttgatggagtggatgttctcgtcacatttgcagcaaatagagtggactcatatgttttagaggaggatttttcttgtttagctcgtttgatcactggagtgagcaatttccattccttgagcttcattctttcaatccttgtagagaatggccaattggagttgctgcttcaaaagtattctgccactgacacagccacagggacgcttgcatcggttcgaggatttaggatggctgttattacatcactgaaacagtttatcccgaatgatgacgacgctctctctatggtatacaagcactttgacatgaagcatgaagctgcttctctccttgaatcacgtgcagagcaatacatgaacagctggttatcacgatatgataaggaacggcgaaatgatgagcttctggacgctatgcatcatcttgtagagacagctgaggttctttcaactattgatgctggccaaagaacacatcgtgcttgtgcccgtgcttctcttctgtcacttcagatccgaataccagatcttttgtggattggtctttctgagaccaatgcccggcggatttttgtggaacaatctaggttccaggaagctcttattgttgctgaagcatacaacataaatcaacctatagaatgggccccagtcttttggaatcaaatgctaaaaccggatctaatcgagcaattcgtggctgagtttgtctcagtgctgcccctgcagccaccaatgcttctcgagcttgcaaggttttacagggcggaggttgcagccaggggggagcagtcacacttctctgtctggctttcacctggaggcttgcctgcagagtgggtgaaacatcttggtagatccttcaggagcctgctgcgtagaacaagggacatgaggctgaggctgcagttggcaactctggcgacaggcttcattgacgtccttgttatttgcaatagagttttggacaaagtcccggacaatgctggcccgctgatcctaaggaagggacatggtggagcataccttcctctcatgtagatatttcccttctctttttggtgcattggattcagaacttaattcttggcagttaggctatatattgaaaggcagatgaatcttgcaaatattatatgtatcagctttctttggttcagcatctttaaagtcaagcttggctgcagtcttggacatggattctcatcgatgatgccatgaaagacttttgtgattgtatgtgcagcattttgagcggaaaagctggcagaaatgggatttttgcagcttcatccggcaggtgttttcgcacccatgatatattgtatgttttgcatgtacgaagatccgccccgtatttgttttcctcttttttttttggttttgcaagtgtcatgtaggtcgatttgctgtctgtgatttggactgcaagtctgcaaccagacggcagatgcgtcgagacgtcgagtgtccagtccagcgaaagcgtaaatacaaagcacatggacgttaaccagacggcagatagcctttgtttgttgttctactggtaatgttcttattttctaaccatggttttacaacccaggggatcttgtcctggcaactgctgagatcaactcatcacaagttgaatctcagagctctatcggatacctgtactcaggcagtcttcaaaacgttttctactattccccgagtgaagtctttagcatggggatactgttctgatgcttttgatgactcaagttttaatgaaattctagtggtatcaagtgatgcttctatcacagtccatgcattctgccattctcgcaaaagcacactaacagttaattcaatgtctgatgctaaagagttgcatggggagtggaaagagtggcgccctactgaatgttcagtgttggaggatggtgagtcaggtccagataattggttttgttcttttcctaactacagtcactgcgtctgtttctaatggaaaaataccaagccagattgcccatgaaatctttattgcctaattcagcagaagttgtatcctttagcatatatgacattactctctctttcttgaaatattggtatagcaaatgttctctgaagactatggcggaaactgacagtgaatcaccacgacgttttcttagagcatcgtgcagttgtcagtgggagtgtctaaaagttttgtctagctcgtcatgttatttgatcggcttagttctgactcctaatgaatcagtacgttgtgaggcccatccatccaatgcggagtgtattttggttactgttctggagctaaaccactggggcatacagtggaactttgtggcagaccttcaggatgtatctgatggtattacgccaagtccaaaatgggttgattttcagttatcagatgtgtttcttgcctgccttaatacagcaggttttgttgccatttggaacgtgaaaactggtggtcttgtgacgtcattcagtgttcttcaacaatgcagaactgatctggagatgcctctgaggagctctatgtccattgtgacaaatttggacgagggaaatatccatgttgagaactttgttggcagaatgtttaagcggttagttttggcatcatattcttatcttcttgctgttgtagatgaggttggagtagtgtatgtgttctatgcggatgacatcttaaacttcaaagctaatgtgcacgaaaactttgatctgcctgttatgaatcagtttgctgattgtttttctatctgggaagctgctggtcatgagataggaagtctatcattttgtgctaatcagtccatacaacaagggtcacttagggggtgtttggtttcta

SEQ ID NO: 11610 - DNA, 11241 bp, Zea Mays
cggagggaacaactgccgcacggcacggagacagacgcggacagaccgagcgattggtcggcgaccacctcacctccgccgccatccactcctcggctcgggctccacgcaatgttactcgttaccatcattagctgttgatgggcatatgaacgatgtccacatctcgtcagatagatgatgggcctgctgtactacagttatgcagatggacattgctacaaccccatctcaaactatcaaaatttcgagaggcttttatatctccaacaaggcgtctttttggactgctctcagaccatggggatcttgtcctggcaactgctgagatcaactcatcacaagttgaatctcatagagctctatcggatacctgtactcaggcagtcttcaaaacgttttctactattccccgagtgaagtctttagcatggggatactgttctgatgcttttgatgactcaagttttaatgaaattctagtggtatcaagtgatgcttctatcacagtccatgcattctgccattctcgcaaaagcacactaacagttaattcaatgtctgatgctaaagagttgcatggggagtggaaagagtggcgccctactgaatgttcagtgttggaggatggtgagtcaggtccagaaaattggttttgttctttcctaactacagtcactgcgtctgtttctaatggaaaataccaagccagattgcccatgaaatctttattgcctaattcagcagaagttgtatcctttagcatatatgacattactctctctttcttgaaatattggtatagcaaatgttctctgaagactatggcggaaactgacagtgaatcaccacgacgttttcttagagcatcgtgcagttgtcagtgggagtgtctaaaagttttgtctagctcgtcatgttatttgatcggcttagttctgactcctaatgaatcagtacgttgtgaggcccatccatccaatgcggagtgtattttggttactgttctggagctaaaccactggggcatacagtggaactttgtggcagaccttcaggatgtatctgatggtattacgccaagtccaaaatgggttgattttcagttatcagatgtgtttcttgcctgccttaatacagcaggttttgttgccatttggaacgtgaaaactggtggtcttgtgacgtcattcagtgttcttcaacaatgcagaactgatctggagatgcctctgaggagctctatgtccattgtgacaaatttggacgagggaaatatccatgttgagaactttgttggcagaatgtttaagcggttagttttggcatcatattcttatcttcttgctgttgtagatgaggttggagtagtgtatgtgttctatgcggatgacatcttaaacttcaaagctaatgtgcacgaaaactttgatctgcctgttatgaatcagtttgctgattgtttttctatctgggaagctgctggtcatgagataggaagtctatcattttgtgctaatcagtccatacaacaagggtcacttagtctaaccaaattggttcctgagttctcagggaaaagcgatgatattgtcaggcctagagaaagaagaaaatatagatgcgatgaaaatgaagtggacagctggccaagtggctttgtcactgcagggcagatgaaagttggggcaggttatcgtcgcacaaattcctcttgtttctttaggaggataattcttcctccatgcagatcacagcaggatgtaattagcctgtgtccacttggactaactagaatttttaaaggttctattgcggatggaaacgagcatgtcaaaatttttcattccgagttgcttatgtattcatcttttcttggcaaaggagatattgatattggttttatggacgaaatgcttccatttaaaaaggattccacttttgtcggagattctgttgtttgctcctgccagggatatttgtatttaattacccagtatggcctttctgtggtccttcctccagtttctatatcatccttttcatctcaatgtgacgctatcaaattctggcaaatgggtcctgctgctggtagcacatgcaatgctctgaacttactatctgttgacaaatcagacacaagctggaaaacctggcaaatagaagtcctggatagagctttgttgtatgaaggtcccgcactagcagacaggctctgttgggagaatggatgggatttgaaattctctaggttacgttggctgcaattagcccttcattactcaatgattggtgatctagagcagtcactgaatttactcgctgaggttaatcttgcggaagaaggtgtattgcaactgctattggcatctattcataggttatctagtaggactggaagtgataatgaagccacagtgtcatccaagttaatggttttagctgttcgctttgcaacaagaatgataaaatgttacgggttacagaagcaaaccacagacaataattcagtaaagcttcatgaaatggctctccttttgatggcaataagaagtatccagagccgagtctctgcaaagaatcagaattctgtttggatgttatcttcaaatgatcattttcttaatgctgtgcctacactgcagcagggagatgataagagctcattgaaaatagggccatcgggtgggttagatactcatgacaggcaagagttggttcctgtgtgtgttcctgatagcaacagcatgttagctctaacaccagttgggtcatctcttagtgcttcaacttttcatgatattgatactaataaaaggactacccaagttggaagtcaaaattttcaaggaaatatcaaggagatgattaacagatgggaaatgaataactttgacttaaaaattgtagtcagagaagcactgcagtctggtcgcctacctttggcagttcttcagttgcagcttttgcgccagagggaattagtttccaatgattattctgaagatgctttctctgaagttcatgaaattggaaggtccattgtgtatgacctgttgatgaagggtgaaactggattggctgtagcaacactagaaaggctaggaaatgatgtagagtcggacctaagacaacttatgcaaggtactgtcaggaggtcactaaggctacaaattgctgacgagatgaagaagcgtgggtacataacaccagatgactggaagatgctagaaactataacactaattgagcgtctctaccctagcagcagcttctggaacacatacttttacagggagaatgtcattcgtgatgctgcaaaaattgttacactgccaggagacgataaacctgtattggctctaaatattcgcaaccaccccattattgaatgtggtgatgttgacggagcagtgcttggttcttgggtgaacattaatgattgcactaaggagttttctgggagcaacatttctgatggttattgggcctgtgctgctgtgtggtcggatgcttggggtccgagaactgtggaccgtatattgctggaccagccttatcatgtacatgctcatgtcccatgggaatctcagtttgaatattttgttgctcataatgatgtggggaaagtctgcgaactcctggacatgattcccaatagcatactttcagaagggattattagagtaaacgtgaacagtttacaagctcctgccaacactctttctgatttaacagtccctgattacaacatgtacatatgtgactcagaagagcttgaacctttctgtgtggagataccacatgttaaagtatttagatctttgtggaatcatgagtcaacattatatattcgaatggtaatgcagcaggaattggcaaagagacacatctttatgaaagagtattggcaaagtactactgaaattatacctttgcttgctcgtgctggcatacttataaaggttggtctaaaggaagaatgttctacaatattttctgcttcagagattccagatgatgcccatcaccagggccgtgaaggcgcactgcataagctaatcatacgtttctgtgtgcaatataacttgccatatctactggacctctatctggacacctgtaatttgactcctgataaggattgtatccgtttactcaaagaaaacacaggtgattgcaagtgggcacaatggttactcttctccaggatcaaaggttatgagtatgaggcatcattctctaatgcacgttggaatttgtcaaagaaaatggtcaataatagtaatcctacggctgttgagatagatgaaatgttgtatacagtagatgatatggcagaacgaattggtgaaatgtctgcattagctaccttgatgtatgcttcagcaccaattcagaaatccatatgtactggaagtgtgaacagaagtggttcgtcttcccagtgcacattggagaacctggctccttgtctccagcaatttccaacactatggaaaacccttttttcagcttgttttggccaagatgaatatgggtgtttaaactactctgctgcgtatggaaaaagatcaatttcagagtacttgagatggcgctatagcgttttttcctctgctggaggagacacttcgttgttgcaaatgcttccatgttgggtcccaaagtctgttagaagattaattcaactatttgaacagggcccttttggaatgcaacttctatcaactgccccatcatctgaagagttattcactcacggtgtctccaattatatatacaattctactggatataccgaagccaatgcactgtccttagaagcatcgatccaaaaaagtgttgaagaagaattatattcttcccttgaggagaaagatgtgagagtggaacaccatttgcaccgtggtcgagccttagctgctttcaggcatcttattgctaagagggcttcacagttgaaatcagctagtgcacgtcaagtgatatccgcacagtctaatgttcaagcagatgtacaattgatacttgctcctctaagtcaagttgaacgatcaattcttatatcggtggctccactagctattacaaactttgaggactcgactctagttgcttcctgtatattcttgttggaactttgtggcctgtgtgccaacatgcttcgtttagatattgctgcactacgacgcatctcttcctactacaagtcagttcaagaaaataaacatgttgatctatctccaccaaggggcccagagctccatgtgcagtcccatggagctggtatagctcctgctctagctcgagcgctagctgaagattatgtccagtctgatcatctgcatgttttggagcagactcaaacctcgatggctcccaagcgggaacagacacaatatcctcttatttctattctgcaacaccttgaaaaagcaagtttgccatcattggaggaaggtaaaacttgtgggttttggcttttgactggtgttggtgatgcatctctttaccggtcgcaacagaatgaagcaagtcaacactggaatttggttactgaattctgtcaggcacactatctcccactaagtacaaaatatcttgcattactggccaatgacaatgattgggttggttttttaacagaagctcagatagctggattttctattgaagctgttattgaagtggcagccaaagagatcagggattcaagactgagggcccacatactgactgttctaaaaaatatgatatcacttcgaaggaaatcatctggtaatgtaccttcaggaagcagtgatccatctttctcttctgttgatggcaataatcccatggaacttttctgcattcttggagtctgtgaaaagcaaaaaaaccctggggaggcactcctaattaaagcaaaacaaatgcagtggtctttgcttgccatgattgcctcatgctttccggatgtaactcctctcacatgcttaagtgtttggcttgagattacagccgcaagggagatgtcctcgatcaaggtggatgatgtttccttgaaaatagcaaagaatgttggatctgctgttgaagccacaaataaattgccaagcactagcagaaatgttgaatttcgttacaataggaagaatccaaagcgaagacggttcctggaagcgtcacatgaaaagttatgtttctcaatagatagcacatgtgggccagattctgctgcaacttccaatcctatcagtattgttgaccatcagggaataggaaagccaatctcaggagaaaccataatgtccgttgatattgatgaaaggcttgcatctttatcaaacatggtagcagtgctttgcgaacaacaactgtttctaccattacttagagcttttgaaatgtttttgccttcctgctcccttctttccttcattcgttctctccaggcattttctcaaatgcgtcttcccgaggcttctgcacgtttggcatccttttcagcaagaataaaagatgaagcctctcatactcaactaaactcttccaaagaagtgtcagtaatagcagaatgggtggccactacagctgtaaaagctgcagatgctgtcctttcaaactgttcatcaatttatgagaagaggtgtctactgcagcttctttcagcagtggattttgctgatggtggcacttcatcatcttactttagccgaagatattggaagattaatctgtctgaaccatctttgtgtaaagatactgatgtgtacaactggaatgatttgatggatgatgcttctcttttaacatcattagaaaaggacggtcaatgggagcaagctcgaacttgggcaagacatctggagtcaagtggcatagcttgggaatctactcttgatcatgtcactgaatcacaggcagaagccatggttgctgaatggaaggagtttctttgggatatcccacaagaacgtgcagccttgtggggtcactgtcaatctctctttatgagatattctttccctcctttaaaggctggattatttttccttaagcatgccgaagcagtaggaaaagagataccagcacaagagcttcatgaaatattattgctctctttacaatggctaagtggaactatgactaaatcctctccggtctatcctcttcatcttttgcgggaaattgagactagggtgtggctcctggctgttgagtcagagagtcaatccaaggttgatggtgaatttgccacttctgctgttgctcataacaaagctgttggaaacagtagcagtattatagaacatactgctgatatcatcacaaaaatagacagtaacatgagcttgccgcacatgaaaattacagaaaggaatagcacacgggacagtttatcataccaacatgtgcaactctttgagtctaacagtgaagcatcttcaacaacaataaataacacgcgagcaaagcgaaggatgaaaacaaattcaccacttaaacgaggtgtcaatgacaatattgaaagtagagctaatgagctggataacaattctaacactttacatagttcaaagattggtgaacaagctagaaatttgctctctgaagaggaatttgtaaagatggaagcatctttatctggttgggaacaaaatgttaggcctgtagatatggagaaggctgtgctctctttactggaatttgggcaaataactgctgctaagcaactccaacaaaagctgtctccatcatatattcctgaagaacttgtccttgttgatgttgctttaagaattgccaaaaacagcagtaatggagagatcaatttgtcatgctttgacacacaggctcttcggatacttcagtcactgagagtagcaaatagctgcgatatgattagcccatcacaggttatggagatactagctgcgaaatgtggtgagggtcgtgggcgagctcttattaggagaataataggagttgttcgaactgctagattattgggactcccattttccgaagcatttgagaaacaaccaattgaacttctacagttgctttccctgaaagctcaggattcttttgatgaagcgaaatttctagtggagacacacatcatgcctgcatctagcattgcaagaattctagctgattcgttcctaaaggggcttttggccgcacatcgtggaggctatttggattcccaaaaggaagagggtcctgcacctctattgtggagatcaagtgacttcttaaagtgggcaaaactatgtccatcagaatcagaaattggccatgctttgatgcgtttggtaatgactggacatgaagtaccacatgcttgtgaggttgaactcctaatattgtcgcaccacttctacatgtcatcttcttgtcttgatggagtggatgttctcgtcacatttgcagcaaatagagtggactcatatgttttagaggaggatttttcttgtttagctcgtttgatcactggagtgagcaatttccattccttgagcttcattctttcaatccttgtagagaatggccaattggagttgctgcttcaaaagtattctgccactgacacagccacagggacgcttgcatcggttcgaggatttaggatggctgttattacatcactgaaacagtttatcccgaatgatgacgacgctctctctatggtatacaagcactttgacatgaagcatgaagctgcttctctccttgaatcacgtgcagagcaatacatgaacagctggttatcacgatatgataaggaacggcgaaatgatgagcttctggacgctatgcatcatcttgtagagacagctgaggttctttcaactattgatgctggccaaagaacacatcgtgcttgtgcccgtgcttctcttctgtcacttcagatccgaataccagatcttttgtggattggtctttctgagaccaatgcccggcggatttttgtggaacaatctaggttccaggaagctcttattgttgctgaagcatacaacataaatcaacctatagaatgggccccagtcttttggaatcaaatgctaaaaccggatctaatcgagcaattcgtggctgagtttgtctcagtgctgcccctgcagccaccaatgcttctcgagcttgcaaggttttacagggcggaggttgcagccaggggggagcagtcacacttctctgtctggctttcacctggaggcttgcctgcagagtgggtgaaacatcttggtagatccttcaggagcctgctgcgtagaacaagggacatgaggctgaggctgcagttggcaactctggcgacaggcttcattgacgtccttgttatttgcaatagagttttggacaaagtcccggacaatgctggcccgctgatcctaaggaagggacatggtggagcataccttcctctcatgtagatatttcccttctctttttggtgcattggattcagaacttaattcttggcagttaggctatatattgaaaggcagatgaatcttgcaaatattatatgtatcagctttctttggttcagcatctttaaagtcaagcttggctgcagtcttggacatggattctcatcgatgatgccatgaaagacttttgtgattgtatgtgcagcattttgagcggaaaagctggcagaaatgggatttttgcagcttcatccggcaggtgttttcgcacccatgatatattgtatgttttgcatgtacgaagatccgccccgtatttgttttcctcttttttttttggttttgcaagtgtcatgtaggtcgatttgctgtctgtgatttggactgcaagtctgcaaccagacggcagatgcgtcgagacgtcgagtgtccagtccagcgaaagcgtaaatacaaagcacatggacgttaaccagacggcagatagcctttgtttgttgttctactggtaatgttcttattttctaaccatggttttacaacccaggggatcttgtcctggcaactgctgagatcaactcatcacaagttgaatctcagagctctatcggatacctgtactcaggcagtcttcaaaacgttttctactattccccgagtgaagtctttagcatggggatactgttctgatgcttttgatgactcaagttttaatgaaattctagtggtatcaagtgatgcttctatcacagtccatgcattctgccattctcgcaaaagcacactaacagttaattcaatgtctgatgctaaagagttgcatggggagtggaaagagtggcgccctactgaatgttcagtgttggaggatggtgagtcaggtccagataattggttttgttcttttcctaactacagtcactgcgtctgtttctaatggaaaaataccaagccagattgcccatgaaatctttattgcctaattcagcagaagttgtatcctttagcatatatgacattactctctctttcttgaaatattggtatagcaaatgttctctgaagactatggcggaaactgacagtgaatcaccacgacgttttcttagagcatcgtgcagttgtcagtgggagtgtctaaaagttttgtctagctcgtcatgttatttgatcggcttagttctgactcctaatgaatcagtacgttgtgaggcccatccatccaatgcggagtgtattttggttactgttctggagctaaaccactggggcatacagtggaactttgtggcagaccttcaggatgtatctgatggtattacgccaagtccaaaatgggttgattttcagttatcagatgtgtttcttgcctgccttaatacagcaggttttgttgccatttggaacgtgaaaactggtggtcttgtgacgtcattcagtgttcttcaacaatgcagaactgatctggagatgcctctgaggagctctatgtccattgtgacaaatttggacgagggaaatatccatgttgagaactttgttggcagaatgtttaagcggttagttttggcatcatattcttatcttcttgctgttgtagatgaggttggagtagtgtatgtgttctatgcggatgacatcttaaacttcaaagctaatgtgcacgaaaactttgatctgcctgttatgaatcagtttgctgattgtttttctatctgggaagctgctggtcatgagataggaagtctatcattttgtgctaatcagtccatacaacaagggtcacttagggggtgtttggtttcta

SEQ ID NO: 11611 - DNA, 10470 bp, Zea Mays
cggagggaacaactgccgcacggcacggagacagacgcggacagaccgagcgattggtcggcgaccacctcacctccgccgccatccactcctcggctcgggctccacgcaatgttactcgttaccatcattagctgttgatgggcatatgaacgatgtccacatctcgtcagatagatgatgggcctgctgtactacagttatgcagatggacattgctacaaccccatctcaaactatcaaaatttcgagaggcttttatatctccaacaaggcgtctttttggactgctctcagaccatggggatcttgtcctggcaactgctgagatcaactcatcacaagttgaatctcatagagctctatcggatacctgtactcaggcagtcttcaaaacgttttctactattccccgagtgaagtctttagcatggggatactgttctgatgcttttgatgactcaagttttaatgaaattctagtggtatcaagtgatgcttctatcacagtccatgcattctgccattctcgcaaaagcacactaacagttaattcaatgtctgatgctaaagagttgcatggggagtggaaagagtggcgccctactgaatgttcagtgttggaggatggtgagtcaggtccagaaaattggttttgttctttcctaactacagtcactgcgtctgtttctaatggaaaataccaagccagattgcccatgaaatctttattgcctaattcagcagaagttgtatcctttagcatatatgacattactctctctttcttgaaatattggtatagcaaatgttctctgaagactatggcggaaactgacagtgaatcaccacgacgttttcttagagcatcgtgcagttgtcagtgggagtgtctaaaagttttgtctagctcgtcatgttatttgatcggcttagttctgactcctaatgaatcagtacgttgtgaggcccatccatccaatgcggagtgtattttggttactgttctggagctaaaccactggggcatacagtggaactttgtggcagaccttcaggatgtatctgatggtattacgccaagtccaaaatgggttgattttcagttatcagatgtgtttcttgcctgccttaatacagcaggttttgttgccatttggaacgtgaaaactggtggtcttgtgacgtcattcagtgttcttcaacaatgcagaactgatctggagatgcctctgaggagctctatgtccattgtgacaaatttggacgagggaaatatccatgttgagaactttgttggcagaatgtttaagcggttagttttggcatcatattcttatcttcttgctgttgtagatgaggttggagtagtgtatgtgttctatgcggatgacatcttaaacttcaaagctaatgtgcacgaaaactttgatctgcctgttatgaatcagtttgctgattgtttttctatctgggaagctgctggtcatgagataggaagtctatcattttgtgctaatcagtccatacaacaagggtcacttagtctaaccaaattggttcctgagttctcagggaaaagcgatgatattgtcaggcctagagaaagaagaaaatatagatgcgatgaaaatgaagtggacagctggccaagtggctttgtcactgcagggcagatgaaagttggggcaggttatcgtcgcacaaattcctcttgtttctttaggaggataattcttcctccatgcagatcacagcaggatgtaattagcctgtgtccacttggactaactagaatttttaaaggttctattgcggatggaaacgagcatgtcaaaatttttcattccgagttgcttatgtattcatcttttcttggcaaaggagatattgatattggttttatggacgaaatgcttccatttaaaaaggattccacttttgtcggagattctgttgtttgctcctgccagggatatttgtatttaattacccagtatggcctttctgtggtccttcctccagtttctatatcatccttttcatctcaatgtgacgctatcaaattctggcaaatgggtcctgctgctggtagcacatgcaatgctctgaacttactatctgttgacaaatcagacacaagctggaaaacctggcaaatagaagtcctggatagagctttgttgtatgaaggtcccgcactagcagacaggctctgttgggagaatggatgggatttgaaattctctaggttacgttggctgcaattagcccttcattactcaatgattggtgatctagagcagtcactgaatttactcgctgaggttaatcttgcggaagaaggtgtattgcaactgctattggcatctattcataggttatctagtaggactggaagtgataatgaagccacagtgtcatccaagttaatggttttagctgttcgctttgcaacaagaatgataaaatgttacgggttacagaagcaaaccacagacaataattcagtaaagcttcatgaaatggctctccttttgatggcaataagaagtatccagagccgagtctctgcaaagaatcagaattctgtttggatgcagggagatgataagagctcattgaaaataggtacagaagtatttcagcatgattcttcagttccagttgttgtactggatggtgtttcatcagggccatcgggtgggttagatactcatgacaggcaagagttggttcctgtgtgtgttcctgatagcaacagcatgttagctctaacaccagttgggtcatctcttagtgcttcaacttttcatgatattgatactaataaaaggactacccaagttggaagtcaaaattttcaaggaaatatcaaggagatgattaacagatgggaaatgaataactttgacttaaaaattgtagtcagagaagcactgcagtctggtcgcctacctttggcagttcttcagttgcagcttttgcgccagagggaattagtttccaatgattattctgaagatgctttctctgaagttcatgaaattggaaggtccattgtgtatgacctgttgatgaagggtgaaactggattggctgtagcaacactagaaaggctaggaaatgatgtagagtcggacctaagacaacttatgcaaggtactgtcaggaggtcactaaggctacaaattgctgacgagatgaagaagcgtgggtacataacaccagatgactggaagatgctagaaactataacactaattgagcgtctctaccctagcagcagcttctggaacacatacttttacagggagaatgtcattcgtgatgctgcaaaaattgttacactgccaggagacgataaacctgtattggctctaaatattcgcaaccaccccattattgaatgtggtgatgttgacggagcagtgcttggttcttgggtgaacattaatgattgcactaaggagttttctgggagcaacatttctgatggttattgggcctgtgctgctgtgtggtcggatgcttggggtccgagaactgtggaccgtatattgctggaccagccttatcatgtacatgctcatgtcccatgggaatctcagtttgaatattttgttgctcataatgatgtggggaaagtctgcgaactcctggacatgattcccaatagcatactttcagaagggattattagagtaaacgtgaacagtttacaagctcctgccaacactctttctgatttaacagtccctgattacaacatgtacatatgtgactcagaagagcttgaacctttctgtgtggagataccacatgttaaagtatttagatctttgtggaatcatgagtcaacattatatattcgaatggtaatgcagcaggaattggcaaagagacacatctttatgaaagagtattggcaaagtactactgaaattatacctttgcttgctcgtgctggcatacttataaaggttggtctaaaggaagaatgttctacaatattttctgcttcagagattccagatgatgcccatcaccagggccgtgaaggcgcactgcataagctaatcatacgtttctgtgtgcaatataacttgccatatctactggacctctatctggacacctgtaatttgactcctgataaggattgtatccgtttactcaaagaaaacacaggtgattgcaagtgggcacaatggttactcttctccaggatcaaaggttatgagtatgaggcatcattctctaatgcacgttggaatttgtcaaagaaaatggtcaataatagtaatcctacggctgttgagatagatgaaatgttgtatacagtagatgatatggcagaacgaattggtgaaatgtctgcattagctaccttgatgtatgcttcagcaccaattcagaaatccatatgtactggaagtgtgaacagaagtggttcgtcttcccagtgcacattggagaacctggctccttgtctccagcaatttccaacactatggaaaacccttttttcagcttgttttggccaagatgaatatgggtgtttaaactactctgctggtaatgcgtatggaaaaagatcaatttcagagtacttgagatggcgctatagcgttttttcctctgctggaggagacacttcgttgttgcaaatgcttccatgttgggtcccaaagtctgttagaagattaattcaactatttgaacagggcccttttggaatgcaacttctatcaactgccccatcatctgaagagttattcactcacggtgtctccaattatatatacaattctactggatataccgaagccaatgcactgtccttagaagcatcgatccaaaaaagtgttgaagaagaattatattcttcccttgaggagaaagatgtgagagtggaacaccatttgcaccgtggtcgagccttagctgctttcaggcatcttattgctaagagggcttcacagttgaaatcagctagtgcacgtcaagtgatatccgcacagtctaatgttcaagcagatgtacaattgatacttgctcctctaagtcaagttgaacgatcaattcttatatcggtggctccactagctattacaaactttgaggactcgactctagttgcttcctgtatattcttgttggaactttgtggcctgtgtgccaacatgcttcgtttagatattgctgcactacgacgcatctcttcctactacaagtcagttcaagaaaataaacatgttgatctatctccaccaaggggcccagagctccatgtgcagtcccatggagctggtatagctcctgctctagctcgagcgctagctgaagattatgtccagtctgatcatctgcatgttttggagcagactcaaacctcgatggctcccaagcgggaacagacacaatatcctcttatttctattctgcaacaccttgaaaaagcaagtttgccatcattggaggaaggtaaaacttgtgggttttggcttttgactggtgttggtgatgcatctctttaccggtcgcaacagaatgaagcaagtcaacactggaatttggttactgaattctgtcaggcacactatctcccactaagtacaaaatatcttgcattactggccaatgacaatgattgggttggttttttaacagaagctcagatagctggattttctattgaagctgttattgaagtggcagccaaagagatcagggattcaagactgagggcccacatactgactgttctaaaaaatatgatatcacttcgaaggaaatcatctggtaatgtaccttcaggaagcagtgatccatctttctcttctgttgatggcaataatcccatggaacttttctgcattcttggagtctgtgaaaagcaaaaaaaccctggggaggcactcctaattaaagcaaaacaaatgcagtggtctttgcttgccatgattgcctcatgctttccggatgtaactcctctcacatgcttaagtgtttggcttgagattacagccgcaagggagatgtcctcgatcaaggtggatgatgtttccttgaaaatagcaaagaatgttggatctgctgttgaagccacaaataaattgccaagcactagcagaaatgttgaatttcgttacaataggaagaatccaaagcgaagacggttcctggaagcgtcacatgaaaagttatgtttctcaatagatagcacatgtgggccagattctgctgcaacttccaatcctatcagtattgttgaccatcagggaataggaaagccaatctcaggagaaaccataatgtccgttgatattgatgaaaggcttgcatctttatcaaacatggtagcagtgctttgcgaacaacaactgtttctaccattacttagagcttttgaaatgtttttgccttcctgctcccttctttccttcattcgttctctccaggcattttctcaaatgcgtcttcccgaggcttctgcacgtttggcatccttttcagcaagaataaaagatgaagcctctcatactcaactaaactcttccaaagaagtgtcagtaatagcagaatgggtggccactacagctgtaaaagctgcagatgctgtcctttcaaactgttcatcaatttatgagaagaggtgtctactgcagcttctttcagcagtggattttgctgatggtggcacttcatcatcttactttagccgaagatattggaagattaatctgtctgaaccatctttgtgtaaagatactgatgtgtacaactggaatgatttgatggatgatgcttctcttttaacatcattagaaaaggacggtcaatgggagcaagctcgaacttgggcaagacatctggagtcaagtggcatagcttgggaatctactcttgatcatgtcactgaatcacaggcagaagccatggttgctgaatggaaggagtttctttgggatatcccacaagaacgtgcagccttgtggggtcactgtcaatctctctttatgagatattctttccctcctttaaaggctggattatttttccttaagcatgccgaagcagtaggaaaagagataccagcacaagagcttcatgaaatattattgctctctttacaatggctaagtggaactatgactaaatcctctccggtctatcctcttcatcttttgcgggaaattgagactagggtgtggctcctggctgttgagtcagagagtcaatccaaggttatggagatactagctgcgaaatgtggtgagggtcgtgggcgagctcttattaggagaataataggagttgttcgaactgctagattattgggactcccattttccgaagcatttgagaaacaaccaattgaacttctacagttgctttccctgaaagctcaggattcttttgatgaagcgaaatttctagtggagacacacatcatgcctgcatctagcattgcaagaattctagctgattcgttcctaaaggggcttttggccgcacatcgtggaggctatttggattcccaaaaggaagagggtcctgcacctctattgtggagatcaagtgacttcttaaagtgggcaaaactatgtccatcagaatcagaaattggccatgctttgatgcgtttggtaatgactggacatgaagtaccacatgcttgtgaggttgaactcctaatattgtcgcaccacttctacatgtcatcttcttgtcttgatggagtggatgttctcgtcacatttgcagcaaatagagtggactcatatgttttagaggaggatttttcttgtttagctcgtttgatcactggagtgagcaatttccattccttgagcttcattctttcaatccttgtagagaatggccaattggagttgctgcttcaaaagtattctgccactgacacagccacagggacgcttgcatcggttcgaggatttaggatggctgttattacatcactgaaacagtttatcccgaatgatgacgacgctctctctatggtatacaagcactttgacatgaagcatgaagctgcttctctccttgaatcacgtgcagagcaatacatgaacagctggttatcacgatatgataaggaacggcgaaatgatgagcttctggacgctatgcatcatcttgtagagacagctgaggttctttcaactattgatgctggccaaagaacacatcgtgcttgtgcccgtgcttctcttctgtcacttcagatccgaataccagatcttttgtggattggtctttctgagaccaatgcccggcggatttttgtggaacaatctaggttccaggaagctcttattgttgctgaagcatacaacataaatcaacctatagaatgggccccagtcttttggaatcaaatgctaaaaccggatctaatcgagcaattcgtggctgagtttgtctcagtgctgcccctgcagccaccaatgcttctcgagcttgcaaggttttacagggcggaggttgcagccaggggggagcagtcacacttctctgtctggctttcacctggaggcttgcctgcagagtgggtgaaacatcttggtagatccttcaggagcctgctgcgtagaacaagggacatgaggctgaggctgcagttggcaactctggcgacaggcttcattgacgtccttgttatttgcaatagagttttggacaaagtcccggacaatgctggcccgctgatcctaaggaagggacatggtggagcataccttcctctcatgtagatatttcccttctctttttggtgcattggattcagaacttaattcttggcagttaggctatatattgaaaggcagatgaatcttgcaaatattatatgtatcagctttctttggttcagcatctttaaagtcaagcttggctgcagtcttggacatggattctcatcgatgatgccatgaaagacttttgtgattgtatgtgcagcattttgagcggaaaagctggcagaaatgggatttttgcagcttcatccggcaggtgttttcgcacccatgatatattgtatgttttgcatgtacgaagatccgccccgtatttgttttcctcttttttttttggttttgcaagtgtcatgtaggtcgatttgctgtctgtgatttggactgcaagtctgcaaccagacggcagatgcgtcgagacgtcgagtgtccagtccagcgaaagcgtaaatacaaagcacatggacgttaaccagacggcagatagcctttgtttgttgttctactggcagtcttcaaaacgttttctactattccccgagtgaagtctttagcatggggatactgttctgatgcttttgatgactcaagttttaatgaaattctagtggtatcaagtgatgcttctatcacagtccatgcattctgccattctcgcaaaagcacactaacagttaattcaatgtctgatgctaaagagttgcatggggagtggaaagagtggcgccctactgaatgttcagtgttggaggatggtgagtcaggtccagataattggttttgttcttttcctaactacagtcactgcgtctgtttctaatggaaaaataccaagccagattgcccatgaaatctttattgcctaattcagcagaagttgtatcctttagcatatatgacattactctctctttcttgaaatattggtatagcaaatgttctctgaagactatggcggaaactgacagtgaatcaccacgacgttttcttagagcatcgtgcagttgtcagtgggagtgtctaaaagttttgtctagctcgtcatgttatttgatcggcttagttctgactcctaatgaatcagtacgttgtgaggcccatccatccaatgcggagtgtattttggttactgttctggagctaaaccactggggcatacagtggaactttgtggcagaccttcaggatgtatctgatggtattacgccaagtccaaaatgggttgattttcagttatcagatgtgtttcttgcctgccttaatacagcaggttttgttgccatttggaacgtgaaaactggtggtcttgtgacgtcattcagtgttcttcaacaatgcagaactgatctggagatgcctctgaggagctctatgtccattgtgacaaatttggacgagggaaatatccatgttgagaactttgttggcagaatgtttaagcggttagttttggcatcatattcttatcttcttgctgttgtagatgaggttggagtagtgtatgtgttctatgcggatgacatcttaaacttcaaagctaatgtgcacgaaaactttgatctgcctgttatgaatcagtttgctgattgtttttctatctgggaagctgctggtcatgagataggaagtctatcattttgtgctaatcagtccatacaacaagggtcacttagggggtgtttggtttcta

SEQ ID NO: 11612 - DNA, 11202 bp, Zea Mays
cggagggaacaactgccgcacggcacggagacagacgcggacagaccgagcgattggtcggcgaccacctcacctccgccgccatccactcctcggctcgggctccacgcaatgttactcgttaccatcattagctgttgatgggcatatgaacgatgtccacatctcgtcagatagatgatgggcctgctgtactacagttatgcagatggacattgctacaaccccatctcaaactatcaaaatttcgagaggcttttatatctccaacaaggcgtctttttggactgctctcagaccatggggatcttgtcctggcaactgctgagatcaactcatcacaagttgaatctcatagagctctatcggatacctgtactcaggcagtcttcaaaacgttttctactattccccgagtgaagtctttagcatggggatactgttctgatgcttttgatgactcaagttttaatgaaattctagtggtatcaagtgatgcttctatcacagtccatgcattctgccattctcgcaaaagcacactaacagttaattcaatgtctgatgctaaagagttgcatggggagtggaaagagtggcgccctactgaatgttcagtgttggaggatggtgagtcaggtccagaaaattggttttgttctttcctaactacagtcactgcgtctgtttctaatggaaaataccaagccagattgcccatgaaatctttattgcctaattcagcagaagttgtatcctttagcatatatgacattactctctctttcttgaaatattggtatagcaaatgttctctgaagactatggcggaaactgacagtgaatcaccacgacgttttcttagagcatcgtgcagttgtcagtgggagtgtctaaaagttttgtctagctcgtcatgttatttgatcggcttagttctgactcctaatgaatcagtacgttgtgaggcccatccatccaatgcggagtgtattttggttactgttctggagctaaaccactggggcatacagtggaactttgtggcagaccttcaggatgtatctgatggtattacgccaagtccaaaatgggttgattttcagttatcagatgtgtttcttgcctgccttaatacagcaggttttgttgccatttggaacgtgaaaactggtggtcttgtgacgtcattcagtgttcttcaacaatgcagaactgatctggagatgcctctgaggagctctatgtccattgtgacaaatttggacgagggaaatatccatgttgagaactttgttggcagaatgtttaagcggttagttttggcatcatattcttatcttcttgctgttgtagatgaggttggagtagtgtatgtgttctatgcggatgacatcttaaacttcaaagctaatgtgcacgaaaactttgatctgcctgttatgaatcagtttgctgattgtttttctatctgggaagctgctggtcatgagataggaagtctatcattttgtgctaatcagtccatacaacaagggtcacttagtctaaccaaattggttcctgagttctcagggaaaagcgatgatattgtcaggcctagagaaagaagaaaatatagatgcgatgaaaatgaagtggacagctggccaagtggctttgtcactgcagggcagatgaaagttggggcaggttatcgtcgcacaaattcctcttgtttctttaggaggataattcttcctccatgcagatcacagcaggatgtaattagcctgtgtccacttggactaactagaatttttaaaggttctattgcggatggaaacgagcatgtcaaaatttttcattccgagttgcttatgtattcatcttttcttggcaaaggagatattgatattggttttatggacgaaatgcttccatttaaaaaggattccacttttgtcggagattctgttgtttgctcctgccagggatatttgtatttaattacccagtatggcctttctgtggtccttcctccagtttctatatcatccttttcatctcaatgtgacgctatcaaattctggcaaatgggtcctgctgctggtagcacatgcaatgctctgaacttactatctgttgacaaatcagacacaagctggaaaacctggcaaatagaagtcctggatagagctttgttgtatgaaggtcccgcactagcagacaggctctgttgggagaatggatgggatttgaaattctctaggttacgttggctgcaattagcccttcattactcaatgattggtgatctagagcagtcactgaatttactcgctgaggttaatcttgcggaagaaggtgtattgcaactgctattggcatctattcataggttatctagtaggactggaagtgataatgaagccacagtgtcatccaagttaatggttttagctgttcgctttgcaacaagaatgataaaatgttacgggttacagaagcaaaccacagacaataattcagtaaagcttcatgaaatggctctccttttgatggcaataagaagtatccagagccgagtctctgcaaagaatcagaattctgtttggatgcagggagatgataagagctcattgaaaatagggccatcgggtgggttagatactcatgacaggcaagagttggttcctgtgtgtgttcctgatagcaacagcatgttagctctaacaccagttgggtcatctcttagtgcttcaacttttcatgatattgatactaataaaaggactacccaagttggaagtcaaaattttcaaggaaatatcaaggagatgattaacagatgggaaatgaataactttgacttaaaaattgtagtcagagaagcactgcagtctggtcgcctacctttggcagttcttcagttgcagcttttgcgccagagggaattagtttccaatgattattctgaagatgctttctctgaagttcatgaaattggaaggtccattgtgtatgacctgttgatgaagggtgaaactggattggctgtagcaacactagaaaggctaggaaatgatgtagagtcggacctaagacaacttatgcaaggtactgtcaggaggtcactaaggctacaaattgctgacgagatgaagaagcgtgggtacataacaccagatgactggaagatgctagaaactataacactaattgagcgtctctaccctagcagcagcttctggaacacatacttttacagggagaatgtcattcgtgatgctgcaaaaattgttacactgccaggagacgataaacctgtattggctctaaatattcgcaaccaccccattattgaatgtggtgatgttgacggagcagtgcttggttcttgggtgaacattaatgattgcactaaggagttttctgggagcaacatttctgatggttattgggcctgtgctgctgtgtggtcggatgcttggggtccgagaactgtggaccgtatattgctggaccagccttatcatgtacatgctcatgtcccatgggaatctcagtttgaatattttgttgctcataatgatgtggggaaagtctgcgaactcctggacatgattcccaatagcatactttcagaagggattattagagtaaacgtgaacagtttacaagctcctgccaacactctttctgatttaacagtccctgattacaacatgtacatatgtgactcagaagagcttgaacctttctgtgtggagataccacatgttaaagtatttagatctttgtggaatcatgagtcaacattatatattcgaatggtaatgcagcaggaattggcaaagagacacatctttatgaaagagtattggcaaagtactactgaaattatacctttgcttgctcgtgctggcatacttataaaggttggtctaaaggaagaatgttctacaatattttctgcttcagagattccagatgatgcccatcaccagggccgtgaaggcgcactgcataagctaatcatacgtttctgtgtgcaatataacttgccatatctactggacctctatctggacacctgtaatttgactcctgataaggattgtatccgtttactcaaagaaaacacaggtgattgcaagtgggcacaatggttactcttctccaggatcaaaggttatgagtatgaggcatcattctctaatgcacgttggaatttgtcaaagaaaatggtcaataatagtaatcctacggctgttgagatagatgaaatgttgtatacagtagatgatatggcagaacgaattggtgaaatgtctgcattagctaccttgatgtatgcttcagcaccaattcagaaatccatatgtactggaagtgtgaacagaagtggttcgtcttcccagtgcacattggagaacctggctccttgtctccagcaatttccaacactatggaaaacccttttttcagcttgttttggccaagatgaatatgggtgtttaaactactctgctggtaatgcgtatggaaaaagatcaatttcagagtacttgagatggcgctatagcgttttttcctctgctggaggagacacttcgttgttgcaaatgcttccatgttgggtcccaaagtctgttagaagattaattcaactatttgaacagggcccttttggaatgcaacttctatcaactgccccatcatctgaagagttattcactcacggtgtctccaattatatatacaattctactggatataccgaagccaatgcactgtccttagaagcatcgatccaaaaaagtgttgaagaagaattatattcttcccttgaggagaaagatgtgagagtggaacaccatttgcaccgtggtcgagccttagctgctttcaggcatcttattgctaagagggcttcacagttgaaatcagctagtgcacgtcaagtgatatccgcacagtctaatgttcaagcagatgtacaattgatacttgctcctctaagtcaagttgaacgatcaattcttatatcggtggctccactagctattacaaactttgaggactcgactctagttgcttcctgtatattcttgttggaactttgtggcctgtgtgccaacatgcttcgtttagatattgctgcactacgacgcatctcttcctactacaagtcagttcaagaaaataaacatgttgatctatctccaccaaggggcccagagctccatgtgcagtcccatggagctggtatagctcctgctctagctcgagcgctagctgaagattatgtccagtctgatcatctgcatgttttggagcagactcaaacctcgatggctcccaagcgggaacagacacaatatcctcttatttctattctgcaacaccttgaaaaagcaagtttgccatcattggaggaaggtaaaacttgtgggttttggcttttgactggtgttggtgatgcatctctttaccggtcgcaacagaatgaagcaagtcaacactggaatttggttactgaattctgtcaggcacactatctcccactaagtacaaaatatcttgcattactggccaatgacaatgattgggttggttttttaacagaagctcagatagctggattttctattgaagctgttattgaagtggcagccaaagagatcagggattcaagactgagggcccacatactgactgttctaaaaaatatgatatcacttcgaaggaaatcatctggtaatgtaccttcaggaagcagtgatccatctttctcttctgttgatggcaataatcccatggaacttttctgcattcttggagtctgtgaaaagcaaaaaaaccctggggaggcactcctaattaaagcaaaacaaatgcagtggtctttgcttgccatgattgcctcatgctttccggatgtaactcctctcacatgcttaagtgtttggcttgagattacagccgcaagggagatgtcctcgatcaaggtggatgatgtttccttgaaaatagcaaagaatgttggatctgctgttgaagccacaaataaattgccaagcactagcagaaatgttgaatttcgttacaataggaagaatccaaagcgaagacggttcctggaagcgtcacatgaaaagttatgtttctcaatagatagcacatgtgggccagattctgctgcaacttccaatcctatcagtattgttgaccatcagggaataggaaagccaatctcaggagaaaccataatgtccgttgatattgatgaaaggcttgcatctttatcaaacatggtagcagtgctttgcgaacaacaactgtttctaccattacttagagcttttgaaatgtttttgccttcctgctcccttctttccttcattcgttctctccaggcattttctcaaatgcgtcttcccgaggcttctgcacgtttggcatccttttcagcaagaataaaagatgaagcctctcatactcaactaaactcttccaaagaagtgtcagtaatagcagaatgggtggccactacagctgtaaaagctgcagatgctgtcctttcaaactgttcatcaatttatgagaagaggtgtctactgcagcttctttcagcagtggattttgctgatggtggcacttcatcatcttactttagccgaagatattggaagattaatctgtctgaaccatctttgtgtaaagatactgatgtgtacaactggaatgatttgatggatgatgcttctcttttaacatcattagaaaaggacggtcaatgggagcaagctcgaacttgggcaagacatctggagtcaagtggcatagcttgggaatctactcttgatcatgtcactgaatcacaggcagaagccatggttgctgaatggaaggagtttctttgggatatcccacaagaacgtgcagccttgtggggtcactgtcaatctctctttatgagatattctttccctcctttaaaggctggattatttttccttaagcatgccgaagcagtaggaaaagagataccagcacaagagcttcatgaaatattattgctctctttacaatggctaagtggaactatgactaaatcctctccggtctatcctcttcatcttttgcgggaaattgagactagggtgtggctcctggctgttgagtcagagagtcaatccaaggttgatggtgaatttgccacttctgctgttgctcataacaaagctgttggaaacagtagcagtattatagaacatactgctgatatcatcacaaaaatagacagtaacatgagcttgccgcacatgaaaattacagaaaggaatagcacacgggacagtttatcataccaacatgtgcaactctttgagtctaacagtgaagcatcttcaacaacaataaataacacgcgagcaaagcgaaggatgaaaacaaattcaccacttaaacgaggtgtcaatgacaatattgaaagtagagctaatgagctggataacaattctaacactttacatagttcaaagattggtgaacaagctagaaatttgctctctgaagaggaatttgtaaagatggaagcatctttatctggttgggaacaaaatgttaggcctgtagatatggagaaggctgtgctctctttactggaatttgggcaaataactgctgctaagcaactccaacaaaagctgtctccatcatatattcctgaagaacttgtccttgttgatgttgctttaagaattgccaaaaacagcagtaatggagagatcaatttgtcatgctttgacacacaggctcttcggatacttcagtcactgagagtagcaaatagctgcgatatgattagcccatcacaggttatggagatactagctgcgaaatgtggtgagggtcgtgggcgagctcttattaggagaataataggagttgttcgaactgctagattattgggactcccattttccgaagcatttgagaaacaaccaattgaacttctacagttgctttccctgaaagctcaggattcttttgatgaagcgaaatttctagtggagacacacatcatgcctgcatctagcattgcaagaattctagctgattcgttcctaaaggggcttttggccgcacatcgtggaggctatttggattcccaaaaggaagagggtcctgcacctctattgtggagatcaagtgacttcttaaagtgggcaaaactatgtccatcagaatcagaaattggccatgctttgatgcgtttggtaatgactggacatgaagtaccacatgcttgtgaggttgaactcctaatattgtcgcaccacttctacatgtcatcttcttgtcttgatggagtggatgttctcgtcacatttgcagcaaatagagtggactcatatgttttagaggaggatttttcttgtttagctcgtttgatcactggagtgagcaatttccattccttgagcttcattctttcaatccttgtagagaatggccaattggagttgctgcttcaaaagtattctgccactgacacagccacagggacgcttgcatcggttcgaggatttaggatggctgttattacatcactgaaacagtttatcccgaatgatgacgacgctctctctatggtatacaagcactttgacatgaagcatgaagctgcttctctccttgaatcacgtgcagagcaatacatgaacagctggttatcacgatatgataaggaacggcgaaatgatgagcttctggacgctatgcatcatcttgtagagacagctgaggttctttcaactattgatgctggccaaagaacacatcgtgcttgtgcccgtgcttctcttctgtcacttcagatccgaataccagatcttttgtggattggtctttctgagaccaatgcccggcggatttttgtggaacaatctaggttccaggaagctcttattgttgctgaagcatacaacataaatcaacctatagaatgggccccagtcttttggaatcaaatgctaaaaccggatctaatcgagcaattcgtggctgagtttgtctcagtgctgcccctgcagccaccaatgcttctcgagcttgcaaggttttacagggcggaggttgcagccaggggggagcagtcacacttctctgtctggctttcacctggaggcttgcctgcagagtgggtgaaacatcttggtagatccttcaggagcctgctgcgtagaacaagggacatgaggctgaggctgcagttggcaactctggcgacaggcttcattgacgtccttgttatttgcaatagagttttggacaaagtcccggacaatgctggcccgctgatcctaaggaagggacatggtggagcataccttcctctcatgtagatatttcccttctctttttggtgcattggattcagaacttaattcttggcagttaggctatatattgaaaggcagatgaatcttgcaaatattatatgtatcagctttctttggttcagcatctttaaagtcaagcttggctgcagtcttggacatggattctcatcgatgatgccatgaaagacttttgtgattgtatgtgcagcattttgagcggaaaagctggcagaaatgggatttttgcagcttcatccggcaggtgttttcgcacccatgatatattgtatgttttgcatgtacgaagatccgccccgtatttgttttcctcttttttttttggttttgcaagtgtcatgtaggtcgatttgctgtctgtgatttggactgcaagtctgcaaccagacggcagatgcgtcgagacgtcgagtgtccagtccagcgaaagcgtaaatacaaagcacatggacgttaaccagacggcagatagcctttgtttgttgttctactggtaatgttcttattttctaaccatggttttacaacccaggggatcttgtcctggcaactgctgagatcaactcatcacaagttgaatctcagagctctatcggatacctgtactcaggcagtcttcaaaacgttttctactattccccgagtgaagtctttagcatggggatactgttctgatgcttttgatgactcaagttttaatgaaattctagtggtatcaagtgatgcttctatcacagtccatgcattctgccattctcgcaaaagcacactaacagttaattcaatgtctgatgctaaagagttgcatggggagtggaaagagtggcgccctactgaatgttcagtgttggaggatggtgagtcaggtccagataattggttttgttcttttcctaactacagtcactgcgtctgtttctaatggaaaaataccaagccagattgcccatgaaatctttattgcctaattcagcagaagttgtatcctttagcatatatgacattactctctctttcttgaaatattggtatagcaaatgttctctgaagactatggcggaaactgacagtgaatcaccacgacgttttcttagagcatcgtgcagttgtcagtgggagtgtctaaaagttttgtctagctcgtcatgttatttgatcggcttagttctgactcctaatgaatcagtacgttgtgaggcccatccatccaatgcggagtgtattttggttactgttctggagctaaaccactggggcatacagtggaactttgtggcagaccttcaggatgtatctgatggtattacgccaagtccaaaatgggttgattttcagttatcagatgtgtttcttgcctgccttaatacagcaggttttgttgccatttggaacgtgaaaactggtggtcttgtgacgtcattcagtgttcttcaacaatgcagaactgatctggagatgcctctgaggagctctatgtccattgtgacaaatttggacgagggaaatatccatgttgagaactttgttggcagaatgtttaagcggttagttttggcatcatattcttatcttcttgctgttgtagatgaggttggagtagtgtatgtgttctatgcggatgacatcttaaacttcaaagctaatgtgcacgaaaactttgatctgcctgttatgaatcagtttgctgattgtttttctatctgggaagctgctggtcatgagataggaagtctatcattttgtgctaatcagtccatacaacaagggtcacttagggggtgtttggtttcta

SEQ ID NO: 11613 - DNA, 11254 bp, Zea Mays
cggagggaacaactgccgcacggcacggagacagacgcggacagaccgagcgattggtcggcgaccacctcacctccgccgccatccactcctcggctcgggctccacgcaatgttactcgttaccatcattagctgttgatgggcatatgaacgatgtccacatctcgtcagatagatgatgggcctgctgtactacagttatgcagatggacattgctacaaccccatctcaaactatcaaaatttcgagaggcttttatatctccaacaaggcgtctttttggactgctctcagaccatggggatcttgtcctggcaactgctgagatcaactcatcacaagttgaatctcatagagctctatcggatacctgtactcaggcagtcttcaaaacgttttctactattccccgagtgaagtctttagcatggggatactgttctgatgcttttgatgactcaagttttaatgaaattctagtggtatcaagtgatgcttctatcacagtccatgcattctgccattctcgcaaaagcacactaacagttaattcaatgtctgatgctaaagagttgcatggggagtggaaagagtggcgccctactgaatgttcagtgttggaggatggtgagtcaggtccagaaaattggttttgttctttcctaactacagtcactgcgtctgtttctaatggaaaataccaagccagattgcccatgaaatctttattgcctaattcagcagaagttgtatcctttagcatatatgacattactctctctttcttgaaatattggtatagcaaatgttctctgaagactatggcggaaactgacagtgaatcaccacgacgttttcttagagcatcgtgcagttgtcagtgggagtgtctaaaagttttgtctagctcgtcatgttatttgatcggcttagttctgactcctaatgaatcagtacgttgtgaggcccatccatccaatgcggagtgtattttggttactgttctggagctaaaccactggggcatacagtggaactttgtggcagaccttcaggatgtatctgatggtattacgccaagtccaaaatgggttgattttcagttatcagatgtgtttcttgcctgccttaatacagcaggttttgttgccatttggaacgtgaaaactggtggtcttgtgacgtcattcagtgttcttcaacaatgcagaactgatctggagatgcctctgaggagctctatgtccattgtgacaaatttggacgagggaaatatccatgttgagaactttgttggcagaatgtttaagcggttagttttggcatcatattcttatcttcttgctgttgtagatgaggttggagtagtgtatgtgttctatgcggatgacatcttaaacttcaaagctaatgtgcacgaaaactttgatctgcctgttatgaatcagtttgctgattgtttttctatctgggaagctgctggtcatgagataggaagtctatcattttgtgctaatcagtccatacaacaagggtcacttagtctaaccaaattggttcctgagttctcagggaaaagcgatgatattgtcaggcctagagaaagaagaaaatatagatgcgatgaaaatgaagtggacagctggccaagtggctttgtcactgcagggcagatgaaagttggggcaggttatcgtcgcacaaattcctcttgtttctttaggaggataattcttcctccatgcagatcacagcaggatgtaattagcctgtgtccacttggactaactagaatttttaaaggttctattgcggatggaaacgagcatgtcaaaatttttcattccgagttgcttatgtattcatcttttcttggcaaaggagatattgatattggttttatggacgaaatgcttccatttaaaaaggattccacttttgtcggagattctgttgtttgctcctgccagggatatttgtatttaattacccagtatggcctttctgtggtccttcctccagtttctatatcatccttttcatctcaatgtgacgctatcaaattctggcaaatgggtcctgctgctggtagcacatgcaatgctctgaacttactatctgttgacaaatcagacacaagctggaaaacctggcaaatagaagtcctggatagagctttgttgtatgaaggtcccgcactagcagacaggctctgttgggagaatggatgggatttgaaattctctaggttacgttggctgcaattagcccttcattactcaatgattggtgatctagagcagtcactgaatttactcgctgaggttaatcttgcggaagaaggtgtattgcaactgctattggcatctattcataggttatctagtaggactggaagtgataatgaagccacagtgtcatccaagttaatggttttagctgttcgctttgcaacaagaatgataaaatgttacgggttacagaagcaaaccacagacaataattcagtaaagcttcatgaaatggctctccttttgatggcaataagaagtatccagagccgagtctctgcaaagaatcagaattctgtttggatgggagatgataagagctcattgaaaataggtacagaagtatttcagcatgattcttcagttccagttgttgtactggatggtgtttcatcagggccatcgggtgggttagatactcatgacaggcaagagttggttcctgtgtgtgttcctgatagcaacagcatgttagctctaacaccagttgggtcatctcttagtgcttcaacttttcatgatattgatactaataaaaggactacccaagttggaagtcaaaattttcaaggaaatatcaaggagatgattaacagatgggaaatgaataactttgacttaaaaattgtagtcagagaagcactgcagtctggtcgcctacctttggcagttcttcagttgcagcttttgcgccagagggaattagtttccaatgattattctgaagatgctttctctgaagttcatgaaattggaaggtccattgtgtatgacctgttgatgaagggtgaaactggattggctgtagcaacactagaaaggctaggaaatgatgtagagtcggacctaagacaacttatgcaaggtactgtcaggaggtcactaaggctacaaattgctgacgagatgaagaagcgtgggtacataacaccagatgactggaagatgctagaaactataacactaattgagcgtctctaccctagcagcagcttctggaacacatacttttacagggagaatgtcattcgtgatgctgcaaaaattgttacactgccaggagacgataaacctgtattggctctaaatattcgcaaccaccccattattgaatgtggtgatgttgacggagcagtgcttggttcttgggtgaacattaatgattgcactaaggagttttctgggagcaacatttctgatggttattgggcctgtgctgctgtgtggtcggatgcttggggtccgagaactgtggaccatattgctggaccagccttatcatgtacatgctcatgtcccatgggaatctcagtttgaatattttgttgctcataatgatgtggggaaagtctgcgaactcctggacatgattcccaatagcatactttcagaagggattattagagtaaacgtgaacagtttacaagctcctgccaacactctttctgatttaacagtccctgattacaacatgtacatatgtgactcagaagagcttgaacctttctgtgtggagataccacatgttaaagtatttagatctttgtggaatcatgagtcaacattatatattcgaatggtaatgcagcaggaattggcaaagagacacatctttatgaaagagtattggcaaagtactactgaaattatacctttgcttgctcgtgctggcatacttataaaggttggtctaaaggaagaatgttctacaatattttctgcttcagagattccagatgatgcccatcaccagggccgtgaaggcgcactgcataagctaatcatacgtttctgtgtgcaatataacttgccatatctactggacctctatctggacacctgtaatttgactcctgataaggattgtatccgtttactcaaagaaaacacaggtgattgcaagtgggcacaatggttactcttctccaggatcaaaggttatgagtatgaggcatcattctctaatgcacgttggaatttgtcaaagaaaatggtcaataatagtaatcctacggctgttgagatagatgaaatgttgtatacagtagatgatatggcagaacgaattggtgaaatgtctgcattagctaccttgatgtatgcttcagcaccaattcagaaatccatatgtactggaagtgtgaacagaagtggttcgtcttcccagtgcacattggagaacctggctccttgtctccagcaatttccaacactatggaaaacccttttttcagcttgttttggccaagatgaatatgggtgtttaaactactctgctgcgtatggaaaaagatcaatttcagagtacttgagatggcgctatagcgttttttcctctgctggaggagacacttcgttgttgcaaatgcttccatgttgggtcccaaagtctgttagaagattaattcaactatttgaacagggcccttttggaatgcaacttctatcaactgccccatcatctgaagagttattcactcacggtgtctccaattatatatacaattctactggatataccgaagccaatgcactgtccttagaagcatcgatccaaaaaagtgttgaagaagaattatattcttcccttgaggagaaagatgtgagagtggaacaccatttgcaccgtggtcgagccttagctgctttcaggcatcttattgctaagagggcttcacagttgaaatcagctagtgcacgtcaagtgatatccgcacagtctaatgttcaagcagatgtacaattgatacttgctcctctaagtcaagttgaacgatcaattcttatatcggtggctccactagctattacaaactttgaggactcgactctagttgcttcctgtatattcttgttggaactttgtggcctgtgtgccaacatgcttcgtttagatattgctgcactacgacgcatctcttcctactacaagtcagttcaagaaaataaacatgttgatctatctccaccaaggggcccagagctccatgtgcagtcccatggagctggtatagctcctgctctagctcgagcgctagctgaagattatgtccagtctgatcatctgcatgttttggagcagactcaaacctcgatggctcccaagcgggaacagacacaatatcctcttatttctattctgcaacaccttgaaaaagcaagtttgccatcattggaggaaggtaaaacttgtgggttttggcttttgactggtgttggtgatgcatctctttaccggtcgcaacagaatgaagcaagtcaacactggaatttggttactgaattctgtcaggcacactatctcccactaagtacaaaatatcttgcattactggccaatgacaatgattgggttggttttttaacagaagctcagatagctggattttctattgaagctgttattgaagtggcagccaaagagatcagggattcaagactgagggcccacatactgactgttctaaaaaatatgatatcacttcgaaggaaatcatctggtaatgtaccttcaggaagcagtgatccatctttctcttctgttgatggcaataatcccatggaacttttctgcattcttggagtctgtgaaaagcaaaaaaaccctggggaggcactcctaattaaagcaaaacaaatgcagtggtctttgcttgccatgattgcctcatgctttccggatgtaactcctctcacatgcttaagtgtttggcttgagattacagccgcaagggagatgtcctcgatcaaggtggatgatgtttccttgaaaatagcaaagaatgttggatctgctgttgaagccacaaataaattgccaagcactagcagaaatgttgaatttcgttacaataggaagaatccaaagcgaagacggttcctggaagcgtcacatgaaaagttatgtttctcaatagatagcacatgtgggccagattctgctgcaacttccaatcctatcagtattgttgaccatcagggaataggaaagccaatctcaggagaaaccataatgtccgttgatattgatgaaaggcttgcatctttatcaaacatggtagcagtgctttgcgaacaacaactgtttctaccattacttagagcttttgaaatgtttttgccttcctgctcccttctttccttcattcgttctctccaggcattttctcaaatgcgtcttcccgaggcttctgcacgtttggcatccttttcagcaagaataaaagatgaagcctctcatactcaactaaactcttccaaagaagtgtcagtaatagcagaatgggtggccactacagctgtaaaagctgcagatgctgtcctttcaaactgttcatcaatttatgagaagaggtgtctactgcagcttctttcagcagtggattttgctgatggtggcacttcatcatcttactttagccgaagatattggaagattaatctgtctgaaccatctttgtgtaaagatactgatgtgtacaactggaatgatttgatggatgatgcttctcttttaacatcattagaaaaggacggtcaatgggagcaagctcgaacttgggcaagacatctggagtcaagtggcatagcttgggaatctactcttgatcatgtcactgaatcacaggcagaagccatggttgctgaatggaaggagtttctttgggatatcccacaagaacgtgcagccttgtggggtcactgtcaatctctctttatgagatattctttccctcctttaaaggctggattatttttccttaagcatgccgaagcagtaggaaaagagataccagcacaagagcttcatgaaatattattgctctctttacaatggctaagtggaactatgactaaatcctctccggtctatcctcttcatcttttgcgggaaattgagactagggtgtggctcctggctgttgagtcagagagtcaatccaaggttgatggtgaatttgccacttctgctgttgctcataacaaagctgttggaaacagtagcagtattatagaacatactgctgatatcatcacaaaaatagacagtaacatgagcttgccgcacatgaaaattacagaaaggaatagcacacgggacagtttatcataccaacatgtgcaactctttgagtctaacagtgaagcatcttcaacaacaataaataacacgcgagcaaagcgaaggatgaaaacaaattcaccacttaaacgaggtgtcaatgacaatattgaaagtagagctaatgagctggataacaattctaacactttacatagttcaaagattggtgaacaagctagaaatttgctctctgaagaggaatttgtaaagatggaagcatctttatctggttgggaacaaaatgttaggcctgtagatatggagaaggctgtgctctctttactggaatttgggcaaataactgctgctaagcaactccaacaaaagctgtctccatcatatattcctgaagaacttgtccttgttgatgttgctttaagaattgccaaaaacagcagtaatggagagatcaatttgtcatgctttgacacacaggctcttcggatacttcagtcactgagagtagcaaatagctgcgatatgattagcccatcacaggttatggagatactagctgcgaaatgtggtgagggtcgtgggcgagctcttattaggagaataataggagttgttcgaactgctagattattgggactcccattttccgaagcatttgagaaacaaccaattgaacttctacagttgctttccctgaaagctcaggattcttttgatgaagcgaaatttctagtggagacacacatcatgcctgcatctagcattgcaagaattctagctgattcgttcctaaaggggcttttggccgcacatcgtggaggctatttggattcccaaaaggaagagggtcctgcacctctattgtggagatcaagtgacttcttaaagtgggcaaaactatgtccatcagaatcagaaattggccatgctttgatgcgtttggtaatgactggacatgaagtaccacatgcttgtgaggttgaactcctaatattgtcgcaccacttctacatgtcatcttcttgtcttgatggagtggatgttctcgtcacatttgcagcaaatagagtggactcatatgttttagaggaggatttttcttgtttagctcgtttgatcactggagtgagcaatttccattccttgagcttcattctttcaatccttgtagagaatggccaattggagttgctgcttcaaaagtattctgccactgacacagccacagggacgcttgcatcggttcgaggatttaggatggctgttattacatcactgaaacagtttatcccgaatgatgacgacgctctctctatggtatacaagcactttgacatgaagcatgaagctgcttctctccttgaatcacgtgcagagcaatacatgaacagctggttatcacgatatgataaggaacggcgaaatgatgagcttctggacgctatgcatcatcttgtagagacagctgaggttctttcaactattgatgctggccaaagaacacatcgtgcttgtgcccgtgcttctcttctgtcacttcagatccgaataccagatcttttgtggattggtctttctgagaccaatgcccggcggatttttgtggaacaatctaggttccaggaagctcttattgttgctgaagcatacaacataaatcaacctatagaatgggccccagtcttttggaatcaaatgctaaaaccggatctaatcgagcaattcgtggctgagtttgtctcagtgctgcccctgcagccaccaatgcttctcgagcttgcaaggttttacagggcggaggttgcagccaggggggagcagtcacacttctctgtctggctttcacctggaggcttgcctgcagagtgggtgaaacatcttggtagatccttcaggagcctgctgcgtagaacaagggacatgaggctgaggctgcagttggcaactctggcgacaggcttcattgacgtccttgttatttgcaatagagttttggacaaagtcccggacaatgctggcccgctgatcctaaggaagggacatggtggagcataccttcctctcatgtagatatttcccttctctttttggtgcattggattcagaacttaattcttggcagttaggctatatattgaaaggcagatgaatcttgcaaatattatatgtatcagctttctttggttcagcatctttaaagtcaagcttggctgcagtcttggacatggattctcatcgatgatgccatgaaagacttttgtgattgtatgtgcagcattttgagcggaaaagctggcagaaatgggatttttgcagcttcatccggcaggtgttttcgcacccatgatatattgtatgttttgcatgtacgaagatccgccccgtatttgttttcctcttttttttttggttttgcaagtgtcatgtaggtcgatttgctgtctgtgatttggactgcaagtctgcaaccagacggcagatgcgtcgagacgtcgagtgtccagtccagcgaaagcgtaaatacaaagcacatggacgttaaccagacggcagatagcctttgtttgttgttctactggtaatgttcttattttctaaccatggttttacaacccaggggatcttgtcctggcaactgctgagatcaactcatcacaagttgaatctcagagctctatcggatacctgtactcaggcagtcttcaaaacgttttctactattccccgagtgaagtctttagcatggggatactgttctgatgcttttgatgactcaagttttaatgaaattctagtggtatcaagtgatgcttctatcacagtccatgcattctgccattctcgcaaaagcacactaacagttaattcaatgtctgatgctaaagagttgcatggggagtggaaagagtggcgccctactgaatgttcagtgttggaggatggtgagtcaggtccagataattggttttgttcttttcctaactacagtcactgcgtctgtttctaatggaaaaataccaagccagattgcccatgaaatctttattgcctaattcagcagaagttgtatcctttagcatatatgacattactctctctttcttgaaatattggtatagcaaatgttctctgaagactatggcggaaactgacagtgaatcaccacgacgttttcttagagcatcgtgcagttgtcagtgggagtgtctaaaagttttgtctagctcgtcatgttatttgatcggcttagttctgactcctaatgaatcagtacgttgtgaggcccatccatccaatgcggagtgtattttggttactgttctggagctaaaccactggggcatacagtggaactttgtggcagaccttcaggatgtatctgatggtattacgccaagtccaaaatgggttgattttcagttatcagatgtgtttcttgcctgccttaatacagcaggttttgttgccatttggaacgtgaaaactggtggtcttgtgacgtcattcagtgttcttcaacaatgcagaactgatctggagatgcctctgaggagctctatgtccattgtgacaaatttggacgagggaaatatccatgttgagaactttgttggcagaatgtttaagcggttagttttggcatcatattcttatcttcttgctgttgtagatgaggttggagtagtgtatgtgttctatgcggatgacatcttaaacttcaaagctaatgtgcacgaaaactttgatctgcctgttatgaatcagtttgctgattgtttttctatctgggaagctgctggtcatgagataggaagtctatcattttgtgctaatcagtccatacaacaagggtcacttagggggtgtttggtttcta

SEQ ID NO: 11614 - DNA, 11343 bp, Zea Mays
cggagggaacaactgccgcacggcacggagacagacgcggacagaccgagcgattggtcggcgaccacctcacctccgccgccatccactcctcggctcgggctccacgcaatgttactcgttaccatcattagctgttgatgggcatatgaacgatgtccacatctcgtcagatagatgatgggcctgctgtactacagttatgcagatggacattgctacaaccccatctcaaactatcaaaatttcgagaggcttttatatctccaacaaggcgtctttttggactgctctcagaccatggggatcttgtcctggcaactgctgagatcaactcatcacaagttgaatctcatagagctctatcggatacctgtactcaggcagtcttcaaaacgttttctactattccccgagtgaagtctttagcatggggatactgttctgatgcttttgatgactcaagttttaatgaaattctagtggtatcaagtgatgcttctatcacagtccatgcattctgccattctcgcaaaagcacactaacagttaattcaatgtctgatgctaaagagttgcatggggagtggaaagagtggcgccctactgaatgttcagtgttggaggatggtgagtcaggtccagaaaattggttttgttctttcctaactacagtcactgcgtctgtttctaatggaaaataccaagccagattgcccatgaaatctttattgcctaattcagcagaagttgtatcctttagcatatatgacattactctctctttcttgaaatattggtatagcaaatgttctctgaagactatggcggaaactgacagtgaatcaccacgacgttttcttagagcatcgtgcagttgtcagtgggagtgtctaaaagttttgtctagctcgtcatgttatttgatcggcttagttctgactcctaatgaatcagtacgttgtgaggcccatccatccaatgcggagtgtattttggttactgttctggagctaaaccactggggcatacagtggaactttgtggcagaccttcaggatgtatctgatggtattacgccaagtccaaaatgggttgattttcagttatcagatgtgtttcttgcctgccttaatacagcaggttttgttgccatttggaacgtgaaaactggtggtcttgtgacgtcattcagtgttcttcaacaatgcagaactgatctggagatgcctctgaggagctctatgtccattgtgacaaatttggacgagggaaatatccatgttgagaactttgttggcagaatgtttaagcggttagttttggcatcatattcttatcttcttgctgttgtagatgaggttggagtagtgtatgtgttctatgcggatgacatcttaaacttcaaagctaatgtgcacgaaaactttgatctgcctgttatgaatcagtttgctgattgtttttctatctgggaagctgctggtcatgagataggaagtctatcattttgtgctaatcagtccatacaacaagggtcacttagtctaaccaaattggttcctgagttctcagggaaaagcgatgatattgtcaggcctagagaaagaagaaaatatagatgcgatgaaaatgaagtggacagctggccaagtggctttgtcactgcagggcagatgaaagttggggcaggttatcgtcgcacaaattcctcttgtttctttaggaggataattcttcctccatgcagatcacagcaggatgtaattagcctgtgtccacttggactaactagaatttttaaaggttctattgcggatggaaacgagcatgtcaaaatttttcattccgagttgcttatgtattcatcttttcttggcaaaggagatattgatattggttttatggacgaaatgcttccatttaaaaaggattccacttttgtcggagattctgttgtttgctcctgccagggatatttgtatttaattacccagtatggcctttctgtggtccttcctccagtttctatatcatccttttcatctcaatgtgacgctatcaaattctggcaaatgggtcctgctgctggtagcacatgcaatgctctgaacttactatctgttgacaaatcagacacaagctggaaaacctggcaaatagaagtcctggatagagctttgttgtatgaaggtcccgcactagcagacaggctctgttgggagaatggatgggatttgaaattctctaggttacgttggctgcaattagcccttcattactcaatgattggtgatctagagcagtcactgaatttactcgctgaggttaatcttgcggaagaaggtgtattgcaactgctattggcatctattcataggttatctagtaggactggaagtgataatgaagccacagtgtcatccaagttaatggttttagctgttcgctttgcaacaagaatgataaaatgttacgggttacagaagcaaaccacagacaataattcagtaaagcttcatgaaatggctctccttttgatggcaataagaagtatccagagccgagtctctgcaaagaatcagaattctgtttggatgcagggagatgataagagctcattgaaaataggtacagaagtatttcagcatgattcttcagttccagttgttgtactggatggtgtttcatcagggccatcgggtgggttagatactcatgacaggcaagagttggttcctgtgtgtgttcctgatagcaacagcatgttagctctaacaccagttgggtcatctcttagtgcttcaacttttcatgatattgatactaataaaaggactacccaagttggaagtcaaaattttcaaggaaatatcaaggagatgattaacagatgggaaatgaataactttgacttaaaaattgtagtcagagaagcactgcagtctggtcgcctacctttggcagttcttcagttgcagcttttgcgccagagggaattagtttccaatgattattctgaagatgctttctctgaagttcatgaaattggaaggtccattgtgtatgacctgttgatgaagggtgaaactggattggctgtagcaacactagaaaggctaggaaatgatgtagagtcggacctaagacaacttatgcaaggtactgtcaggaggtcactaaggctacaaattgctgacgagatgaagaagcgtgggtacataacaccagatgactggaagatgctagaaactataacactaattgagcgtctctaccctagcagcagcttctggaacacatacttttacagggagaatgtcattcgtgatgctgcaaaaattgttacactgccaggagacgataaacctgtattggctctaaatattcgcaaccaccccattattgaatgtggtgatgttgacggagcagtgcttggttcttgggtgaacattaatgattgcactaaggagttttctgggagcaacatttctgatggttattgggcctgtgctgctgtgtggtcggatgcttggggtccgagaactgtggaccgtatattgctggaccagccttatcatgtacatgctcatgtcccatgggaatctcagtttgaatattttgttgctcataatgatgtggggaaagtctgcgaactcctggacatgattcccaatagcatactttcagaagggattattagagtaaacgtgaacagtttacaagctcctgccaacactctttctgatttaacagtccctgattacaacatgtacatatgtgactcagaagagcttgaacctttctgtgtggagataccacatgttaaagtatttagatctttgtggaatcatgagtcaacattatatattcgaatggtaatgcagcaggaattggcaaagagacacatctttatgaaagagtattggcaaagtactactgaaattatacctttgcttgctcgtgctggcatacttataaaggttggtctaaaggaagaatgttctacaatattttctgcttcagagattccagatgatgcccatcaccagggccgtgaaggcgcactgcataagctaatcatacgtttctgtgtgcaatataacttgccatatctactggacctctatctggacacctgtaatttgactcctgataaggattgtatccgtttactcaaagaaaacacaggtgattgcaagtgggcacaatggttactcttctccaggatcaaaggttatgagtatgaggcatcattctctaatgcacgttggaatttgtcaaagaaaatggtcaataatagtaatcctacggctgttgagatagatgaaatgttgtatacagtagatgatatggcagaacgaattggtgaaatgtctgcattagctaccttgatgtatgcttcagcaccaattcagaaatccatatgtactggaagtgtgaacagaagtggttcgtcttcccagtgcacattggagaacctggctccttgtctccagcaatttccaacactatggaaaacccttttttcagcttgttttggccaagatgaatatgggtgtttaaactactctgctggtaatgcgtatggaaaaagatcaatttcagagtacttgagatggcgctatagcgttttttcctctgctggaggagacacttcgttgttgcaaatgcttccatgttgggtcccaaagtctgttagaagattaattcaactatttgaacagggcccttttggaatgcaacttctatcaactgccccatcatctgaagagttattcactcacggtgtctccaattatatatacaattctactggatataccgaagccaatgcactgtccttagaagcatcgatccaaaaaagtgttgaagaagaattatattcttcccttgaggagaaagatgtgagagtggaacaccatttgcaccgtggtcgagccttagctgctttcaggcatcttattgctaagagggcttcacagttgaaatcagctagtgcacgtcaagtgatatccgcacagtctaatgttcaagcagatgtacaattgatacttgctcctctaagtcaagttgaacgatcaattcttatatcggtggctccactagctattacaaactttgaggactcgactctagttgcttcctgtatattcttgttggaactttgtggcctgtgtgccaacatgcttcgtttagatattgctgcactacgacgcatctcttcctactacaagtcagttcaagaaaataaacatgttgatctatctccaccaaggggcccagagctccatgtgcagtcccatggagctggtatagctcctgctctagctcgagcgctagctgaagattatgtccagtctgatcatctgcatgttttggagcagactcaaacctcgatggctcccaagcgggaacagacacaatatcctcttatttctattctgcaacaccttgaaaaagcaagtttgccatcattggaggaaggtaaaacttgtgggttttggcttttgactggtgttggtgatgcatctctttaccggtcgcaacagaatgaagcaagtcaacactggaatttggttactgaattctgtcaggcacactatctcccactaagtacaaaatatcttgcattactggccaatgacaatgattgggttggttttttaacagaagctcagatagctggattttctattgaagctgttattgaagtggcagccaaagagatcagggattcaagactgagggcccacatactgactgttctaaaaaatatgatatcacttcgaaggaaatcatctggtaatgtaccttcaggaagcagtgatccatctttctcttctgttgatggcaataatcccatggaacttttctgcattcttggagtctgtgaaaagcaaaaaaaccctggggaggcactcctaattaaagcaaaacaaatgcagtggtctttgcttgccatgattgcctcatgctttccggatgtaactcctctcacatgcttaagtgtttggcttgagattacagccgcaagggagatgtcctcgatcaaggtggatgatgtttccttgaaaatagcaaagaatgttggatctgctgttgaagccacaaataaattgccaagcactagcagaaatgttgaatttcgttacaataggaagaatccaaagcgaagacggttcctggaagcgtcacatgaaaagttatgtttctcaatagatagcacatgtgggccagattctgctgcaacttccaatcctatcagtattgttgaccatcagggaataggaaagccaatctcaggagaaaccataatgtccgttgatattgatgaaaggcttgcatctttatcaaacatggtagcagtgctttgcgaacaacaactgtttctaccattacttagagcttttgaaatgtttttgccttcctgctcccttctttccttcattcgttctctccaggcattttctcaaatgcgtcttcccgaggcttctgcacgtttggcatccttttcagcaagaataaaagatgaagcctctcatactcaactaaactcttccaaagaagtgtcagtaatagcagaatgggtggccactacagctgtaaaagctgcagatgctgtcctttcaaactgttcatcaatttatgagaagaggtgtctactgcagcttctttcagcagtggattttgctgatggtggcacttcatcatcttactttagccgaagatattggaagattaatctgtctgaaccatctttgtgtaaagatactgatgtgtacaactggaatgatttgatggatgatgcttctcttttaacatcattagaaaaggacggtcaatgggagcaagctcgaacttgggcaagacatctggagtcaagtggcatagcttgggaatctactcttgatcatgtcactgaatcacagtgcttgaattttagtaccattcgtcaatgatgtgcagcttggtagcatacccaaaccatcacatgtttgctgtctgaggcagaagccatggttgctgaatggaaggagtttctttgggatatcccacaagaacgtgcagccttgtggggtcactgtcaatctctctttatgagatattctttccctcctttaaaggctggattatttttccttaagcatgccgaagcagtaggaaaagagataccagcacaagagcttcatgaaatattattgctctctttacaatggctaagtggaactatgactaaatcctctccggtctatcctcttcatcttttgcgggaaattgagactagggtgtggctcctggctgttgagtcagagagtcaatccaaggttgatggtgaatttgccacttctgctgttgctcataacaaagctgttggaaacagtagcagtattatagaacatactgctgatatcatcacaaaaatagacagtaacatgagcttgccgcacatgaaaattacagaaaggaatagcacacgggacagtttatcataccaacatgtgcaactctttgagtctaacagtgaagcatcttcaacaacaataaataacacgcgagcaaagcgaaggatgaaaacaaattcaccacttaaacgaggtgtcaatgacaatattgaaagtagagctaatgagctggataacaattctaacactttacatagttcaaagattggtgaacaagctagaaatttgctctctgaagaggaatttgtaaagatggaagcatctttatctggttgggaacaaaatgttaggcctgtagatatggagaaggctgtgctctctttactggaatttgggcaaataactgctgctaagcaactccaacaaaagctgtctccatcatatattcctgaagaacttgtccttgttgatgttgctttaagaattgccaaaaacagcagtaatggagagatcaatttgtcatgctttgacacacaggctcttcggatacttcagtcactgagagtagcaaatagctgcgatatgattagcccatcacaggttatggagatactagctgcgaaatgtggtgagggtcgtgggcgagctcttattaggagaataataggagttgttcgaactgctagattattgggactcccattttccgaagcatttgagaaacaaccaattgaacttctacagttgctttccctgaaagctcaggattcttttgatgaagcgaaatttctagtggagacacacatcatgcctgcatctagcattgcaagaattctagctgattcgttcctaaaggggcttttggccgcacatcgtggaggctatttggattcccaaaaggaagagggtcctgcacctctattgtggagatcaagtgacttcttaaagtgggcaaaactatgtccatcagaatcagaaattggccatgctttgatgcgtttggtaatgactggacatgaagtaccacatgcttgtgaggttgaactcctaatattgtcgcaccacttctacatgtcatcttcttgtcttgatggagtggatgttctcgtcacatttgcagcaaatagagtggactcatatgttttagaggaggatttttcttgtttagctcgtttgatcactggagtgagcaatttccattccttgagcttcattctttcaatccttgtagagaatggccaattggagttgctgcttcaaaagtattctgccactgacacagccacagggacgcttgcatcggttcgaggatttaggatggctgttattacatcactgaaacagtttatcccgaatgatgacgacgctctctctatggtatacaagcactttgacatgaagcatgaagctgcttctctccttgaatcacgtgcagagcaatacatgaacagctggttatcacgatatgataaggaacggcgaaatgatgagcttctggacgctatgcatcatcttgtagagacagctgaggttctttcaactattgatgctggccaaagaacacatcgtgcttgtgcccgtgcttctcttctgtcacttcagatccgaataccagatcttttgtggattggtctttctgagaccaatgcccggcggatttttgtggaacaatctaggttccaggaagctcttattgttgctgaagcatacaacataaatcaacctatagaatgggccccagtcttttggaatcaaatgctaaaaccggatctaatcgagcaattcgtggctgagtttgtctcagtgctgcccctgcagccaccaatgcttctcgagcttgcaaggttttacagggcggaggttgcagccaggggggagcagtcacacttctctgtctggctttcacctggaggcttgcctgcagagtgggtgaaacatcttggtagatccttcaggagcctgctgcgtagaacaagggacatgaggctgaggctgcagttggcaactctggcgacaggcttcattgacgtccttgttatttgcaatagagttttggacaaagtcccggacaatgctggcccgctgatcctaaggaagggacatggtggagcataccttcctctcatgtagatatttcccttctctttttggtgcattggattcagaacttaattcttggcagttaggctatatattgaaaggcagatgaatcttgcaaatattatatgtatcagctttctttggttcagcatctttaaagtcaagcttggctgcagtcttggacatggattctcatcgatgatgccatgaaagacttttgtgattgtatgtgcagcattttgagcggaaaagctggcagaaatgggatttttgcagcttcatccggcaggtgttttcgcacccatgatatattgtatgttttgcatgtacgaagatccgccccgtatttgttttcctcttttttttttggttttgcaagtgtcatgtaggtcgatttgctgtctgtgatttggactgcaagtctgcaaccagacggcagatgcgtcgagacgtcgagtgtccagtccagcgaaagcgtaaatacaaagcacatggacgttaaccagacggcagatagcctttgtttgttgttctactggtaatgttcttattttctaaccatggttttacaacccaggggatcttgtcctggcaactgctgagatcaactcatcacaagttgaatctcagagctctatcggatacctgtactcaggcagtcttcaaaacgttttctactattccccgagtgaagtctttagcatggggatactgttctgatgcttttgatgactcaagttttaatgaaattctagtggtatcaagtgatgcttctatcacagtccatgcattctgccattctcgcaaaagcacactaacagttaattcaatgtctgatgctaaagagttgcatggggagtggaaagagtggcgccctactgaatgttcagtgttggaggatggtgagtcaggtccagataattggttttgttcttttcctaactacagtcactgcgtctgtttctaatggaaaaataccaagccagattgcccatgaaatctttattgcctaattcagcagaagttgtatcctttagcatatatgacattactctctctttcttgaaatattggtatagcaaatgttctctgaagactatggcggaaactgacagtgaatcaccacgacgttttcttagagcatcgtgcagttgtcagtgggagtgtctaaaagttttgtctagctcgtcatgttatttgatcggcttagttctgactcctaatgaatcagtacgttgtgaggcccatccatccaatgcggagtgtattttggttactgttctggagctaaaccactggggcatacagtggaactttgtggcagaccttcaggatgtatctgatggtattacgccaagtccaaaatgggttgattttcagttatcagatgtgtttcttgcctgccttaatacagcaggttttgttgccatttggaacgtgaaaactggtggtcttgtgacgtcattcagtgttcttcaacaatgcagaactgatctggagatgcctctgaggagctctatgtccattgtgacaaatttggacgagggaaatatccatgttgagaactttgttggcagaatgtttaagcggttagttttggcatcatattcttatcttcttgctgttgtagatgaggttggagtagtgtatgtgttctatgcggatgacatcttaaacttcaaagctaatgtgcacgaaaactttgatctgcctgttatgaatcagtttgctgattgtttttctatctgggaagctgctggtcatgagataggaagtctatcattttgtgctaatcagtccatacaacaagggtcacttagggggtgtttggtttcta

SEQ ID NO: 11615 - DNA, 11208 bp, Zea Mays
aacggaagaagagagcggagggaacaactgccgcacggcacggagacagacgcggacagaccgagcgattggtcggcgaccacctcacctccgccgccatccactcctcggctcgggctccacgcaatgttactcgttaccatcattagctgttgatgggcatatgaacgatgtccacatctcgtcagatagatgatgggcctgctgtactacagttatgcagatggacattgctacaaccccatctcaaactatcaaaatttcgagaggcttttatatctccaacaaggcgtctttttggactgctctcagaccatggggatcttgtcctggcaactgctgagatcaactcatcacaagttgaatctcatagagctctatcggatacctgtactcaggcagtcttcaaaacgttttctactattccccgagtgaagtctttagcatggggatactgttctgatgcttttgatgactcaagttttaatgaaattctagtggtatcaagtgatgcttctatcacagtccatgcattctgccattctcgcaaaagcacactaacagttaattcaatgtctgatgctaaagagttgcatggggagtggaaagagtggcgccctactgaatgttcagtgttggaggatggtgagtcaggtccagaaaattggttttgttctttcctaactacagtcactgcgtctgtttctaatggaaaataccaagccagattgcccatgaaatctttattgcctaattcagcagaagttgtatcctttagcatatatgacattactctctctttcttgaaatattggtatagcaaatgttctctgaagactatggcggaaactgacagtgaatcaccacgacgttttcttagagcatcgtgcagttgtcagtgggagtgtctaaaagttttgtctagctcgtcatgttatttgatcggcttagttctgactcctaatgaatcagtacgttgtgaggcccatccatccaatgcggagtgtattttggttactgttctggagctaaaccactggggcatacagtggaactttgtggcagaccttcaggatgtatctgatggtattacgccaagtccaaaatgggttgattttcagttatcagatgtgtttcttgcctgccttaatacagcaggttttgttgccatttggaacgtgaaaactggtggtcttgtgacgtcattcagtgttcttcaacaatgcagaactgatctggagatgcctctgaggagctctatgtccattgtgacaaatttggacgagggaaatatccatgttgagaactttgttggcagaatgtttaagcggttagttttggcatcatattcttatcttcttgctgttgtagatgaggttggagtagtgtatgtgttctatgcggatgacatcttaaacttcaaagctaatgtgcacgaaaactttgatctgcctgttatgaatcagtttgctgattgtttttctatctgggaagctgctggtcatgagataggaagtctatcattttgtgctaatcagtccatacaacaagggtcacttagtctaaccaaattggttcctgagttctcagggaaaagcgatgatattgtcaggcctagagaaagaagaaaatatagatgcgatgaaaatgaagtggacagctggccaagtggctttgtcactgcagggcagatgaaagttggggcaggttatcgtcgcacaaattcctcttgtttctttaggaggataattcttcctccatgcagatcacagcaggatgtaattagcctgtgtccacttggactaactagaatttttaaaggttctattgcggatggaaacgagcatgtcaaaatttttcattccgagttgcttatgtattcatcttttcttggcaaaggagatattgatattggttttatggacgaaatgcttccatttaaaaaggattccacttttgtcggagattctgttgtttgctcctgccagggatatttgtatttaattacccagtatggcctttctgtggtccttcctccagtttctatatcatccttttcatctcaatgtgacgctatcaaattctggcaaatgggtcctgctgctggtagcacatgcaatgctctgaacttactatctgttgacaaatcagacacaagctggaaaacctggcaaatagaagtcctggatagagctttgttgtatgaaggtcccgcactagcagacaggctctgttgggagaatggatgggatttgaaattctctaggttacgttggctgcaattagcccttcattactcaatgattggtgatctagagcagtcactgaatttactcgctgaggttaatcttgcggaagaaggtgtattgcaactgctattggcatctattcataggttatctagtaggactggaagtgataatgaagccacagtgtcatccaagttaatggttttagctgttcgctttgcaacaagaatgataaaatgttacgggttacagaagcaaaccacagacaataattcagtaaagcttcatgaaatggctctccttttgatggcaataagaagtatccagagccgagtctctgcaaagaatcagaattctgtttggatgggagatgataagagctcattgaaaatagggccatcgggtgggttagatactcatgacaggcaagagttggttcctgtgtgtgttcctgatagcaacagcatgttagctctaacaccagttgggtcatctcttagtgcttcaacttttcatgatattgatactaataaaaggactacccaagttggaagtcaaaattttcaaggaaatatcaaggagatgattaacagatgggaaatgaataactttgacttaaaaattgtagtcagagaagcactgcagtctggtcgcctacctttggcagttcttcagttgcagcttttgcgccagagggaattagtttccaatgattattctgaagatgctttctctgaagttcatgaaattggaaggtccattgtgtatgacctgttgatgaagggtgaaactggattggctgtagcaacactagaaaggctaggaaatgatgtagagtcggacctaagacaacttatgcaaggtactgtcaggaggtcactaaggctacaaattgctgacgagatgaagaagcgtgggtacataacaccagatgactggaagatgctagaaactataacactaattgagcgtctctaccctagcagcagcttctggaacacatacttttacagggagaatgtcattcgtgatgctgcaaaaattgttacactgccaggagacgataaacctgtattggctctaaatattcgcaaccaccccattattgaatgtggtgatgttgacggagcagtgcttggttcttgggtgaacattaatgattgcactaaggagttttctgggagcaacatttctgatggttattgggcctgtgctgctgtgtggtcggatgcttggggtccgagaactgtggaccgtatattgctggaccagccttatcatgtacatgctcatgtcccatgggaatctcagtttgaatattttgttgctcataatgatgtggggaaagtctgcgaactcctggacatgattcccaatagcatactttcagaagggattattagagtaaacgtgaacagtttacaagctcctgccaacactctttctgatttaacagtccctgattacaacatgtacatatgtgactcagaagagcttgaacctttctgtgtggagataccacatgttaaagtatttagatctttgtggaatcatgagtcaacattatatattcgaatggtaatgcagcaggaattggcaaagagacacatctttatgaaagagtattggcaaagtactactgaaattatacctttgcttgctcgtgctggcatacttataaaggttggtctaaaggaagaatgttctacaatattttctgcttcagagattccagatgatgcccatcaccagggccgtgaaggcgcactgcataagctaatcatacgtttctgtgtgcaatataacttgccatatctactggacctctatctggacacctgtaatttgactcctgataaggattgtatccgtttactcaaagaaaacacaggtgattgcaagtgggcacaatggttactcttctccaggatcaaaggttatgagtatgaggcatcattctctaatgcacgttggaatttgtcaaagaaaatggtcaataatagtaatcctacggctgttgagatagatgaaatgttgtatacagtagatgatatggcagaacgaattggtgaaatgtctgcattagctaccttgatgtatgcttcagcaccaattcagaaatccatatgtactggaagtgtgaacagaagtggttcgtcttcccagtgcacattggagaacctggctccttgtctccagcaatttccaacactatggaaaacccttttttcagcttgttttggccaagatgaatatgggtgtttaaactactctgctgcgtatggaaaaagatcaatttcagagtacttgagatggcgctatagcgttttttcctctgctggaggagacacttcgttgttgcaaatgcttccatgttgggtcccaaagtctgttagaagattaattcaactatttgaacagggcccttttggaatgcaacttctatcaactgccccatcatctgaagagttattcactcacggtgtctccaattatatatacaattctactggatataccgaagccaatgcactgtccttagaagcatcgatccaaaaaagtgttgaagaagaattatattcttcccttgaggagaaagatgtgagagtggaacaccatttgcaccgtggtcgagccttagctgctttcaggcatcttattgctaagagggcttcacagttgaaatcagctagtgcacgtcaagtgatatccgcacagtctaatgttcaagcagatgtacaattgatacttgctcctctaagtcaagttgaacgatcaattcttatatcggtggctccactagctattacaaactttgaggactcgactctagttgcttcctgtatattcttgttggaactttgtggcctgtgtgccaacatgcttcgtttagatattgctgcactacgacgcatctcttcctactacaagtcagttcaagaaaataaacatgttgatctatctccaccaaggggcccagagctccatgtgcagtcccatggagctggtatagctcctgctctagctcgagcgctagctgaagattatgtccagtctgatcatctgcatgttttggagcagactcaaacctcgatggctcccaagcgggaacagacacaatatcctcttatttctattctgcaacaccttgaaaaagcaagtttgccatcattggaggaaggtaaaacttgtgggttttggcttttgactggtgttggtgatgcatctctttaccggtcgcaacagaatgaagcaagtcaacactggaatttggttactgaattctgtcaggcacactatctcccactaagtacaaaatatcttgcattactggccaatgacaatgattgggttggttttttaacagaagctcagatagctggattttctattgaagctgttattgaagtggcagccaaagagatcagggattcaagactgagggcccacatactgactgttctaaaaaatatgatatcacttcgaaggaaatcatctggtaatgtaccttcaggaagcagtgatccatctttctcttctgttgatggcaataatcccatggaacttttctgcattcttggagtctgtgaaaagcaaaaaaaccctggggaggcactcctaattaaagcaaaacaaatgcagtggtctttgcttgccatgattgcctcatgctttccggatgtaactcctctcacatgcttaagtgtttggcttgagattacagccgcaagggagatgtcctcgatcaaggtggatgatgtttccttgaaaatagcaaagaatgttggatctgctgttgaagccacaaataaattgccaagcactagcagaaatgttgaatttcgttacaataggaagaatccaaagcgaagacggttcctggaagcgtcacatgaaaagttatgtttctcaatagatagcacatgtgggccagattctgctgcaacttccaatcctatcagtattgttgaccatcagggaataggaaagccaatctcaggagaaaccataatgtccgttgatattgatgaaaggcttgcatctttatcaaacatggtagcagtgctttgcgaacaacaactgtttctaccattacttagagcttttgaaatgtttttgccttcctgctcccttctttccttcattcgttctctccaggcattttctcaaatgcgtcttcccgaggcttctgcacgtttggcatccttttcagcaagaataaaagatgaagcctctcatactcaactaaactcttccaaagaagtgtcagtaatagcagaatgggtggccactacagctgtaaaagctgcagatgctgtcctttcaaactgttcatcaatttatgagaagaggtgtctactgcagcttctttcagcagtggattttgctgatggtggcacttcatcatcttactttagccgaagatattggaagattaatctgtctgaaccatctttgtgtaaagatactgatgtgtacaactggaatgatttgatggatgatgcttctcttttaacatcattagaaaaggacggtcaatgggagcaagctcgaacttgggcaagacatctggagtcaagtggcatagcttgggaatctactcttgatcatgtcactgaatcacaggcagaagccatggttgctgaatggaaggagtttctttgggatatcccacaagaacgtgcagccttgtggggtcactgtcaatctctctttatgagatattctttccctcctttaaaggctggattatttttccttaagcatgccgaagcagtaggaaaagagataccagcacaagagcttcatgaaatattattgctctctttacaatggctaagtggaactatgactaaatcctctccggtctatcctcttcatcttttgcgggaaattgagactagggtgtggctcctggctgttgagtcagagagtcaatccaaggttgatggtgaatttgccacttctgctgttgctcataacaaagctgttggaaacagtagcagtattatagaacatactgctgatatcatcacaaaaatagacagtaacatgagcttgccgcacatgaaaattacagaaaggaatagcacacgggacagtttatcataccaacatgtgcaactctttgagtctaacagtgaagcatcttcaacaacaataaataacacgcgagcaaagcgaaggatgaaaacaaattcaccacttaaacgaggtgtcaatgacaatattgaaagtagagctaatgagctggataacaattctaacactttacatagttcaaagattggtgaacaagctagaaatttgctctctgaagaggaatttgtaaagatggaagcatctttatctggttgggaacaaaatgttaggcctgtagatatggagaaggctgtgctctctttactggaatttgggcaaataactgctgctaagcaactccaacaaaagctgtctccatcatatattcctgaagaacttgtccttgttgatgttgctttaagaattgccaaaaacagcagtaatggagagatcaatttgtcatgctttgacacacaggctcttcggatacttcagtcactgagagtagcaaatagctgcgatatgattagcccatcacaggttatggagatactagctgcgaaatgtggtgagggtcgtgggcgagctcttattaggagaataataggagttgttcgaactgctagattattgggactcccattttccgaagcatttgagaaacaaccaattgaacttctacagttgctttccctgaaagctcaggattcttttgatgaagcgaaatttctagtggagacacacatcatgcctgcatctagcattgcaagaattctagctgattcgttcctaaaggggcttttggccgcacatcgtggaggctatttggattcccaaaaggaagagggtcctgcacctctattgtggagatcaagtgacttcttaaagtgggcaaaactatgtccatcagaatcagaaattggccatgctttgatgcgtttggtaatgactggacatgaagtaccacatgcttgtgaggttgaactcctaatattgtcgcaccacttctacatgtcatcttcttgtcttgatggagtggatgttctcgtcacatttgcagcaaatagagtggactcatatgttttagaggaggatttttcttgtttagctcgtttgatcactggagtgagcaatttccattccttgagcttcattctttcaatccttgtagagaatggccaattggagttgctgcttcaaaagtattctgccactgacacagccacagggacgcttgcatcggttcgaggatttaggatggctgttattacatcactgaaacagtttatcccgaatgatgacgacgctctctctatggtatacaagcactttgacatgaagcatgaagctgcttctctccttgaatcacgtgcagagcaatacatgaacagctggttatcacgatatgataaggaacggcgaaatgatgagcttctggacgctatgcatcatcttgtagagacagctgaggttctttcaactattgatgctggccaaagaacacatcgtgcttgtgcccgtgcttctcttctgtcacttcagatccgaataccagatcttttgtggattggtctttctgagaccaatgcccggcggatttttgtggaacaatctaggttccaggaagctcttattgttgctgaagcatacaacataaatcaacctatagaatgggccccagtcttttggaatcaaatgctaaaaccggatctaatcgagcaattcgtggctgagtttgtctcagtgctgcccctgcagccaccaatgcttctcgagcttgcaaggttttacagggcggaggttgcagccaggggggagcagtcacacttctctgtctggctttcacctggaggcttgcctgcagagtgggtgaaacatcttggtagatccttcaggagcctgctgcgtagaacaagggacatgaggctgaggctgcagttggcaactctggcgacaggcttcattgacgtccttgttatttgcaatagagttttggacaaagtcccggacaatgctggcccgctgatcctaaggaagggacatggtggagcataccttcctctcatgtagatatttcccttctctttttggtgcattggattcagaacttaattcttggcagttaggctatatattgaaaggcagatgaatcttgcaaatattatatgtatcagctttctttggttcagcatctttaaagtcaagcttggctgcagtcttggacatggattctcatcgatgatgccatgaaagacttttgtgattgtatgtgcagcattttgagcggaaaagctggcagaaatgggatttttgcagcttcatccggcaggtgttttcgcacccatgatatattgtatgttttgcatgtacgaagatccgccccgtatttgttttcctcttttttttttggttttgcaagtgtcatgtaggtcgatttgctgtctgtgatttggactgcaagtctgcaaccagacggcagatgcgtcgagacgtcgagtgtccagtccagcgaaagcgtaaatacaaagcacatggacgttaaccagacggcagatagcctttgtttgttgttctactggtaatgttcttattttctaaccatggttttacaacccaggggatcttgtcctggcaactgctgagatcaactcatcacaagttgaatctcagagctctatcggatacctgtactcaggcagtcttcaaaacgttttctactattccccgagtgaagtctttagcatggggatactgttctgatgcttttgatgactcaagttttaatgaaattctagtggtatcaagtgatgcttctatcacagtccatgcattctgccattctcgcaaaagcacactaacagttaattcaatgtctgatgctaaagagttgcatggggagtggaaagagtggcgccctactgaatgttcagtgttggaggatggtgagtcaggtccagataattggttttgttcttttcctaactacagtcactgcgtctgtttctaatggaaaaataccaagccagattgcccatgaaatctttattgcctaattcagcagaagttgtatcctttagcatatatgacattactctctctttcttgaaatattggtatagcaaatgttctctgaagactatggcggaaactgacagtgaatcaccacgacgttttcttagagcatcgtgcagttgtcagtgggagtgtctaaaagttttgtctagctcgtcatgttatttgatcggcttagttctgactcctaatgaatcagtacgttgtgaggcccatccatccaatgcggagtgtattttggttactgttctggagctaaaccactggggcatacagtggaactttgtggcagaccttcaggatgtatctgatggtattacgccaagtccaaaatgggttgattttcagttatcagatgtgtttcttgcctgccttaatacagcaggttttgttgccatttggaacgtgaaaactggtggtcttgtgacgtcattcagtgttcttcaacaatgcagaactgatctggagatgcctctgaggagctctatgtccattgtgacaaatttggacgagggaaatatccatgttgagaactttgttggcagaatgtttaagcggttagttttggcatcatattcttatcttcttgctgttgtagatgaggttggagtagtgtatgtgttctatgcggatgacatcttaaacttcaaagctaatgtgcacgaaaactttgatctgcctgttatgaatcagtttgctgattgtttttctatctgggaagctgctggtcatgagataggaagtctatcattttgtgctaatcagtccatacaacaagggtcacttagggggtgtttggtttcta

SEQ ID NO: 11616 - DNA, 11031 bp, Zea Mays
cgaaatgaacggaagaagagagcggagggaacaactgccgcacggcacggagacagacgcggacagaccgagcgattggtcggcgaccacctcacctccgccgccatccactcctcggctcgggctccacgcaatgttactcgttaccatcattagctgttgatgggcatatgaacgatgtccacatctcgtcagatagatgatgggcctgctgtactacagttatgcagatggacattgctacaaccccatctcaaactatcaaaatttcgagaggcttttatatctccaacaaggcgtctttttggactgctctcagaccatggggatcttgtcctggcaactgctgagatcaactcatcacaagttgaatctcatagagctctatcggatacctgtactcaggcagtcttcaaaacgttttctactattccccgagtgaagtctttagcatggggatactgttctgatgcttttgatgactcaagttttaatgaaattctagtggtatcaagtgatgcttctatcacagtccatgcattctgccattctcgcaaaagcacactaacagttaattcaatgtctgatgctaaagagttgcatggggagtggaaagagtggcgccctactgaatgttcagtgttggaggatggtgagtcaggtccagaaaattggttttgttctttcctaactacagtcactgcgtctgtttctaatggaaaataccaagccagattgcccatgaaatctttattgcctaattcagcagaagttgtatcctttagcatatatgacattactctctctttcttgaaatattggtatagcaaatgttctctgaagactatggcggaaactgacagtgaatcaccacgacgttttcttagagcatcgtgcagttgtcagtgggagtgtctaaaagttttgtctagctcgtcatgttatttgatcggcttagttctgactcctaatgaatcagtacgttgtgaggcccatccatccaatgcggagtgtattttggttactgttctggagctaaaccactggggcatacagtggaactttgtggcagaccttcaggatgtatctgatggtattacgccaagtccaaaatgggttgattttcagttatcagatgtgtttcttgcctgccttaatacagcaggttttgttgccatttggaacgtgaaaactggtggtcttgtgacgtcattcagtgttcttcaacaatgcagaactgatctggagatgcctctgaggagctctatgtccattgtgacaaatttggacgagggaaatatccatgttgagaactttgttggcagaatgtttaagcggttagttttggcatcatattcttatcttcttgctgttgtagatgaggttggagtagtgtatgtgttctatgcggatgacatcttaaacttcaaagctaatgtgcacgaaaactttgatctgcctgttatgaatcagtttgctgattgtttttctatctgggaagctgctggtcatgagataggaagtctatcattttgtgctaatcagtccatacaacaagggtcacttagtctaaccaaattggttcctgagttctcagggaaaagcgatgatattgtcaggcctagagaaagaagaaaatatagatgcgatgaaaatgaagtggacagctggccaagtggctttgtcactgcagggcagatgaaagttggggcaggttatcgtcgcacaaattcctcttgtttctttaggaggataattcttcctccatgcagatcacagcaggatgtaattagcctgtgtccacttggactaactagaatttttaaaggttctattgcggatggaaacgagcatgtcaaaatttttcattccgagttgcttatgtattcatcttttcttggcaaaggagatattgatattggttttatggacgaaatgcttccatttaaaaaggattccacttttgtcggagattctgttgtttgctcctgccagggatatttgtatttaattacccagtatggcctttctgtggtccttcctccagtttctatatcatccttttcatctcaatgtgacgctatcaaattctggcaaatgggtcctgctgctggtagcacatgcaatgctctgaacttactatctgttgacaaatcagacacaagctggaaaacctggcaaatagaagtcctggatagagctttgttgtatgaaggtcccgcactagcagacaggctctgttgggagaatggatgggatttgaaattctctaggttacgttggctgcaattagcccttcattactcaatgattggtgatctagagcagtcactgaatttactcgctgaggttaatcttgcggaagaaggtgtattgcaactgctattggcatctattcataggttatctagtaggactggaagtgataatgaagccacagtgtcatccaaaccatttaaggcactctatttttgggtcatggaactttacaggttaatggttttagctgttcgctttgcaacaagaatgataaaatgttacgggttacagaagcaaaccacagacaataattcagtaaagcttcatgaaatggctctccttttgatggcaataagaagtatccagagccgagtctctgcaaagaatcagaattctgtttggatgttatcttcaaatgatcattttcttaatgctgtgcctacactgcagcagggagatgataagagctcattgaaaatagggccatcgggtgggttagatactcatgacaggcaagagttggttcctgtgtgtgttcctgatagcaacagcatgttagctctaacaccagttgggtcatctcttagtgcttcaacttttcatgatattgatactaataaaaggactacccaagttggaagtcaaaattttcaaggaaatatcaaggagatgattaacagatgggaaatgaataactttgacttaaaaattgtagtcagagaagcactgcagtctggtcgcctacctttggcagttcttcagttgcagcttttgcgccagagggaattagtttccaatgattattctgaagatgctttctctgaagttcatgaaattggaaggtccattgtgtatgacctgttgatgaagggtgaaactggattggctgtagcaacactagaaaggctaggaaatgatgtagagtcggacctaagacaacttatgcaaggtactgtcaggaggtcactaaggctacaaattgctgacgagatgaagaagcgtgggtacataacaccagatgactggaagatgctagaaactataacactaattgagcgtctctaccctagcagcagcttctggaacacatacttttacagggagaatgtcattcgtgatgctgcaaaaattgttacactgccaggagacgataaacctgtattggctctaaatattcgcaaccaccccattattgaatgtggtgatgttgacggagcagtgcttggttcttgggtgaacattaatgattgcactaaggagttttctgggagcaacatttctgatggttattgggcctgtgctgctgtgtggtcggatgcttggggtccgagaactgtggaccgtatattgctggaccagccttatcatgtacatgctcatgtcccatgggaatctcagtttgaatattttgttgctcataatgatgtggggaaagtctgcgaactcctggacatgattcccaatagcatactttcagaagggattattagagtaaacgtgaacagtttacaagctcctgccaacactctttctgatttaacagtccctgattacaacatgtacatatgtgactcagaagagcttgaacctttctgtgtggagataccacatgttaaagtatttagatctttgtggaatcatgagtcaacattatatattcgaatggtaatgcagcaggaattggcaaagagacacatctttatgaaagagtattggcaaagtactactgaaattatacctttgcttgctcgtgctggcatacttataaaggttggtctaaaggaagaatgttctacaatattttctgcttcagagattccagatgatgcccatcaccagggccgtgaaggcgcactgcataagctaatcatacgtttctgtgtgcaatataacttgccatatctactggacctctatctggacacctgtaatttgactcctgataaggattgtatccgtttactcaaagaaaacacaggtgattgcaagtgggcacaatggttactcttctccaggatcaaaggttatgagtatgaggcatcattctctaatgcacgttggaatttgtcaaagaaaatggtcaataatagtaatcctacggctgttgagatagatgaaatgttgtatacagtagatgatatggcagaacgaattggtgaaatgtctgcattagctaccttgatgtatgcttcagcaccaattcagaaatccatatgtactggaagtgtgaacagaagtggttcgtcttcccagtgcacattggagaacctggctccttgtctccagcaatttccaacactatggaaaacccttttttcagcttgttttggccaagatgaatatgggtgtttaaactactctgctgcgtatggaaaaagatcaatttcagagtacttgagatggcgctatagcgttttttcctctgctggaggagacacttcgttgttgcaaatgcttccatgttgggtcccaaagtctgttagaagattaattcaactatttgaacagggcccttttggaatgcaacttctatcaactgccccatcatctgaagagttattcactcacggtgtctccaattatatatacaattctactggatataccgaagccaatgcactgtccttagaagcatcgatccaaaaaagtgttgaagaagaattatattcttcccttgaggagaaagatgtgagagtggaacaccatttgcaccgtggtcgagccttagctgctttcaggcatcttattgctaagagggcttcacagttgaaatcagctagtgcacgtcaagtgatatccgcacagtctaatgttcaagcagatgtacaattgatacttgctcctctaagtcaagttgaacgatcaattcttatatcggtggctccactagctattacaaactttgaggactcgactctagttgcttcctgtatattcttgttggaactttgtggcctgtgtgccaacatgcttcgtttagatattgctgcactacgacgcatctcttcctactacaagtcagttcaagaaaataaacatgttgatctatctccaccaaggggcccagagctccatgtgcagtcccatggagctggtatagctcctgctctagctcgagcgctagctgaagattatgtccagtctgatcatctgcatgttttggagcagactcaaacctcgatggctcccaagcgggaacagacacaatatcctcttatttctattctgcaacaccttgaaaaagcaagtttgccatcattggaggaaggtaaaacttgtgggttttggcttttgactggtgttggtgatgcatctctttaccggtcgcaacagaatgaagcaagtcaacactggaatttggttactgaattctgtcaggcacactatctcccactaagtacaaaatatcttgcattactggccaatgacaatgattgggttggttttttaacagaagctcagatagctggattttctattgaagctgttattgaagtggcagccaaagagatcagggattcaagactgagggcccacatactgactgttctaaaaaatatgatatcacttcgaaggaaatcatctggtaatgtaccttcaggaagcagtgatccatctttctcttctgttgatggcaataatcccatggaacttttctgcattcttggagtctgtgaaaagcaaaaaaaccctggggaggcactcctaattaaagcaaaacaaatgcagtggtctttgcttgccatgattgcctcatgctttccggatgtaactcctctcacatgcttaagtgtttggcttgagattacagccgcaagggagatgtcctcgatcaaggtggatgatgtttccttgaaaatagcaaagaatgttggatctgctgttgaagccacaaataaattgccaagcactagcagaaatgttgaatttcgttacaataggaagaatccaaagcgaagacggttcctggaagcgtcacatgaaaagttatgtttctcaatagatagcacatgtgggccagattctgctgcaacttccaatcctatcagtattgttgaccatcagggaataggaaagccaatctcaggagaaaccataatgtccgttgatattgatgaaaggcttgcatctttatcaaacatggtagcagtgctttgcgaacaacaactgtttctaccattacttagagcttttgaaatgtttttgccttcctgctcccttctttccttcattcgttctctccaggcattttctcaaatgcgtcttcccgaggcttctgcacgtttggcatccttttcagcaagaataaaagatgaagcctctcatactcaactaaactcttccaaagaagtgtcagtaatagcagaatgggtggccactacagctgtaaaagctgcagatgctgtcctttcaaactgttcatcaatttatgagaagaggtgtctactgcagcttctttcagcagtggattttgctgatggtggcacttcatcatcttactttagccgaagatattggaagattaatctgtctgaaccatctttgtgtaaagatactgatgtgtacaactggaatgatttgatggatgatgcttctcttttaacatcattagaaaaggacggtcaatgggagcaagctcgaacttgggcaagacatctggagtcaagtggcatagcttgggaatctactcttgatcatgtcactgaatcacaggcagaagccatggttgctgaatggaaggagtttctttgggatatcccacaagaacgtgcagccttgtggggtcactgtcaatctctctttatgagatattctttccctcctttaaaggctggattatttttccttaagcatgccgaagcagtaggaaaagagataccagcacaagagcttcatgaaatattattgctctctttacaatggctaagtggaactatgactaaatcctctccggtctatcctcttcatcttttgcgggaaattgagactagggtgtggctcctggctgttgagtcagagagtcaatccaaggttgatggtgaatttgccacttctgctgttgctcataacaaagctgttggaaacagtagcagtattatagaacatactgctgatatcatcacaaaaatagacagtaacatgagcttgccgcacatgaaaattacagaaaggaatagcacacgggacagtttatcataccaacatgtgcaactctttgagtctaacagtgaagcatcttcaacaacaataaataacacgcgagcaaagcgaaggatgaaaacaaattcaccacttaaacgaggtgtcaatgacaatattgaaagtagagctaatgagctggataacaattctaacactttacatagttcaaagattggtgaacaagctagaaatttgctctctgaagaggaatttgtaaagatggaagcatctttatctggttgggaacaaaatgttaggcctgtagatatggagaaggctgtgctctctttactggaatttgggcaaataactgctgctaagcaactccaacaaaagctgtctccatcatatattcctgaagaacttgtccttgttgatgttgctttaagaattgccaaaaacagcagtaatggagagatcaatttgtcatgctttgacacacaggctcttcggatacttcagtcactgagagtagcaaatagctgcgatatgattagcccatcacaggttatggagatactagctgcgaaatgtggtgagggtcgtgggcgagctcttattaggagaataataggagttgttcgaactgctagattattgggactcccattttccgaagcatttgagaaacaaccaattgaacttctacagttgctttccctgaaagctcaggattcttttgatgaagcgaaatttctagtggagacacacatcatgcctgcatctagcattgcaagaattctagctgattcgttcctaaaggggcttttggccgcacatcgtggaggctatttggattcccaaaaggaagagggtcctgcacctctattgtggagatcaagtgacttcttaaagtgggcaaaactatgtccatcagaatcagaaattggccatgctttgatgcgtttggtaatgactggacatgaagtaccacatgcttgtgaggttgaactcctaatattgtcgcaccacttctacatgtcatcttcttgtcttgatggagtggatgttctcgtcacatttgcagcaaatagagtggactcatatgttttagaggaggatttttcttgtttagctcgtttgatcactggaccacagggacgcttgcatcggttcgaggatttaggatggctgttattacatcactgaaacagtttatcccgaatgatgacgacgctctctctatggtatacaagcactttgacatgaagcatgaagctgcttctctccttgaatcacgtgcagagcaatacatgaacagctggttatcacgatatgataaggaacggcgaaatgatgagcttctggacgctatgcatcatcttgtagagacagctgaggttctttcaactattgatgctggccaaagaacacatcgtgcttgtgcccgtgcttctcttctgtcacttcagatccgaataccagatcttttgtggattggtctttctgagaccaatgcccggcggatttttgtggaacaatctaggttccaggaagctcttattgttgctgaagcatacaacataaatcaacctatagaatgggccccagtcttttggaatcaaatgctaaaaccggatctaatcgagcaattcgtggctgagtttgtctcagtgctgcccctgcagccaccaatgcttctcgagcttgcaaggttttacagggcggaggttgcagccaggggggagcagtcacacttctctgtctggctttcacctggaggcttgcctgcagagtgggtgaaacatcttggtagatccttcaggagcctgctgcgtagaacaagggacatgaggctgaggctgcagttggcaactctggcgacaggcttcattgacgtccttgttatttgcaatagagttttggacaaagtcccggacaatgctggcccgctgatcctaaggaagggacatggtggagcataccttcctctcatgtagatatttcccttctctttttggtgcattggattcagaacttaattcttggcagttaggctatatattgaaaggcagatgaatcttgcaaatattatatgtatcagctttctttggttcagcatctttaaagtcaagcttggctgcagtcttggacatggattctcatcgatgatgccatgaaagacttttgtgattgtatgtgcagcattttgagcggaaaagctggcagaaatgggatttttgcagcttcatccggcaggtgttttcgcacccatgatatattgtatgttttgcatgtacgaagatccgccccgtatttgttttcctcttttttttttggttttgcaagtgtcatgtaggtcgatttgctgtctgtgatttggactgcaagtctgcaaccagacggcagatgcgtcgagacgtcgagtgtccagtccagcgaaagcgtaaatacaaagcacatggacgttaaccagacggcagatagcctttgtttgttgttctactggtaatgttcttattttctaaccatggttttacaacccaggggatcttgtcctggcaactgctgagatcaactcatcacaagttgaatctcagagctctatcggatacctgtactcaggcagtcttcaaaacgttttctactattccccgagtgaagtctttagcatggggatactgttctgatgcttttgatgactcaagttttaatgaaattctagtggtatcaagtgatgcttctatcacagtccatgcattctgccattctcgcaaaagcacactaacagttaattcaatgtctgatgctaaagagttgcatggggagtggaaagagtggcgccctactgaatgttcagtgttggaggatgcaaatgttctctgaagactatggcggaaactgacagtgaatcaccacgacgttttcttagagcatcgtgcagttgtcagtgggagtgtctaaaagttttgtctagctcgtcatgttatttgatcggcttagttctgactcctaatgaatcagtacgttgtgaggcccatccatccaatgcggagtgtattttggttactgttctggagctaaaccactggggcatacagtggaactttgtggcagaccttcaggatgtatctgatggtattacgccaagtccaaaatgggttgattttcagttatcagatgtgtttcttgcctgccttaatacagcaggttttgttgccatttggaacgtgaaaactggtggtcttgtgacgtcattcagtgttcttcaacaatgcagaactgatctggagatgcctctgaggagctctatgtccattgtgacaaatttggacgagggaaatatccatgttgagaactttgttggcagaatgtttaagcggttagttttggcatcatattcttatcttcttgctgttgtagatgaggttggagtagtgtatgtgttctatgcggatgacatcttaaacttcaaagctaatgtgcacgaaaactttgatctgcctgttatgaatcagtttgctgattgtttttctatctgggaagctgctggtcatgagataggaagtctatcattttgtgctaatcagtccatacaacaagggtcacttagggggtgtttggtttcta

SEQ ID NO: 11617 - DNA, 11224 bp, Zea Mays
ctggcatgaggccccatgccgaagccaccagcgaaatgaacggaagaagagagcggagggaacaactgccgcacggcacggagacagacgcggacagaccgagcgattggtcggcgaccacctcacctccgccgccatccactcctcggctcgggctccacgttatgcagatggacattgctacaaccccatctcaaactatcaaaatttcgagaggcttttatatctccaacaaggcgtctttttggactgctctcagaccatggggatcttgtcctggcaactgctgagatcaactcatcacaagttgaatctcatagagctctatcggatacctgtactcaggcagtcttcaaaacgttttctactattccccgagtgaagtctttagcatggggatactgttctgatgcttttgatgactcaagttttaatgaaattctagtggtatcaagtgatgcttctatcacagtccatgcattctgccattctcgcaaaagcacactaacagttaattcaatgtctgatgctaaagagttgcatggggagtggaaagagtggcgccctactgaatgttcagtgttggaggatggtgagtcaggtccagaaaattggttttgttctttcctaactacagtcactgcgtctgtttctaatggaaaataccaagccagattgcccatgaaatctttattgcctaattcagcagaagttgtatcctttagcatatatgacattactctctctttcttgaaatattggtatagcaaatgttctctgaagactatggcggaaactgacagtgaatcaccacgacgttttcttagagcatcgtgcagttgtcagtgggagtgtctaaaagttttgtctagctcgtcatgttatttgatcggcttagttctgactcctaatgaatcagtacgttgtgaggcccatccatccaatgcggagtgtattttggttactgttctggagctaaaccactggggcatacagtggaactttgtggcagaccttcaggatgtatctgatggtattacgccaagtccaaaatgggttgattttcagttatcagatgtgtttcttgcctgccttaatacagcaggttttgttgccatttggaacgtgaaaactggtggtcttgtgacgtcattcagtgttcttcaacaatgcagaactgatctggagatgcctctgaggagctctatgtccattgtgacaaatttggacgagggaaatatccatgttgagaactttgttggcagaatgtttaagcggttagttttggcatcatattcttatcttcttgctgttgtagatgaggttggagtagtgtatgtgttctatgcggatgacatcttaaacttcaaagctaatgtgcacgaaaactttgatctgcctgttatgaatcagtttgctgattgtttttctatctgggaagctgctggtcatgagataggaagtctatcattttgtgctaatcagtccatacaacaagggtcacttagtctaaccaaattggttcctgagttctcagggaaaagcgatgatattgtcaggcctagagaaagaagaaaatatagatgcgatgaaaatgaagtggacagctggccaagtggctttgtcactgcagggcagatgaaagttggggcaggttatcgtcgcacaaattcctcttgtttctttaggaggataattcttcctccatgcagatcacagcaggatgtaattagcctgtgtccacttggactaactagaatttttaaaggttctattgcggatggaaacgagcatgtcaaaatttttcattccgagttgcttatgtattcatcttttcttggcaaaggagatattgatattggttttatggacgaaatgcttccatttaaaaaggattccacttttgtcggagattctgttgtttgctcctgccagggatatttgtatttaattacccagtatggcctttctgtggtccttcctccagtttctatatcatccttttcatctcaatgtgacgctatcaaattctggcaaatgggtcctgctgctggtagcacatgcaatgctctgaacttactatctgttgacaaatcagacacaagctggaaaacctggcaaatagaagtcctggatagagctttgttgtatgaaggtcccgcactagcagacaggctctgttgggagaatggatgggatttgaaattctctaggttacgttggctgcaattagcccttcattactcaatgattggtgatctagagcagtcactgaatttactcgctgaggttaatcttgcggaagaaggtgtattgcaactgctattggcatctattcataggttatctagtaggactggaagtgataatgaagccacagtgtcatccaagttaatggttttagctgttcgctttgcaacaagaatgataaaatgttacgggttacagaagcaaaccacagacaataattcagtaaagcttcatgaaatggctctccttttgatggcaataagaagtatccagagccgagtctctgcaaagaatcagaattctgtttggatgggagatgataagagctcattgaaaataggtacagaagtatttcagcatgattcttcagttccagttgttgtactggatggtgtttcatcagggccatcgggtgggttagatactcatgacaggcaagagttggttcctgtgtgtgttcctgatagcaacagcatgttagctctaacaccagttgggtcatctcttagtgcttcaacttttcatgatattgatactaataaaaggactacccaagttggaagtcaaaattttcaaggaaatatcaaggagatgattaacagatgggaaatgaataactttgacttaaaaattgtagtcagagaagcactgcagtctggtcgcctacctttggcagttcttcagttgcagcttttgcgccagagggaattagtttccaatgattattctgaagatgctttctctgaagttcatgaaattggaaggtccattgtgtatgacctgttgatgaagggtgaaactggattggctgtagcaacactagaaaggctaggaaatgatgtagagtcggacctaagacaacttatgcaaggtactgtcaggaggtcactaaggctacaaattgctgacgagatgaagaagcgtgggtacataacaccagatgactggaagatgctagaaactataacactaattgagcgtctctaccctagcagcagcttctggaacacatacttttacagggagaatgtcattcgtgatgctgcaaaaattgttacactgccaggagacgataaacctgtattggctctaaatattcgcaaccaccccattattgaatgtggtgatgttgacggagcagtgcttggttcttgggtgaacattaatgattgcactaaggagttttctgggagcaacatttctgatggttattgggcctgtgctgctgtgtggtcggatgcttggggtccgagaactgtggaccgtatattgctggaccagccttatcatgtacatgctcatgtcccatgggaatctcagtttgaatattttgttgctcataatgatgtggggaaagtctgcgaactcctggacatgattcccaatagcatactttcagaagggattattagagtaaacgtgaacagtttacaagctcctgccaacactctttctgatttaacagtccctgattacaacatgtacatatgtgactcagaagagcttgaacctttctgtgtggagataccacatgttaaagtatttagatctttgtggaatcatgagtcaacattatatattcgaatggtaatgcagcaggaattggcaaagagacacatctttatgaaagagtattggcaaagtactactgaaattatacctttgcttgctcgtgctggcatacttataaaggttggtctaaaggaagaatgttctacaatattttctgcttcagagattccagatgatgcccatcaccagggccgtgaaggcgcactgcataagctaatcatacgtttctgtgtgcaatataacttgccatatctactggacctctatctggacacctgtaatttgactcctgataaggattgtatccgtttactcaaagaaaacacaggtgattgcaagtgggcacaatggttactcttctccaggatcaaaggttatgagtatgaggcatcattctctaatgcacgttggaatttgtcaaagaaaatggtcaataatagtaatcctacggctgttgagatagatgaaatgttgtatacagtagatgatatggcagaacgaattggtgaaatgtctgcattagctaccttgatgtatgcttcagcaccaattcagaaatccatatgtactggaagtgtgaacagaagtggttcgtcttcccagtgcacattggagaacctggctccttgtctccagcaatttccaacactatggaaaacccttttttcagcttgttttggccaagatgaatatgggtgtttaaactactctgctggtaatgcgtatggaaaaagatcaatttcagagtacttgagatggcgctatagcgttttttcctctgctggaggagacacttcgttgttgcaaatgcttccatgttgggtcccaaagtctgttagaagattaattcaactatttgaacagggcccttttggaatgcaacttctatcaactgccccatcatctgaagagttattcactcacggtgtctccaattatatatacaattctactggatataccgaagccaatgcactgtccttagaagcatcgatccaaaaaagtgttgaagaagaattatattcttcccttgaggagaaagatgtgagagtggaacaccatttgcaccgtggtcgagccttagctgctttcaggcatcttattgctaagagggcttcacagttgaaatcagctagtgcacgtcaagtgatatccgcacagtctaatgttcaagcagatgtacaattgatacttgctcctctaagtcaagttgaacgatcaattcttatatcggtggctccactagctattacaaactttgaggactcgactctagttgcttcctgtatattcttgttggaactttgtggcctgtgtgccaacatgcttcgtttagatattgctgcactacgacgcatctcttcctactacaagtcagttcaagaaaataaacatgttgatctatctccaccaaggggcccagagctccatgtgcagtcccatggagctggtatagctcctgctctagctcgagcgctagctgaagattatgtccagtctgatcatctgcatgttttggagcagactcaaacctcgatggctcccaagcgggaacagacacaatatcctcttatttctattctgcaacaccttgaaaaagcaagtttgccatcattggaggaaggtaaaacttgtgggttttggcttttgactggtgttggtgatgcatctctttaccggtcgcaacagaatgaagcaagtcaacactggaatttggttactgaattctgtcaggcacactatctcccactaagtacaaaatatcttgcattactggccaatgacaatgattgggttggttttttaacagaagctcagatagctggattttctattgaagctgttattgaagtggcagccaaagagatcagggattcaagactgagggcccacatactgactgttctaaaaaatatgatatcacttcgaaggaaatcatctggtaatgtaccttcaggaagcagtgatccatctttctcttctgttgatggcaataatcccatggaacttttctgcattcttggagtctgtgaaaagcaaaaaaaccctggggaggcactcctaattaaagcaaaacaaatgcagtggtctttgcttgccatgattgcctcatgctttccggatgtaactcctctcacatgcttaagtgtttggcttgagattacagccgcaagggagatgtcctcgatcaaggtggatgatgtttccttgaaaatagcaaagaatgttggatctgctgttgaagccacaaataaattgccaagcactagcagaaatgttgaatttcgttacaataggaagaatccaaagcgaagacggttcctggaagcgtcacatgaaaagttatgtttctcaatagatagcacatgtgggccagattctgctgcaacttccaatcctatcagtattgttgaccatcagggaataggaaagccaatctcaggagaaaccataatgtccgttgatattgatgaaaggcttgcatctttatcaaacatggtagcagtgctttgcgaacaacaactgtttctaccattacttagagcttttgaaatgtttttgccttcctgctcccttctttccttcattcgttctctccaggcattttctcaaatgcgtcttcccgaggcttctgcacgtttggcatccttttcagcaagaataaaagatgaagcctctcatactcaactaaactcttccaaagaagtgtcagtaatagcagaatgggtggccactacagctgtaaaagctgcagatgctgtcctttcaaactgttcatcaatttatgagaagaggtgtctactgcagcttctttcagcagtggattttgctgatggtggcacttcatcatcttactttagccgaagatattggaagattaatctgtctgaaccatctttgtgtaaagatactgatgtgtacaactggaatgatttgatggatgatgcttctcttttaacatcattagaaaaggacggtcaatgggagcaagctcgaacttgggcaagacatctggagtcaagtggcatagcttgggaatctactcttgatcatgtcactgaatcacaggcagaagccatggttgctgaatggaaggagtttctttgggatatcccacaagaacgtgcagccttgtggggtcactgtcaatctctctttatgagatattctttccctcctttaaaggctggattatttttccttaagcatgccgaagcagtaggaaaagagataccagcacaagagcttcatgaaatattattgctctctttacaatggctaagtggaactatgactaaatcctctccggtctatcctcttcatcttttgcgggaaattgagactagggtgtggctcctggctgttgagtcagagagtcaatccaaggttgatggtgaatttgccacttctgctgttgctcataacaaagctgttggaaacagtagcagtattatagaacatactgctgatatcatcacaaaaatagacagtaacatgagcttgccgcacatgaaaattacagaaaggaatagcacacgggacagtttatcataccaacatgtgcaactctttgagtctaacagtgaagcatcttcaacaacaataaataacacgcgagcaaagcgaaggatgaaaacaaattcaccacttaaacgaggtgtcaatgacaatattgaaagtagagctaatgagctggataacaattctaacactttacatagttcaaagattggtgaacaagctagaaatttgctctctgaagaggaatttgtaaagatggaagcatctttatctggttgggaacaaaatgttaggcctgtagatatggagaaggctgtgctctctttactggaatttgggcaaataactgctgctaagcaactccaacaaaagctgtctccatcatatattcctgaagaacttgtccttgttgatgttgctttaagaattgccaaaaacagcagtaatggagagatcaatttgtcatgctttgacacacaggctcttcggatacttcagtcactgagagtagcaaatagctgcgatatgattagcccatcacaggttatggagatactagctgcgaaatgtggtgagggtcgtgggcgagctcttattaggagaataataggagttgttcgaactgctagattattgggactcccattttccgaagcatttgagaaacaaccaattgaacttctacagttgctttccctgaaagctcaggattcttttgatgaagcgaaatttctagtggagacacacatcatgcctgcatctagcattgcaagaattctagctgattcgttcctaaaggggcttttggccgcacatcgtggaggctatttggattcccaaaaggaagagggtcctgcacctctattgtggagatcaagtgacttcttaaagtgggcaaaactatgtccatcagaatcagaaattggccatgctttgatgcgtttggtaatgactggacatgaagtaccacatgcttgtgaggttgaactcctaatattgtcgcaccacttctacatgtcatcttcttgtcttgatggagtggatgttctcgtcacatttgcagcaaatagagtggactcatatgttttagaggaggatttttcttgtttagctcgtttgatcactggagtgagcaatttccattccttgagcttcattctttcaatccttgtagagaatggccaattggagttgctgcttcaaaagtattctgccactgacacagccacagggacgcttgcatcggttcgaggatttaggatggctgttattacatcactgaaacagtttatcccgaatgatgacgacgctctctctatggtatacaagcactttgacatgaagcatgaagctgcttctctccttgaatcacgtgcagagcaatacatgaacagctggttatcacgatatgataaggaacggcgaaatgatgagcttctggacgctatgcatcatcttgtagagacagctgaggttctttcaactattgatgctggccaaagaacacatcgtgcttgtgcccgtgcttctcttctgtcacttcagatccgaataccagatcttttgtggattggtctttctgagaccaatgcccggcggatttttgtggaacaatctaggttccaggaagctcttattgttgctgaagcatacaacataaatcaacctatagaatgggccccagtcttttggaatcaaatgctaaaaccggatctaatcgagcaattcgtggctgagtttgtctcagtgctgcccctgcagccaccaatgcttctcgagcttgcaaggttttacagggcggaggttgcagccaggggggagcagtcacacttctctgtctggctttcacctggaggcttgcctgcagagtgggtgaaacatcttggtagatccttcaggagcctgctgcgtagaacaagggacatgaggctgaggctgcagttggcaactctggcgacaggcttcattgacgtccttgttatttgcaatagagttttggacaaagtcccggacaatgctggcccgctgatcctaaggaagggacatggtggagcataccttcctctcatgtagatatttcccttctctttttggtgcattggattcagaacttaattcttggcagttaggctatatattgaaaggcagatgaatcttgcaaatattatatgtatcagctttctttggttcagcatctttaaagtcaagcttggctgcagtcttggacatggattctcatcgatgatgccatgaaagacttttgtgattgtatgtgcagcattttgagcggaaaagctggcagaaatgggatttttgcagcttcatccggcaggtgttttcgcacccatgatatattgtatgttttgcatgtacgaagatccgccccgtatttgttttcctcttttttttttggttttgcaagtgtcatgtaggtcgatttgctgtctgtgatttggactgcaagtctgcaaccagacggcagatgcgtcgagacgtcgagtgtccagtccagcgaaagcgtaaatacaaagcacatggacgttaaccagacggcagatagcctttgtttgttgttctactggtaatgttcttattttctaaccatggttttacaacccaggggatcttgtcctggcaactgctgagatcaactcatcacaagttgaatctcagagctctatcggatacctgtactcaggcagtcttcaaaacgttttctactattccccgagtgaagtctttagcatggggatactgttctgatgcttttgatgactcaagttttaatgaaattctagtggtatcaagtgatgcttctatcacagtccatgcattctgccattctcgcaaaagcacactaacagttaattcaatgtctgatgctaaagagttgcatggggagtggaaagagtggcgccctactgaatgttcagtgttggaggatggtgagtcaggtccagataattggttttgttcttttcctaactacagtcactgcgtctgtttctaatggaaaaataccaagccagattgcccatgaaatctttattgcctaattcagcagaagttgtatcctttagcatatatgacattactctctctttcttgaaatattggtatagcaaatgttctctgaagactatggcggaaactgacagtgaatcaccacgacgttttcttagagcatcgtgcagttgtcagtgggagtgtctaaaagttttgtctagctcgtcatgttatttgatcggcttagttctgactcctaatgaatcagtacgttgtgaggcccatccatccaatgcggagtgtattttggttactgttctggagctaaaccactggggcatacagtggaactttgtggcagaccttcaggatgtatctgatggtattacgccaagtccaaaatgggttgattttcagttatcagatgtgtttcttgcctgccttaatacagcaggttttgttgccatttggaacgtgaaaactggtggtcttgtgacgtcattcagtgttcttcaacaatgcagaactgatctggagatgcctctgaggagctctatgtccattgtgacaaatttggacgagggaaatatccatgttgagaactttgttggcagaatgtttaagcggttagttttggcatcatattcttatcttcttgctgttgtagatgaggttggagtagtgtatgtgttctatgcggatgacatcttaaacttcaaagctaatgtgcacgaaaactttgatctgcctgttatgaatcagtttgctgattgtttttctatctgggaagctgctggtcatgagataggaagtctatcattttgtgctaatcagtccatacaacaagggtcacttagggggtgtttggtttcta

SEQ ID NO: 11618 - DNA, 7815 bp, Zea Mays
cggagggaacaactgccgcacggcacggagacagacgcggacagaccgagcgattggtcggcgaccacctcacctccgccgccatccactcctcggctcgggctccacgcaatgttactcgttaccatcattagctgttgatgggcatatgaacgatgtccacatctcgtcagatagatgatgggcctgctgtactacagttatgcagatggacattgctacaaccccatctcaaactatcaaaatttcgagaggcttttatatctccaacaaggcgtctttttggactgctctcagaccatggggatcttgtcctggcaactgctgagatcaactcatcacaagttgaatctcatagagctctatcggatacctgtactcaggcagtcttcaaaacgttttctactattccccgagtgaagtctttagcatggggatactgttctgatgcttttgatgactcaagttttaatgaaattctagtggtatcaagtgatgcttctatcacagtccatgcattctgccattctcgcaaaagcacactaacagttaattcaatgtctgatgctaaagagttgcatggggagtggaaagagtggcgccctactgaatgttcagtgttggaggatggtgagtcaggtccagaaaattggttttgttctttcctaactacagtcactgcgtctgtttctaatggaaaataccaagccagattgcccatgaaatctttattgcctaattcagcagaagttgtatcctttagcatatatgacattactctctctttcttgaaatattggtatagcaaatgttctctgaagactatggcggaaactgacagtgaatcaccacgacgttttcttagagcatcgtgcagttgtcagtgggagtgtctaaaagttttgtctagctcgtcatgttatttgatcggcttagttctgactcctaatgaatcagtacgttgtgaggcccatccatccaatgcggagtgtattttggttactgttctggagctaaaccactggggcatacagtggaactttgtggcagaccttcaggatgtatctgatggtattacgccaagtccaaaatgggttgattttcagttatcagatgtgtttcttgcctgccttaatacagcaggttttgttgccatttggaacgtgaaaactggtggtcttgtgacgtcattcagtgttcttcaacaatgcagaactgatctggagatgcctctgaggagctctatgtccattgtgacaaatttggacgagggaaatatccatgttgagaactttgttggcagaatgtttaagcggttagttttggcatcatattcttatcttcttgctgttgtagatgaggttggagtagtgtatgtgttctatgcggatgacatcttaaacttcaaagctaatgtgcacgaaaactttgatctgcctgttatgaatcagtttgctgattgtttttctatctgggaagctgctggtcatgagataggaagtctatcattttgtgctaatcagtccatacaacaagggtcacttagtctaaccaaattggttcctgagttctcagggaaaagcgatgatattgtcaggcctagagaaagaagaaaatatagatgcgatgaaaatgaagtggacagctggccaagtggctttgtcactgcagggcagatgaaagttggggcaggttatcgtcgcacaaattcctcttgtttctttaggaggataattcttcctccatgcagatcacagcaggatgtaattagcctgtgtccacttggactaactagaatttttaaaggttctattgcggatggaaacgagcatgtcaaaatttttcattccgagttgcttatgtattcatcttttcttggcaaaggagatattgatattggttttatggacgaaatgcttccatttaaaaaggattccacttttgtcggagattctgttgtttgctcctgccagggatatttgtatttaattacccagtatggcctttctgtggtccttcctccagtttctatatcatccttttcatctcaatgtgacgctatcaaattctggcaaatgggtcctgctgctggtagcacatgcaatgctctgaacttactatctgttgacaaatcagacacaagctggaaaacctggcaaatagaagtcctggatagagctttgttgtatgaaggtcccgcactagcagacaggctctgttgggagaatggatgggatttgaaattctctaggttacgttggctgcaattagcccttcattactcaatgattggtgatctagagcagtcactgaatttactcgctgaggttaatcttgcggaagaaggtgtattgcaactgctattggcatctattcataggttatctagtaggactggaagtgataatgaagccacagtgtcatccaagttaatggttttagctgttcgctttgcaacaagaatgataaaatgttacgggttacagaagcaaaccacagacaataattcagtaaagcttcatgaaatggctctccttttgatggcaataagaagtatccagagccgagtctctgcaaagaatcagaattctgtttggatgggagatgataagagctcattgaaaataggtacagaagtatttcagcatgattcttcagttccagttgttgtactggatggtgtttcatcagggccatcgggtgggttagatactcatgacaggcaagagttggttcctgtgtgtgttcctgatagcaacagcatgttagctctaacaccagttgggtcatctcttagtgcttcaacttttcatgatattgatactaataaaaggactacccaagttggaagtcaaaattttcaaggaaatatcaaggagatgattaacagatgggaaatgaataactttgacttaaaaattgtagtcagagaagcactgcagtctggtcgcctacctttggcagttcttcagttgcagcttttgcgccagagggaattagtttccaatgattattctgaagatgctttctctgaagttcatgaaattggaaggtccattgtgtatgacctgttgatgaagggtgaaactggattggctgtagcaacactagaaaggctaggaaatgatgtagagtcggacctaagacaacttatgcaaggtactgtcaggaggtcactaaggctacaaattgctgacgagatgaagaagcgtgggtacataacaccagatgactggaagatgctagaaactataacactaattgagcgtctctaccctagcagcagcttctggaacacatacttttacagggagaatgtcattcgtgatgctgcaaaaattgttacactgccaggagacgataaacctgtattggctctaaatattcgcaaccaccccattattgaatgtggtgatgttgacggagcagtgcttggttcttgggtgaacattaatgattgcactaaggagttttctgggagcaacatttctgatggttattgggcctgtgctgctgtgtggtcggatgcttggggtccgagaactgtggaccgtatattgctggaccagccttatcatgtacatgctcatgtcccatgggaatctcagtttgaatattttgttgctcataatgatgtggggaaagtctgcgaactcctggacatgattcccaatagcatactttcagaagggattattagagtaaacgtgaacagtttacaagctcctgccaacactctttctgatttaacagtccctgattacaacatgtacatatgtgactcagaagagcttgaacctttctgtgtggagataccacatgttaaagtatttagatctttgtggaatcatgagtcaacattatatattcgaatggtaatgcagcaggaattggcaaagagacacatctttatgaaagagtattggcaaagtactactgaaattatacctttgcttgctcgtgctggcatacttataaaggttggtctaaaggaagaatgttctacaatattttctgcttcagagattccagatgatgcccatcaccagggccgtgaaggcgcactgcataagctaatcatacgtttctgtgtgcaatataacttgccatatctactggacctctatctggacacctgtaatttgactcctgataaggattgtatccgtttactcaaagaaaacacaggtgattgcaagtgggcacaatggttactcttctccaggatcaaaggttatgagtatgaggcatcattctctaatgcacgttggaatttgtcaaagaaaatggtcaataatagtaatcctacggctgttgagatagatgaaatgttgtatacagtagatgatatggcagaacgaattggtgaaatgtctgcattagctaccttgatgtatgcttcagcaccaattcagaaatccatatgtactggaagtgtgaacagaagtggttcgtcttcccagtgcacattggagaacctggctccttgtctccagcaatttccaacactatggaaaacccttttttcagcttgttttggccaagatgaatatgggtgtttaaactactctgctgcgtatggaaaaagatcaatttcagagtacttgagatggcgctatagcgttttttcctctgctggaggagacacttcgttgttgcaaatgcttccatgttgggtcccaaagtctgttagaagattaattcaactatttgaacagggcccttttggaatgcaacttctatcaactgccccatcatctgaagagttattcactcacggtgtctccaattatatatacaattctactggatataccgaagccaatgcactgtccttagaagcatcgatccaaaaaagtgttgaagaagaattatattcttcccttgaggagaaagatgtgagagtggaacaccatttgcaccgtggtcgagccttagctgctttcaggcatcttattgctaagagggcttcacagttgaaatcagctagtgcacgtcaagtgatatccgcacagtctaatgttcaagcagatgtacaattgatacttgctcctctaagtcaagttgaacgatcaattcttatatcggtggctccactagctattacaaactttgaggactcgactctagttgcttcctgtatattcttgttggaactttgtggcctgtgtgccaacatgcttcgtttagatattgctgcactacgacgcatctcttcctactacaagtcagttcaagaaaataaacatgttgatctatctccaccaaggggcccagagctccatgtgcagtcccatggagctggtatagctcctgctctagctcgagcgctagctgaagattatgtccagtctgatcatctgcatgttttggagcagactcaaacctcgatggctcccaagcgggaacagacacaatatcctcttatttctattctgcaacaccttgaaaaagcaagtttgccatcattggaggaaggtaaaacttgtgggttttggcttttgactggtgttggtgatgcatctctttaccggtcgcaacagaatgaagcaagtcaacactggaatttggttactgaattctgtcaggcacactatctcccactaagtacaaaatatcttgcattactggccaatgacaatgattgggttggttttttaacagaagctcagatagctggattttctattgaagctgttattgaagtggcagccaaagagatcagggattcaagactgagggcccacatactgactgttctaaaaaatatgatatcacttcgaaggaaatcatctggtaatgtaccttcaggaagcagtgatccatctttctcttctgttgatggcaataatcccatggaacttttctgcattcttggagtctgtgaaaagcaaaaaaaccctggggaggcactcctaattaaagcaaaacaaatgcagtggtctttgcttgccatgattgcctcatgctttccggatgtaactcctctcacatgcttaagtgtttggcttgagattacagccgcaagggagatgtcctcgatcaaggtggatgatgtttccttgaaaatagcaaagaatgttggatctgctgttgaagccacaaataaattgccaagcactagcagaaatgttgaatttcgttacaataggaagaatccaaagcgaagacggttcctggaagcgtcacatgaaaagttatgtttctcaatagatagcacatgtgggccagattctgctgcaacttccaatcctatcagtattgttgaccatcagggaataggaaagccaatctcaggagaaaccataatgtccgttgatattgatgaaaggcttgcatctttatcaaacatggtagcagtgctttgcgaacaacaactgtttctaccattacttagagcttttgaaatgtttttgccttcctgctcccttctttccttcattcgttctctccaggcattttctcaaatgcgtcttcccgaggcttctgcacgtttggcatccttttcagcaagaataaaagatgaagcctctcatactcaactaaactcttccaaagaagtgtcagtaatagcagaatgggtggccactacagctgtaaaagctgcagatgctgtcctttcaaactgttcatcaatttatgagaagagaaaaggacggtcaatgggagcaagctcgaacttgggcaagacatctggagtcaagtggcatagcttgggaatctactcttgatcatgtcactgaatcacagaagccatggttgctgaatggaaggagtttctttgggatatcccacaagaacgtgcagccttgtggggtcactgtcaatctctctttatgagatattctttccctcctttaaaggctggattatttttccttaagcatgccgaagcagtaggaaaagagataccagcacaagagcttcatgaaatattattgctctctttacaatggctaagtggaactatgactaaatcctctccggtctatcctcttcatcttttgcgggaaattgagactagggtgtggctcctggctgttgagtcagagagtcaatccaaggttgatggtgaatttgccacttctgctgttgctcataacaaagctgttggaaacagtagcagtattatagaacatactgctgatatcatcacaaaaatagacagtaacatgagcttgccgcacatgaaaattacagaaaggaatagcacacgggacagtttatcataccaacatgtgcaactctttgagtctaacagtgaagcatcttcaacaacaataaataacacgcgagcaaagcgaaggatgaaaacaaattcaccacttaaacgaggtgtcaatgacaatattgaaagtagagctaatgagctggataacaattctaacactttacatagttcaaagattggtgaacaagctagaaatttgctctctgaagaggaatttgtaaagatggaagcatctttatctggttgggaacaaaatgttaggcctgtagatatggagaaggctgtgctctctttactggaatttgggcaaataactgctgctaagcaactccaacaaaagctgtctccatcatatattcctgaagaacttgtccttgttgatgttgctttaagaattgccaaaaacagcagtaatggagagatcaatttgtcatgctttgacacacaggctcttcggatacttcagtcactgagagtagcaaatagctgcgatatgattagcccatcacaggtttttacagtacacttgggtatgtgatattgcagtgctactgctgttccatgatatgctttcaatccttgat

SEQ ID NO: 11619 - DNA, 7966 bp, Zea Mays
cggagggaacaactgccgcacggcacggagacagacgcggacagaccgagcgattggtcggcgaccacctcacctccgccgccatccactcctcggctcgggctccacgcaatgttactcgttaccatcattagctgttgatgggcatatgaacgatgtccacatctcgtcagatagatgatgggcctgctgtactacagttatgcagatggacattgctacaaccccatctcaaactatcaaaatttcgagaggcttttatatctccaacaaggcgtctttttggactgctctcagaccatggggatcttgtcctggcaactgctgagatcaactcatcacaagttgaatctcatagagctctatcggatacctgtactcaggcagtcttcaaaacgttttctactattccccgagtgaagtctttagcatggggatactgttctgatgcttttgatgactcaagttttaatgaaattctagtggtatcaagtgatgcttctatcacagtccatgcattctgccattctcgcaaaagcacactaacagttaattcaatgtctgatgctaaagagttgcatggggagtggaaagagtggcgccctactgaatgttcagtgttggaggatggtgagtcaggtccagaaaattggttttgttctttcctaactacagtcactgcgtctgtttctaatggaaaataccaagccagattgcccatgaaatctttattgcctaattcagcagaagttgtatcctttagcatatatgacattactctctctttcttgaaatattggtatagcaaatgttctctgaagactatggcggaaactgacagtgaatcaccacgacgttttcttagagcatcgtgcagttgtcagtgggagtgtctaaaagttttgtctagctcgtcatgttatttgatcggcttagttctgactcctaatgaatcagtacgttgtgaggcccatccatccaatgcggagtgtattttggttactgttctggagctaaaccactggggcatacagtggaactttgtggcagaccttcaggatgtatctgatggtattacgccaagtccaaaatgggttgattttcagttatcagatgtgtttcttgcctgccttaatacagcaggttttgttgccatttggaacgtgaaaactggtggtcttgtgacgtcattcagtgttcttcaacaatgcagaactgatctggagatgcctctgaggagctctatgtccattgtgacaaatttggacgagggaaatatccatgttgagaactttgttggcagaatgtttaagcggttagttttggcatcatattcttatcttcttgctgttgtagatgaggttggagtagtgtatgtgttctatgcggatgacatcttaaacttcaaagctaatgtgcacgaaaactttgatctgcctgttatgaatcagtttgctgattgtttttctatctgggaagctgctggtcatgagataggaagtctatcattttgtgctaatcagtccatacaacaagggtcacttagtctaaccaaattggttcctgagttctcagggaaaagcgatgatattgtcaggcctagagaaagaagaaaatatagatgcgatgaaaatgaagtggacagctggccaagtggctttgtcactgcagggcagatgaaagttggggcaggttatcgtcgcacaaattcctcttgtttctttaggaggataattcttcctccatgcagatcacagcaggatgtaattagcctgtgtccacttggactaactagaatttttaaaggttctattgcggatggaaacgagcatgtcaaaatttttcattccgagttgcttatgtattcatcttttcttggcaaaggagatattgatattggttttatggacgaaatgcttccatttaaaaaggattccacttttgtcggagattctgttgtttgctcctgccagggatatttgtatttaattacccagtatggcctttctgtggtccttcctccagtttctatatcatccttttcatctcaatgtgacgctatcaaattctggcaaatgggtcctgctgctggtagcacatgcaatgctctgaacttactatctgttgacaaatcagacacaagctggaaaacctggcaaatagaagtcctggatagagctttgttgtatgaaggtcccgcactagcagacaggctctgttgggagaatggatgggatttgaaattctctaggttacgttggctgcaattagcccttcattactcaatgattggtgatctagagcagtcactgaatttactcgctgaggttaatcttgcggaagaaggtgtattgcaactgctattggcatctattcataggttatctagtaggactggaagtgataatgaagccacagtgtcatccaagttaatggttttagctgttcgctttgcaacaagaatgataaaatgttacgggttacagaagcaaaccacagacaataattcagtaaagcttcatgaaatggctctccttttgatggcaataagaagtatccagagccgagtctctgcaaagaatcagaattctgtttggatgcagggagatgataagagctcattgaaaataggtacagaagtatttcagcatgattcttcagttccagttgttgtactggatggtgtttcatcagggccatcgggtgggttagatactcatgacaggcaagagttggttcctgtgtgtgttcctgatagcaacagcatgttagctctaacaccagttgggtcatctcttagtgcttcaacttttcatgatattgatactaataaaaggactacccaagttggaagtcaaaattttcaaggaaatatcaaggagatgattaacagatgggaaatgaataactttgacttaaaaattgtagtcagagaagcactgcagtctggtcgcctacctttggcagttcttcagttgcagcttttgcgccagagggaattagtttccaatgattattctgaagatgctttctctgaagttcatgaaattggaaggtccattgtgtatgacctgttgatgaagggtgaaactggattggctgtagcaacactagaaaggctaggaaatgatgtagagtcggacctaagacaacttatgcaaggtactgtcaggaggtcactaaggctacaaattgctgacgagatgaagaagcgtgggtacataacaccagatgactggaagatgctagaaactataacactaattgagcgtctctaccctagcagcagcttctggaacacatacttttacagggagaatgtcattcgtgatgctgcaaaaattgttacactgccaggagacgataaacctgtattggctctaaatattcgcaaccaccccattattgaatgtggtgatgttgacggagcagtgcttggttcttgggtgaacattaatgattgcactaaggagttttctgggagcaacatttctgatggttattgggcctgtgctgctgtgtggtcggatgcttggggtccgagaactgtggaccgtatattgctggaccagccttatcatgtacatgctcatgtcccatgggaatctcagtttgaatattttgttgctcataatgatgtggggaaagtctgcgaactcctggacatgattcccaatagcatactttcagaagggattattagagtaaacgtgaacagtttacaagctcctgccaacactctttctgatttaacagtccctgattacaacatgtacatatgtgactcagaagagcttgaacctttctgtgtggagataccacatgttaaagtatttagatctttgtggaatcatgagtcaacattatatattcgaatggtaatgcagcaggaattggcaaagagacacatctttatgaaagagtattggcaaagtactactgaaattatacctttgcttgctcgtgctggcatacttataaaggttggtctaaaggaagaatgttctacaatattttctgcttcagagattccagatgatgcccatcaccagggccgtgaaggcgcactgcataagctaatcatacgtttctgtgtgcaatataacttgccatatctactggacctctatctggacacctgtaatttgactcctgataaggattgtatccgtttactcaaagaaaacacaggtgattgcaagtgggcacaatggttactcttctccaggatcaaaggttatgagtatgaggcatcattctctaatgcacgttggaatttgtcaaagaaaatggtcaataatagtaatcctacggctgttgagatagatgaaatgttgtatacagtagatgatatggcagaacgaattggtgaaatgtctgcattagctaccttgatgtatgcttcagcaccaattcagaaatccatatgtactggaagtgtgaacagaagtggttcgtcttcccagtgcacattggagaacctggctccttgtctccagcaatttccaacactatggaaaacccttttttcagcttgttttggccaagatgaatatgggtgtttaaactactctgctgcgtatggaaaaagatcaatttcagagtacttgagatggcgctatagcgttttttcctctgctggaggagacacttcgttgttgcaaatgcttccatgttgggtcccaaagtctgttagaagattaattcaactatttgaacagggcccttttggaatgcaacttctatcaactgccccatcatctgaagagttattcactcacggtgtctccaattatatatacaattctactggatataccgaagccaatgcactgtccttagaagcatcgatccaaaaaagtgttgaagaagaattatattcttcccttgaggagaaagatgtgagagtggaacaccatttgcaccgtggtcgagccttagctgctttcaggcatcttattgctaagagggcttcacagttgaaatcagctagtgcacgtcaagtgatatccgcacagtctaatgttcaagcagatgtacaattgatacttgctcctctaagtcaagttgaacgatcaattcttatatcggtggctccactagctattacaaactttgaggactcgactctagttgcttcctgtatattcttgttggaactttgtggcctgtgtgccaacatgcttcgtttagatattgctgcactacgacgcatctcttcctactacaagtcagttcaagaaaataaacatgttgatctatctccaccaaggggcccagagctccatgtgcagtcccatggagctggtatagctcctgctctagctcgagcgctagctgaagattatgtccagtctgatcatctgcatgttttggagcagactcaaacctcgatggctcccaagcgggaacagacacaatatcctcttatttctattctgcaacaccttgaaaaagcaagtttgccatcattggaggaaggtaaaacttgtgggttttggcttttgactggtgttggtgatgcatctctttaccggtcgcaacagaatgaagcaagtcaacactggaatttggttactgaattctgtcaggcacactatctcccactaagtacaaaatatcttgcattactggccaatgacaatgattgggttggttttttaacagaagctcagatagctggattttctattgaagctgttattgaagtggcagccaaagagatcagggattcaagactgagggcccacatactgactgttctaaaaaatatgatatcacttcgaaggaaatcatctggtaatgtaccttcaggaagcagtgatccatctttctcttctgttgatggcaataatcccatggaacttttctgcattcttggagtctgtgaaaagcaaaaaaaccctggggaggcactcctaattaaagcaaaacaaatgcagtggtctttgcttgccatgattgcctcatgctttccggatgtaactcctctcacatgcttaagtgtttggcttgagattacagccgcaagggagatgtcctcgatcaaggtggatgatgtttccttgaaaatagcaaagaatgttggatctgctgttgaagccacaaataaattgccaagcactagcagaaatgttgaatttcgttacaataggaagaatccaaagcgaagacggttcctggaagcgtcacatgaaaagttatgtttctcaatagatagcacatgtgggccagattctgctgcaacttccaatcctatcagtattgttgaccatcagggaataggaaagccaatctcaggagaaaccataatgtccgttgatattgatgaaaggcttgcatctttatcaaacatggtagcagtgctttgcgaacaacaactgtttctaccattacttagagcttttgaaatgtttttgccttcctgctcccttctttccttcattcgttctctccaggcattttctcaaatgcgtcttcccgaggcttctgcacgtttggcatccttttcagcaagaataaaagatgaagcctctcatactcaactaaactcttccaaagaagtgtcagtaatagcagaatgggtggccactacagctgtaaaagctgcagatgctgtcctttcaaactgttcatcaatttatgagaagaggtgtctactgcagcttctttcagcagtggattttgctgatggtggcacttcatcatcttactttagccgaagatattggaagattaatctgtctgaaccatctttgtgtaaagatactgatgtgtacaactggaatgatttgatggatgatgcttctcttttaacatcattagaaaaggacggtcaatgggagcaagctcgaacttgggcaagacatctggagtcaagtggcatagcttgggaatctactcttgatcatgtcactgaatcacaggcagaagccatggttgctgaatggaaggagtttctttgggatatcccacaagaacgtgcagccttgtggggtcactgtcaatctctctttatgagatattctttccctcctttaaaggctggattatttttccttaagcatgccgaagcagtaggaaaagagataccagcacaagagcttcatgaaatattattgctctctttacaatggctaagtggaactatgactaaatcctctccggtctatcctcttcatcttttgcgggaaattgagactagggtgtggctcctggctgttgagtcagagagtcaatccaaggttgatggtgaatttgccacttctgctgttgctcataacaaagctgttggaaacagtagcagtattatagaacatactgctgatatcatcacaaaaatagacagtaacatgagcttgccgcacatgaaaattacagaaaggaatagcacacgggacagtttatcataccaacatgtgcaactctttgagtctaacagtgaagcatcttcaacaacaataaataacacgcgagcaaagcgaaggatgaaaacaaattcaccacttaaacgaggtgtcaatgacaatattgaaagtagagctaatgagctggataacaattctaacactttacatagttcaaagattggtgaacaagctagaaatttgctctctgaagaggaatttgtaaagatggaagcatctttatctggttgggaacaaaatgttaggcctgtagatatggagaaggctgtgctctctttactggaatttgggcaaataactgctgctaagcaactccaacaaaagctgtctccatcatatattcctgaagaacttgtccttgttgatgttgctttaagaattgccaaaaacagcagtaatggagagatcaatttgtcatgctttgacacacaggctcttcggatacttcagtcactgagagtagcaaatagctgcgatatgattagcccatcacaggagagctgcgcgtcactatattaagaagaaaaggggaaaaagat

SEQ ID NO: 11620 - DNA, 2472 bp, Zea Mays
cggagggaacaactgccgcacggcacggagacagacgcggacagaccgagcgattggtcggcgaccacctcacctccgccgccatccactcctcggctcgggctccacgcaatgttactcgttaccatcattagctgttgatgggcatatgaacgatgtccacatctcgtcagatagatgatgggcctgctgtactacagttatgcagatggacattgctacaaccccatctcaaactatcaaaatttcgagaggcttttatatctccaacaaggcgtctttttggactgctctcagaccatggggatcttgtcctggcaactgctgagatcaactcatcacaagttgaatctcatagagctctatcggatacctgtactcaggcagtcttcaaaacgttttctactattccccgagtgaagtctttagcatggggatactgttctgatgcttttgatgactcaagttttaatgaaattctagtggtatcaagtgatgcttctatcacagtccatgcattctgccattctcgcaaaagcacactaacagttaattcaatgtctgatgctaaagagttgcatggggagtggaaagagtggcgccctactgaatgttcagtgttggaggatggtgagtcaggtccagaaaattggttttgttctttcctaactacagtcactgcgtctgtttctaatggaaaataccaagccagattgcccatgaaatctttattgcctaattcagcagaagttgtatcctttagcatatatgacattactctctctttcttgaaatattggtatagcaaatgttctctgaagactatggcggaaactgacagtgaatcaccacgacgttttcttagagcatcgtgcagttgtcagtgggagtgtctaaaagttttgtctagctcgtcatgttatttgatcggcttagttctgactcctaatgaatcagtacgttgtgaggcccatccatccaatgcggagtgtattttggttactgttctggagctaaaccactggggcatacagtggaactttgtggcagaccttcaggatgtatctgatggtattacgccaagtccaaaatgggttgattttcagttatcagatgtgtttcttgcctgccttaatacagcaggttttgttgccatttggaacgtgaaaactggtggtcttgtgacgtcattcagtgttcttcaacaatgcagaactgatctggagatgcctctgaggagctctatgtccattgtgacaaatttggacgagggaaatatccatgttgagaactttgttggcagaatgtttaagcggttagttttggcatcatattcttatcttcttgctgttgtagatgaggttggagtagtgtatgtgttctatgcggatgacatcttaaacttcaaagctaatgtgcacgaaaactttgatctgcctgttatgaatcagtttgctgattgtttttctatctgggaagctgctggtcatgagataggaagtctatcattttgtgctaatcagtccatacaacaagggtcacttagtctaaccaaattggttcctgagttctcagggaaaagcgatgatattgtcaggcctagagaaagaagaaaatatagatgcgatgaaaatgaagtggacagctggccaagtggctttgtcactgcagggcagatgaaagttggggcaggttatcgtcgcacaaattcctcttgtttctttaggaggataattcttcctccatgcagatcacagcaggatgtaattagcctgtgtccacttggactaactagaatttttaaaggttctattgcggatggaaacgagcatgtcaaaatttttcattccgagttgcttatgtattcatcttttcttggcaaaggagatattgatattggttttatggacgaaatgcttccatttaaaaaggattccacttttgtcggagattctgttgtttgctcctgccagggatatttgtatttaattacccagtatggcctttctgtggtccttcctccagtttctatatcatccttttcatctcaatgtgacgctatcaaattctggcaaatgggtcctgctgctggtagcacatgcaatgctctgaacttactatctgttgacaaatcagacacaagctggaaaacctggcaaatagaagtcctggatagagctttgttgtatgaaggtcccgcactagcagacaggctctgttgggagaatggatgggatttgaaattctctaggttacgttggctgcaattagcccttcattactcaatgattggtgatctagagcagtcactgaatttactcgctgaggttaatcttgcggaagaaggtgtattgcaactgctattggcatctattcataggttatctagtaggactggaagtgataatgaagccacagtgtcatccaagtctggaaactggtgcattgtagaaacttgctagcagcctgagt

SEQ ID NO: 11621 - DNA, 2533 bp, Zea Mays
cggagggaacaactgccgcacggcacggagacagacgcggacagaccgagcgattggtcggcgaccacctcacctccgccgccatccactcctcggctcgggctccacgcaatgttactcgttaccatcattagctgttgatgggcatatgaacgatgtccacatctcgtcagatagatgatgggcctgctgtactacagttatgcagatggacattgctacaaccccatctcaaactatcaaaatttcgagaggcttttatatctccaacaaggcgtctttttggactgctctcagaccatggggatcttgtcctggcaactgctgagatcaactcatcacaagttgaatctcatagagctctatcggatacctgtactcaggcagtcttcaaaacgttttctactattccccgagtgaagtctttagcatggggatactgttctgatgcttttgatgactcaagttttaatgaaattctagtggtatcaagtgatgcttctatcacagtccatgcattctgccattctcgcaaaagcacactaacagttaattcaatgtctgatgctaaagagttgcatggggagtggaaagagtggcgccctactgaatgttcagtgttggaggatggtgagtcaggtccagaaaattggttttgttctttcctaactacagtcactgcgtctgtttctaatggaaaataccaagccagattgcccatgaaatctttattgcctaattcagcagaagttgtatcctttagcatatatgacattactctctctttcttgaaatattggtatagcaaatgttctctgaagactatggcggaaactgacagtgaatcaccacgacgttttcttagagcatcgtgcagttgtcagtgggagtgtctaaaagttttgtctagctcgtcatgttatttgatcggcttagttctgactcctaatgaatcagtacgttgtgaggcccatccatccaatgcggagtgtattttggttactgttctggagctaaaccactggggcatacagtggaactttgtggcagaccttcaggatgtatctgatggtattacgccaagtccaaaatgggttgattttcagttatcagatgtgtttcttgcctgccttaatacagcaggttttgttgccatttggaacgtgaaaactggtggtcttgtgacgtcattcagtgttcttcaacaatgcagaactgatctggagatgcctctgaggagctctatgtccattgtgacaaatttggacgagggaaatatccatgttgagaactttgttggcagaatgtttaagcggttagttttggcatcatattcttatcttcttgctgttgtagatgaggttggagtagtgtatgtgttctatgcggatgacatcttaaacttcaaagctaatgtgcacgaaaactttgatctgcctgttatgaatcagtttgctgattgtttttctatctgggaagctgctggtcatgagataggaagtctatcattttgtgctaatcagtccatacaacaagggtcacttagtctaaccaaattggttcctgagttctcagggaaaagcgatgatattgtcaggcctagagaaagaagaaaatatagatgcgatgaaaatgaagtggacagctggccaagtggctttgtcactgcagggcagatgaaagttggggcaggttatcgtcgcacaaattcctcttgtttctttaggaggataattcttcctccatgcagatcacagcaggatgtaattagcctgtgtccacttggactaactagaatttttaaaggttctattgcggatggaaacgagcatgtcaaaatttttcattccgagttgcttatgtattcatcttttcttggcaaaggagatattgatattggttttatggacgaaatgcttccatttaaaaaggattccacttttgtcggagattctgttgtttgctcctgccagggatatttgtatttaattacccagtatggcctttctgtggtccttcctccagtttctatatcatccttttcatctcaatgtgacgctatcaaattctggcaaatgggtcctgctgctggtagcacatgcaatgctctgaacttactatctgttgacaaatcagacacaagctggaaaacctggcaaatagaagtcctggatagagctttgttgtatgaaggtcccgcactagcagacaggctctgttgggagaatggatgggatttgaaattctctaggttacgttggctgcaattagcccttcattactcaatgattggtgatctagagcagtcactgaatttactcgctgaggttaatcttgcggaagaaggtgtattgcaactgctattggcatctattcataggttatctagtaggactggaagtgataatgaagccacagtgtcatccaaatcagtaccaatatacttctctgctcggcaggcatcttgttcgaccggatgatatgtttgaacaacttggttaaccatactatagctatgtccccgagcctcgag

SEQ ID NO: 11622 - DNA, 1570 bp, Zea Mays
cctacacgcactccacagatctcgcctccatgcggggccaccactaaatctcacgctcgtggcccgtcgtgtcagtgtcagggccccacgaggcggcatcgcgtcgcgggccgccaggcgtgaccgaaacaaacgaacccttttgcctcggccgggtgccttgcccggcccatgccgtgcccggttgtgtaaatagaagataggcgacgaacacgaagcaagcaaggcagccgaatcccaactcctgtgtgtgcctgccaacgcctcgtcgcccgccgccgccgctgcttcgcccctctccgccagccgctcccgctcggagcacgccgccgccggcgtgggcgcgcaccgacggccgtcgtgtcgcatggatatggcccccgcggccgtctcctccaacccgcgctcggtcgaggaaatcttcaaagacttctccggccggcgcgcggggctcgtccgcgccctcacctccgatgtggacgatttctgcagcttctgcgacccagataaggagaacttgtgtctctacggccttcccaacggtagctgggaggtctcgccgccggcggacgaggttcctccggagttgcccgagccggcgctcggcatcaactttgcgcgcgatggcatgcagcgccgcgactggctctcactcgtcgcggtccactctgactcgtggctcatctcagtcgccttcttctacggcgcccgcctcaacgccaacgaccgcatttgcggacaggaaacacgtcagggataggtctggcgttgatagcagcggcaagtccaggcactcatcaaagagaggaaacgatggccatgcgaagaactccagggcagcagctcctgctgccaaagagtacgacgacgacgatgacgaggaggacgaggaacacacggaaaccttttgtggaagctgcggcggcctctacaacgcgaacgagttctggatcggctgcgacatctgcgagcggtggttccacgggaagtgcgtgcggatcacccctgccaaagcggaccacataaagcactacaagtgcccggactgcagctcgaagaaaataaggcagtaggtcccagtgtgcaccgccggccatcgctgacctgtctgatcccaaaccatactccattgcttgcctgccttgccccaaggtcgcagctagcagatgcgaattccttcatttgtggggggttgttgtgtgatggatagcctggtaggaagaggcaaaggactgatatataatgactcgtttattgttcatctttttgcctgcttcgtcggtcgtcgcagtcgttgtggctgcatgaactgatgagtggtttgttcgtgctagttgtaggctgtttcactgatttgcgtgcgtatgtggactggtcctgtcaaatttgtaggcctgaaaccgtacttccatttacgtggctacgcgagctgatttgccggtctgcctctcccatctgtatcctggacatggcagtatggtcacgaagtccagatggcgatatgcctgactgccggtaacggagggcagctgtggtgtagtatatctcagtcacatgagaggcgttagat

SEQ ID NO: 11623 - DNA, 398 bp, Zea Mays
tggccttgcaaacccaggacatacatacctcaggtactacggtttctgagtctctacatataatataatattatgttatcaaagatgcaatacaagcctcaagtttttcctaagtttcttttccagagcagacgataattttatgcgaaagaagcaaactgagcagcagtcaccagatcaagcgtgaatcgccaagcaagagtcttggcttgcttagctatgcttcgacaaaatggcctccgcaacacttcgagctattgggtggtagaactcttgagcctccgagaatatcctctgggccagcatcttctcctcgctggagcacttggccagcgagctgtagagcgggcggaggtacttcatccttcccacctgcttcaagcatttctcaacctcgt

SEQ ID NO: 11624 - DNA, 2736 bp, Zea Mays
ctaaatgatcttctctaggtgtgtttgctggctgtttgcactatggatggtcatgtgaagctttacaggtcaccaatttgggagctatgtgatgaatgggttgaggtcgcagatatatcacagttgctgtttaactactataaacttataaactttggagaggataatggttctcatttgacttctctggtgtcctggacagagaaaactaaagcgatcaagagttgatggttttatttatgacgtcaatgaagttgatttagatgcatcaaaggatgcagacttctcgatcgaaccatgttctaaatcaaagaagaaatatttgaaaaagactgtaaaacccaggcatgaagtagttgctgtaaatgaacgaaacaacacaggaaatattaaaggatcattgtcctccaatggagaaaacaaatcccttcctcttatcacggcaaaacagtatgcttgtcgtgctgcacatttgtcttcccttgtagtttcatggtctccagttgtgtcatcaagtgataaaacatcttgtttattgaggcattggtgcattattgctgttggctctaaatccggaaatctttctttttggaaactacctaagccagaatattacacaatagatgctggcgtggttaccagtgatccaatgctcatcggggttttgcaagctcacaaatcatgtgtcagtgtcatagcttggcaagttctttctgcgggctcttcaaaatcctcgttgcttttagctactggatgctcagatggaagtgttaagatatggttagggaatattgaagggttaaatcaatgtgcaagtggagaagtgccatttgcgttagttgctgtggtcgccactgatttatcatctccagtgtcatcaatctcattagccatacctgcccagtctcaacacgaggtcagtttggcaattggaagagtatctgggtcactagaaatatggatatggaatgcatctagcaacaaaattgagattttcagtgcatggcatgcacatgatcaagtggtaacaggtttacaatgggctatggatggctattgtttattcagctgcagtcaggacaattctgcacgttgttggatctctcacgaaaaccaccttgaagaaatttttatgcattcaaattttccagagctaagggagtcagcagacctatcagaactctctgatcgatgctatggtcttacactagcacctggagaacagatgattgctgtggtccgcagtttggatctgaaccttctgaaccagatgtatcaagtcaggacacaaaaggcggtggttgagttcatttggattggtggccaatttgttggtattccactagacaggagcattgatatttgcagttcacagtccacagacttatcctcaagtaatctcatgtggtggggatccaacattttgtggtcgctgaagaaatacgaaaatgtagaaaagaggcttgtgatatgggatgttgtagctgtgctgcaggagttgaagaaatccgcacctgcctttctggagactctagtgcatagttgggtctcagtgttactttcgggcgacccccagtgtgtttctatcgatgctccatcacgttcaatgcatgacatgatgccctatgtcagcacgcggaagctacacttactgaacataatgtgcagaaaagtaatggtcagcattcacacacatcatggtcctggtgctgaaaacggcaatgaggaaacaactgatttctggagcactcttttggtgaggagcgaaacagagctgcgagagaggctggttggcttcacctttgctgcagtcctgaaacggacagcgtatttgttcaatggtacctctactgaaaattgctggtttcctgttggggttgcccagatggattcttgggtaaccatgaattacgacggacaagtgcatgaccagctgcagtctatcagatcaaagatcaaagatttaggaagcaggatcgacggatactctgacgtagaaagctgcccctactgctcttcgccggtccatttcgagtcgcctgacgtagccatctgtggggaaaggcacacactgccgcggtgcagggcgtccatgatcctgtgctccgttgtgcagcctttgtggcactgcgtgtgctgcggaggcacggtcaacaagctgttgccggagtcgttcttcaccatgcaggcgtccaccatgcatgatgaaggatcgctcgatctgtcagcagcctccgtcccactttgccccttctgtggcatcctcctgcagaggtcgatgccggcgttcctgctctccacctcgccggcatagaggctctctgtggatgctagtaggcatccaccaggtgtagcatgcagtagcaatgtagtactagtaaagtttgttctagtcgatgctgcttacactcagttactcttaccaagtatggctggcagagtgtcggttactggtcattttttaggtcccttttgaatgaatacgatgagttcttttgtttggtttcttttggaccctgacggtggcagattaccaggccaagttcagctatctcgaattgtctcattcgattgttgcggacatgcagttctggcagttccaattggttgttgcggacatgcagtcctgtcagttgactcagttccaagtgtacgtattttgcttcgaggctttcccagagcagagcacgtgtcgatggatgtagcggccggagaacgtgaacgaggcaaaacaac

SEQ ID NO: 11625 - DNA, 2685 bp, Zea Mays
cattctaaatgatcttctctaggtgtcaccaatttgggagctatgtgatgaatgggttgaggtcgcagatatatcacagttgctgtttaactactataaacttataaactttggagaggataatggttctcatttgacttctctggtgtcctggacagagaaaactaaagcgatcaagagttgatggttttatttatgacgtcaatgaagttgatttagatgcatcaaaggatgcagacttctcgatcgaaccatgttctaaatcaaagaagaaatatttgaaaaagactgtaaaacccaggcatgaagtagttgctgtaaatgaacgaaacaacacaggaaatattaaaggatcattgtcctccaatggagaaaacaaatcccttcctcttatcacggcaaaacagtatgcttgtcgtgctgcacatttgtcttcccttgtagtttcatggtctccagttgtgtcatcaagtgataaaacatcttgtttattgaggcattggtgcattattgctgttggctctaaatccggaaatctttctttttggaaactacctaagccagaatattacacaatagatgctggcgtggttaccagtgatccaatgctcatcggggttttgcaagctcacaaatcatgtgtcagtgtcatagcttggcaagttctttctgcgggctcttcaaaatcctcgttgcttttagctactggatgctcagatggaagtgttaagatatggttagggaatattgaagggttaaatcaatgtgcaagtggagaagtgccatttgcgttagttgctgtggtcgccactgatttatcatctccagtgtcatcaatctcattagccatacctgcccagtctcaacacgaggtcagtttggcaattggaagagtatctgggtcactagaaatatggatatggaatgcatctagcaacaaaattgagattttcagtgcatggcatgcacatgatcaagtggtttacaatgggctatggatggctattgtttattcagctgcagtcaggacaattctgcacgttgttggatctctcacgaaaaccaccttgaagaaatttttatgcattcaaattttccagagctaagggagtcagcagacctatcagaactctctgatcgatgctatggtcttacactagcacctggagaacagatgattgctgtggtccgcagtttggatctgaaccttctgaaccagatgtatcaagtcaggacacaaaaggcggtggttgagttcatttggattggtggccaatttgttggtattccactagacaggagcattgatatttgcagttcacagtccacagacttatcctcaagtaatctcatgtggtggggatccaacattttgtggtcgctgaagaaatacgaaaatgtagaaaagaggcttgtgatatgggatgttgtagctgtgctgcaggagttgaagaaatccgcacctgcctttctggagactctagtgcatagttgggtctcagtgttactttcgggcgacccccagtgtgtttctatcgatgctccatcacgttcaatgcatgacatgatgccctatgtcagcacgcggaagctacacttactgaacataatgtgcagaaaagtaatggtcagcattcacacacatcatggtcctggtgctgaaaacggcaatgaggaaacaactgatttctggagcactcttttggtgaggagcgaaacagagctgcgagagaggctggttggcttcacctttgctgcagtcctgaaacggacagcgtatttgttcaatggtacctctactgaaaattgctggtttcctgttggggttgcccagatggattcttgggtaaccatgaattacgacggacaagtgcatgaccagctgcagtctatcagatcaaagatcaaagatttaggaagcaggatcgacggatactctgacgtagaaagctgcccctactgctcttcgccggtccatttcgagtcgcctgacgtagccatctgtggggaaaggcacacactgccgcggtgcagggcgtccatgatcctgtgctccgttgtgcagcctttgtggcactgcgtgtgctgcggaggcacggtcaacaagctgttgccggagtcgttcttcaccatgcaggcgtccaccatgcatgatgaaggatcgctcgatctgtcagcagcctccgtcccactttgccccttctgtggcatcctcctgcagaggtcgatgccggcgttcctgctctccacctcgccggcatagaggctctctgtggatgctagtaggcatccaccaggtgtagcatgcagtagcaatgtagtactagtaaagtttgttctagtcgatgctgcttacactcagttactcttaccaagtatggctggcagagtgtcggttactggtcattttttaggtcccttttgaatgaatacgatgagttcttttgtttggtttcttttggaccctgacggtggcagattaccaggccaagttcagctatctcgaattgtctcattcgattgttgcggacatgcagttctggcagttccaattggttgttgcggacatgcagtcctgtcagttgactcagttccaagtgtacgtattttgcttcgaggctttcccagagcagagcacgtgtcgatggatgtagcggccggagaacgtgaacgaggcaaaacaac

SEQ ID NO: 11626 - DNA, 2854 bp, Zea Mays
ctttgacattctaaatgatcttctctaggtctttacaggtcaccaatttgggagctatgtgatgaatgggttgagatatatcacagttgctgtttaactactataaacttataaactttggagaggataatggttctcatttgacttctctgaagaatacaaatactggggagacagaggttttaggatctgcttatgaattgcaagaatctctttatttcaggtgtcctggacagagaaaactaaagcgatcaagagttgatggttttatttatgacgtcaatgaagttgatttagatgcatcaaaggatgcagacttctcgatcgaaccatgttctaaatcaaagaagaaatatttgaaaaagactgtaaaacccaggcatgaagtagttgctgtaaatgaacgaaacaacacaggaaatattaaaggatcattgtcctccaatggagaaaacaaatcccttcctcttatcacggcaaaacagtatgcttgtcgtgctgcacatttgtcttcccttgtagtttcatggtctccagttgtgtcatcaagtgataaaacatcttgtttattgaggcattggtgcattattgctgttggctctaaatccggaaatctttctttttggaaactacctaagccagaatattacacaatagatgctggcgtggttaccagtgatccaatgctcatcggggttttgcaagctcacaaatcatgtgtcagtgtcatagcttggcaagttctttctgcgggctcttcaaaatcctcgttgcttttagctactggatgctcagatggaagtgttaagatatggttagggaatattgaagggttaaatcaatgtgcaagtggagaagtgccatttgcgttagttgctgtggtcgccactgatttatcatctccagtgtcatcaatctcattagccatacctgcccagtctcaacacgaggtcagtttggcaattggaagagtatctgggtcactagaaatatggatatggaatgcatctagcaacaaaattgagattttcagtgcatggcatgcacatgatcaagtggtaacaggtttacaatgggctatggatggctattgtttattcagctgcagtcaggacaattctgcacgttgttggatctctcacgaaaaccaccttgaagaaatttttatgcattcaaattttccagagctaagggagtcagcagacgtaaaactagtagatacttaaatgtttgttatccttgatgtccattttctttctcatataattgggttttcaatgtgcatgcagctatcagaactctctgatcgatgctatggtcttacactagcacctggagaacagatgattgctgtggtccgcagtttggatctgaaccttctgaaccagatgtatcaagtcaggacacaaaaggcggtggttgagttcatttggattggtggccaatttgttggtattccactagacaggagcattgatatttgcagttcacagtccacagacttatcctcaagtaatctcatgtggtggggatccaacattttgtggtcgctgaagaaatacgaaaatgtagaaaagaggcttgtgatatgggatgttgtagctgtgctgcaggagttgaagaaatccgcacctgcctttctggagactctagtgcatagttgggtctcagtgttactttcgggcgacccccagtgtgtttctatcgatgctccatcacgttcaatgcatgacatgatgccctatgtcagcacgcggaagctacacttactgaacataatgtgcagaaaagtaatggtcagcattcacacacatcatggtcctggtgctgaaaacggcaatgaggaaacaactgatttctggagcactcttttggtgaggagcgaaacagagctgcgagagaggctggttggcttcacctttgctgcagtcctgaaacggacagcgtatttgttcaatggtacctctactgaaaattgctggtttcctgttggggttgcccagatggattcttgggtaaccatgaattacgacggacaagtgcatgaccagctgcagtctatcagatcaaagatcaaagatttaggaagcaggatcgacggatactctgacgtagaaagctgcccctactgctcttcgccggtccatttcgagtcgcctgacgtagccatctgtggggaaaggcacacactgccgcggtgcagggcgtccatgatcctgtgctccgttgtgcagcctttgtggcactgcgtgtgctgcggaggcacggtcaacaagctgttgccggagtcgttcttcaccatgcaggcgtccaccatgcatgatgaaggatcgctcgatctgtcagcagcctccgtcccactttgccccttctgtggcatcctcctgcagaggtcgatgccggcgttcctgctctccacctcgccggcatagaggctctctgtggatgctagtaggcatccaccaggtgtagcatgcagtagcaatgtagtactagtaaagtttgttctagtcgatgctgcttacactcagttactcttaccaagtatggctggcagagtgtcggttactggtcattttttaggtcccttttgaatgaatacgatgagttcttttgtttggtttcttttggaccctgacggtggcagattaccaggccaagttcagctatctcgaattgtctcattcgattgttgcggacatgcagttctggcagttccaattggttgttgcggacatgcagtcctgtcagttgactcagttccaagtgtacgtattttgcttcgaggctttcccagagcagagcacgtgtcgatggatgtagcggccggagaacgtgaacgaggcaaaacaac

SEQ ID NO: 11627 - DNA, 2699 bp, Zea Mays
caaatctttgacattctaaatgatcttctctaggtgtgtttgctggctgtttgcactatggatggtcatgtgaagctttacaggtcaccaatttgggagctatgtgatgaatgggttgagatatatcacagttgctgtttaactactataaacttataaactttggagaggataatggttctcatttgacttctctgaagaatacaaatactggggagacagaggttttaggatctgcttatgaattgcaagaatctctttatttcaggtgtcctggacagagaaaactaaagcgatcaagactgtaaaacccaggcatgaagtagttgctgtaaatgaacgaaacaacacaggaaatattaaaggatcattgtcctccaatggagaaaacaaatcccttcctcttatcacggcaaaacagtatgcttgtcgtgctgcacatttgtcttcccttgtagtttcatggtctccagttgtgtcatcaagtgataaaacatcttgtttattgaggcattggtgcattattgctgttggctctaaatccggaaatctttctttttggaaactacctaagccagaatattacacaatagatgctggcgtggttaccagtgatccaatgctcatcggggttttgcaagctcacaaatcatgtgtcagtgtcatagcttggcaagttctttctgcgggctcttcaaaatcctcgttgcttttagctactggatgctcagatggaagtgttaagatatggttagggaatattgaagggttaaatcaatgtgcaagtggagaagtgccatttgcgttagttgctgtggtcgccactgatttatcatctccagtgtcatcaatctcattagccatacctgcccagtctcaacacgaggtcagtttggcaattggaagagtatctgggtcactagaaatatggatatggaatgcatctagcaacaaaattgagattttcagtgcatggcatgcacatgatcaagtggtttacaatgggctatggatggctattgtttattcagctgcagtcaggacaattctgcacgttgttggatctctcacgaaaaccaccttgaagaaatttttatgcattcaaattttccagagctaagggagtcagcagacctatcagaactctctgatcgatgctatggtcttacactagcacctggagaacagatgattgctgtggtccgcagtttggatctgaaccttctgaaccagatgtatcaagtcaggacacaaaaggcggtggttgagttcatttggattggtggccaatttgttggtattccactagacaggagcattgatatttgcagttcacagtccacagacttatcctcaagtaatctcatgtggtggggatccaacattttgtggtcgctgaagaaatacgaaaatgtagaaaagaggcttgtgatatgggatgttgtagctgtgctgcaggagttgaagaaatccgcacctgcctttctggagactctagtgcatagttgggtctcagtgttactttcgggcgacccccagtgtgtttctatcgatgctccatcacgttcaatgcatgacatgatgccctatgtcagcacgcggaagctacacttactgaacataatgtgcagaaaagtaatggtcagcattcacacacatcatggtcctggtgctgaaaacggcaatgaggaaacaactgatttctggagcactcttttggtgaggagcgaaacagagctgcgagagaggctggttggcttcacctttgctgcagtcctgaaacggacagcgtatttgttcaatggtacctctactgaaaattgctggtttcctgttggggttgcccagatggattcttgggtaaccatgaattacgacggacaagtgcatgaccagctgcagtctatcagatcaaagatcaaagatttaggaagcaggatcgacggatactctgacgtagaaagctgcccctactgctcttcgccggtccatttcgagtcgcctgacgtagccatctgtggggaaaggcacacactgccgcggtgcagggcgtccatgatcctgtgctccgttgtgcagcctttgtggcactgcgtgtgctgcggaggcacggtcaacaagctgttgccggagtcgttcttcaccatgcaggcgtccaccatgcatgatgaaggatcgctcgatctgtcagcagcctccgtcccactttgccccttctgtggcatcctcctgcagaggtcgatgccggcgttcctgctctccacctcgccggcatagaggctctctgtggatgctagtaggcatccaccaggtgtagcatgcagtagcaatgtagtactagtaaagtttgttctagtcgatgctgcttacactcagttactcttaccaagtatggctggcagagtgtcggttactggtcattttttaggtcccttttgaatgaatacgatgagttcttttgtttggtttcttttggaccctgacggtggcagattaccaggccaagttcagctatctcgaattgtctcattcgattgttgcggacatgcagttctggcagttccaattggttgttgcggacatgcagtcctgtcagttgactcagttccaagtgtacgtattttgcttcgaggctttcccagagcagagcacgtgtcgatggatgtagcggccggagaacgtgaacgaggcaaaacaac

SEQ ID NO: 11628 - DNA, 2841 bp, Zea Mays
tacaaatctttgacattctaaatgatcttctctaggtgtcaccaatttgggagctatgtgatgaatgggttgaggtcgcagatatatcacagttgctgtttaactactataaacttataaactttggagaggataatggttctcatttgacttctctgaagaatacaaatactggggagacagaggttttaggatctgcttatgaattgcaagaatctctttatttcaggtgtcctggacagagaaaactaaagcgatcaagagttgatggttttatttatgacgtcaatgaagttgatttagatgcatcaaaggatgcagacttctcgatcgaaccatgttctaaatcaaagaagaaatatttgaaaaagactgtaaaacccaggcatgaagtagttgctgtaaatgaacgaaacaacacaggaaatattaaaggatcattgtcctccaatggagaaaacaaatcccttcctcttatcacggcaaaacagtatgcttgtcgtgctgcacatttgtcttcccttgtagtttcatggtctccagttgtgtcatcaagtgataaaacatcttgtttattgaggcattggtgcattattgctgttggctctaaatccggaaatctttctttttggaaactacctaagccagaatattacacaatagatgctggcgtggttaccagtgatccaatgctcatcggggttttgcaagctcacaaatcatgtgtcagtgtcatagcttggcaagttctttctgcgggctcttcaaaatcctcgttgcttttagctactggatgctcagatggaagtgttaagatatggttagggaatattgaagggttaaatcaatgtgcaagtggagaagtgccatttgcgttagttgctgtggtcgccactgatttatcatctccagtgtcatcaatctcattagccatacctgcccagtctcaacacgaggtcagtttggcaattggaagagtatctgggtcactagaaatatggatatggaatgcatctagcaacaaaattgagattttcagtgcatggcatgcacatgatcaagtggtttacaatgggctatggatggctattgtttattcagctgcagtcaggacaattctgcacgttgttggatctctcacgaaaaccaccttgaagaaatttttatgcattcaaattttccagagctaagggagtcagcagacctatcagaactctctgatcgatgctatggtcttacactagcacctggagaacagatgattgctgtggtccgcagtttggatctgaaccttctgaaccagatgtatcaagtcaggacacaaaaggcggtggttgagttcatttggattggtggccaatttgttggtattccactagacaggagcattgatatttgcagttcacagtccacagacttatcctcaagtaatctcatgtggtggggatccaacattttgtggtcgctgaagaaatacgaaaatgtagaaaagaggcttgtgatatgggatgttgtagctgtgctgcaggagttgaagaaatccgcacctgcctttctggagactctagtgcatagttgggtctcagtgttactttcgggcgacccccagtgtgtttctatcgatgctccatcacgttcaatgcatgacatgatgccctatgtcagcacgcggaagctacacttactgaacataatgtgcagaaaagtaatggtcagcattcacacacatcatggtcctggtgctgaaaacggcaatgaggaaacaactgatttctggagcactcttttggtgaggagcgaaacagagctgcgagagaggctggttggcttcacctttgctgcagtcctgaaacggacagcgtatttgttcaatggtacctctactgaaaattgctggtttcctgttggggttgcccagatggattcttgggtaaccatgaattacgacggacaagtgcatgaccagctgcagtctatcagatcaaagatcaaagatttaggaagcaggtgcatgcatttttccatctcgattgatcaatcatctgccatccagttccatctaactggttcctccttcaggatcgacggatactctgacgtagaaagctgcccctactgctcttcgccggtccatttcgagtcgcctgacgtagccatctgtggggaaaggcacacactgccgcggtgcagggcgtccatgatcctgtgctccgttgtgcagcctttgtggcactgcgtgtgctgcggaggcacggtcaacaagctgttgccggagtcgttcttcaccatgcaggcgtccaccatgcatgatgaaggatcgctcgatctgtcagcagcctccgtcccactttgccccttctgtggcatcctcctgcagaggtcgatgccggcgttcctgctctccacctcgccggcatagaggctctctgtggatgctagtaggcatccaccaggtgtagcatgcagtagcaatgtagtactagtaaagtttgttctagtcgatgctgcttacactcagttactcttaccaagtatggctggcagagtgtcggttactggtcattttttaggtcccttttgaatgaatacgatgagttcttttgtttggtttcttttggaccctgacggtggcagattaccaggccaagttcagctatctcgaattgtctcattcgattgttgcggacatgcagttctggcagttccaattggttgttgcggacatgcagtcctgtcagttgactcagttccaagtgtacgtattttgcttcgaggctttcccagagcagagcacgtgtcgatggatgtagcggccggagaacgtgaacgaggcaaaacaac

SEQ ID NO: 11629 - DNA, 3019 bp, Zea Mays
ctggttggcacgactacttcaagagccgtcttcacggcctgcaagatctcttggagccatgtttattgtccacttccttagcgcgtgagactgaaccatgtgcccgatcgatttcatggtctcaacaaggatttgcacctaactctgggtgtttgctggctgtttgcactatggatggtcatgtgaagctttacaggtcaccaatttgggagctatgtgatgaatgggttgaggtcgcagatatatcacagttgctgtttaactactataaacttataaactttggagaggataatggttctcatttgacttctctgaagaatacaaatactggggagacagaggttttaggatctgcttatgaattgcaagaatctctttatttcaggtgtcctggacagagaaaactaaagcgatcaagagttgatggttttatttatgacgtcaatgaagttgatttagatgcatcaaaggatgcagacttctcgatcgaaccatgttctaaatcaaagaagaaatatttgaaaaagactgtaaaacccaggcatgaagtagttgctgtaaatgaacgaaacaacacaggaaatattaaaggatcattgtcctccaatggagaaaacaaatcccttcctcttatcacggcaaaacagtatgcttgtcgtgctgcacatttgtcttcccttgtagtttcatggtctccagttgtgtcatcaagtgataaaacatcttgtttattgaggcattggtgcattattgctgttggctctaaatccggaaatctttctttttggaaactacctaagccagaatattacacaatagatgctggcgtggttaccagtgatccaatgctcatcggggttttgcaagctcacaaatcatgtgtcagtgtcatagcttggcaagttctttctgcgggctcttcaaaatcctcgttgcttttagctactggatgctcagatggaagtgttaagatatggttagggaatattgaagggttaaatcaatgtgcaagtggagaagtgccatttgcgttagttgctgtggtcgccactgatttatcatctccagtgtcatcaatctcattagccatacctgcccagtctcaacacgaggtcagtttggcaattggaagagtatctgggtcactagaaatatggatatggaatgcatctagcaacaaaattgagattttcagtgcatggcatgcacatgatcaagtggtaacaggtttacaatgggctatggatggctattgtttattcagctgcagtcaggacaattctgcacgttgttggatctctcacgaaaaccaccttgaagaaatttttatgcattcaaattttccagagctaagggagtcagcagacgtaaaactagtagatacttaaatgtttgttatccttgatgtccattttctttctcatataattgggttttcaatgtgcatgcagctatcagaactctctgatcgatgctatggtcttacactagcacctggagaacagatgattgctgtggtccgcagtttggatctgaaccttctgaaccagatgtatcaagtcaggacacaaaaggcggtggttgagttcatttggattggtggccaatttgttggtattccactagacaggagcattgatatttgcagttcacagtccacagacttatcctcaagtaatctcatgtggtggggatccaacattttgtggtcgctgaagaaatacgaaaatgtagaaaagaggcttgtgatatgggatgttgtagctgtgctgcaggagttgaagaaatccgcacctgcctttctggagactctagtgcatagttgggtctcagtgttactttcgggcgacccccagtgtgtttctatcgatgctccatcacgttcaatgcatgacatgatgccctatgtcagcacgcggaagctacacttactgaacataatgtgcagaaaagtaatggtcagcattcacacacatcatggtcctggtgctgaaaacggcaatgaggaaacaactgatttctggagcactcttttggtgaggagcgaaacagagctgcgagagaggctggttggcttcacctttgctgcagtcctgaaacggacagcgtatttgttcaatggtacctctactgaaaattgctggtttcctgttggggttgcccagatggattcttgggtaaccatgaattacgacggacaagtgcatgaccagctgcagtctatcagatcaaagatcaaagatttaggaagcaggatcgacggatactctgacgtagaaagctgcccctactgctcttcgccggtccatttcgagtcgcctgacgtagccatctgtggggaaaggcacacactgccgcggtgcagggcgtccatgatcctgtgctccgttgtgcagcctttgtggcactgcgtgtgctgcggaggcacggtcaacaagctgttgccggagtcgttcttcaccatgcaggcgtccaccatgcatgatgaaggatcgctcgatctgtcagcagcctccgtcccactttgccccttctgtggcatcctcctgcagaggtcgatgccggcgttcctgctctccacctcgccggcatagaggctctctgtggatgctagtaggcatccaccaggtgtagcatgcagtagcaatgtagtactagtaaagtttgttctagtcgatgctgcttacactcagttactcttaccaagtatggctggcagagtgtcggttactggtcattttttaggtcccttttgaatgaatacgatgagttcttttgtttggtttcttttggaccctgacggtggcagattaccaggccaagttcagctatctcgaattgtctcattcgattgttgcggacatgcagttctggcagttccaattggttgttgcggacatgcagtcctgtcagttgactcagttccaagtgtacgtattttgcttcgaggctttcccagagcagagcacgtgtcgatggatgtagcggccggagaacgtgaacgaggcaaaacaac

SEQ ID NO: 11630 - DNA, 2889 bp, Zea Mays
aatagagaagatctcttggagccatgtttattgtccacttccttagcgcgtgagactgaaccatgtgcccgatcgatttcatggtctcaacaaggatttgcacctaactctgggtatacaaatctttgacattctaaatgatcttctctaggtgtcaccaatttgggagctatgtgatgaatgggttgaggtcgcagatatatcacagttgctgtttaactactataaacttataaactttggagaggataatggttctcatttgacttctctgaatacaaatactggggagacagaggttttaggatctgcttatgaattgcaagaatctctttatttcaggtgtcctggacagagaaaactaaagcgatcaagagttgatggttttatttatgacgtcaatgaagttgatttagatgcatcaaaggatgcagacttctcgatcgaaccatgttctaaatcaaagaagaaatatttgaaaaagactgtaaaacccaggcatgaagtagttgctgtaaatgaacgaaacaacacaggaaatattaaaggatcattgtcctccaatggagaaaacaaatcccttcctcttatcacggcaaaacagtatgcttgtcgtgctgcacatttgtcttcccttgtagtttcatggtctccagttgtgtcatcaagtgataaaacatcttgtttattgaggcattggtgcattattgctgttggctctaaatccggaaatctttctttttggaaactacctaagccagaatattacacaatagatgctggcgtggttaccagtgatccaatgctcatcggggttttgcaagctcacaaatcatgtgtcagtgtcatagcttggcaagttctttctgcgggctcttcaaaatcctcgttgcttttagctactggatgctcagatggaagtgttaagatatggttagggaatattgaagggttaaatcaatgtgcaagtggagaagtgccatttgcgttagttgctgtggtcgccactgatttatcatctccagtgtcatcaatctcattagccatacctgcccagtctcaacacgaggtcagtttggcaattggaagagtatctgggtcactagaaatatggatatggaatgcatctagcaacaaaattgagattttcagtgcatggcatgcacatgatcaagtggtaacaggtttacaatgggctatggatggctattgtttattcagctgcagtcaggacaattctgcacgttgttggatctctcacgaaaaccaccttgaagaaatttttatgcattcaaattttccagagctaagggagtcagcagacctatcagaactctctgatcgatgctatggtcttacactagcacctggagaacagatgattgctgtggtccgcagtttggatctgaaccttctgaaccagatgtatcaagtcaggacacaaaaggcggtggttgagttcatttggattggtggccaatttgttggtattccactagacaggagcattgatatttgcagttcacagtccacagacttatcctcaagtaatctcatgtggtggggatccaacattttgtggtcgctgaagaaatacgaaaatgtagaaaagaggcttgtgatatgggatgttgtagctgtgctgcaggagttgaagaaatccgcacctgcctttctggagactctagtgcatagttgggtctcagtgttactttcgggcgacccccagtgtgtttctatcgatgctccatcacgttcaatgcatgacatgatgccctatgtcagcacgcggaagctacacttactgaacataatgtgcagaaaagtaatggtcagcattcacacacatcatggtcctggtgctgaaaacggcaatgaggaaacaactgatttctggagcactcttttggtgaggagcgaaacagagctgcgagagaggctggttggcttcacctttgctgcagtcctgaaacggacagcgtatttgttcaatggtacctctactgaaaattgctggtttcctgttggggttgcccagatggattcttgggtaaccatgaattacgacggacaagtgcatgaccagctgcagtctatcagatcaaagatcaaagatttaggaagcaggatcgacggatactctgacgtagaaagctgcccctactgctcttcgccggtccatttcgagtcgcctgacgtagccatctgtggggaaaggcacacactgccgcggtgcagggcgtccatgatcctgtgctccgttgtgcagcctttgtggcactgcgtgtgctgcggaggcacggtcaacaagctgttgccggagtcgttcttcaccatgcaggcgtccaccatgcatgatgaaggatcgctcgatctgtcagcagcctccgtcccactttgccccttctgtggcatcctcctgcagaggtcgatgccggcgttcctgctctccacctcgccggcatagaggctctctgtggatgctagtaggcatccaccaggtgtagcatgcagtagcaatgtagtactagtaaagtttgttctagtcgatgctgcttacactcagttactcttaccaagtatggctggcagagtgtcggttactggtcattttttaggtcccttttgaatgaatacgatgagttcttttgtttggtttcttttggaccctgacggtggcagattaccaggccaagttcagctatctcgaattgtctcattcgattgttgcggacatgcagttctggcagttccaattggttgttgcggacatgcagtcctgtcagttgactcagttccaagtgtacgtattttgcttcgaggctttcccagagcagagcacgtgtcgatggatgtagcggccggagaacgtgaacgaggcaaaacaac

SEQ ID NO: 11631 - DNA, 3284 bp, Zea Mays
gttctatcttaattgtactgctagatatgcttggacattagtgccatggctcctcaataccaagctgcgaccttgattgcctctccatcttatccaagtgccattgcttggtcaagcgacaatcttgtggctgttgcatctggtcatattgtaactattctgaatccatctgcgcttgatggaccccgtggattggttggactttgtcgcagtgacccttttcctataggactggttaatagagaagcggcacaacaatcaagtgaagcgcaactcaagaggccaaggcgggcacaatactgctcaatggaccccgtggattggttggactttgtcgcagtgacccttttcctatatgactggttaatagagaaggagtcgcctgccggagttggtcagggaggagtgaaggagttgctggagttggtcaaggactggaggagcaggcgatctcttggagccatgtttattgtccacttccttagcgcgtgtttgctggctgtttgcactatggatggtcatgtgaagctttacaggtcaccaatttgggagctatgtgatgaatgggttgagaagaatacaaatactggggagacagaggttttaggatctgcttatgaattgcaagaatctctttatttcaggtgtcctggacagagaaaactaaagcgatcaaggtgaatttcgtttctacttcacatttgccaccgagaaaagtttccacatttgaaataataagatgatctaagggagcaccatttagccatcatagttgatggttttatttatgacgtcaatgaagttgatttagatgcatcaaaggatgcagacttctcgatcgaaccatgttctaaatcaaagaagaaatatttgaaaaagactgtaaaacccaggcatgaagtagttgctgtaaatgaacgaaacaacacaggaaatattaaaggatcattgtcctccaatggagaaaacaaatcccttcctcttatcacggcaaaacagtatgcttgtcgtgctgcacatttgtcttcccttgtagtttcatggtctccagttgtgtcatcaagtgataaaacatcttgtttattgaggcattggtgcattattgctgttggctctaaatccggaaatctttctttttggaaactacctaagccagaatattacacaatagatgctggcgtggttaccagtgatccaatgctcatcggggttttgcaagctcacaaatcatgtgtcagtgtcatagcttggcaagttctttctgcgggctcttcaaaatcctcgttgcttttagctactggatgctcagatggaagtgttaagatatggttagggaatattgaagggttaaatcaatgtgcaagtggagaagtgccatttgcgttagttgctgtggtcgccactgatttatcatctccagtgtcatcaatctcattagccatacctgcccagtctcaacacgaggtcagtttggcaattggaagagtatctgggtcactagaaatatggatatggaatgcatctagcaacaaaattgagattttcagtgcatggcatgcacatgatcaagtggtaacaggtttacaatgggctatggatggctattgtttattcagctgcagtcaggacaattctgcacgttgttggatctctcacgaaaaccaccttgaagaaatttttatgcattcaaattttccagagctaagggagtcagcagacctatcagaactctctgatcgatgctatggtcttacactagcacctggagaacagatgattgctgtggtccgcagtttggatctgaaccttctgaaccagatgtatcaagtcaggacacaaaaggcggtggttgagttcatttggattggtggccaatttgttggtattccactagacaggagcattgatatttgcagttcacagtccacagacttatcctcaagtaatctcatgtggtggggatccaacattttgtggtcgctgaagaaatacgaaaatgtagaaaagaggcttgtgatatgggatgttgtagctgtgctgcaggagttgaagaaatccgcacctgcctttctggagactctagtgcatagttgggtctcagtgttactttcgggcgacccccagtgtgtttctatcgatgctccatcacgttcaatgcatgacatgatgccctatgtcagcacgcggaagctacacttactgaacataatgtgcagaaaagtaatggtcagcattcacacacatcatggtcctggtgctgaaaacggcaatgaggaaacaactgatttctggagcactcttttggtgaggagcgaaacagagctgcgagagaggctggttggcttcacctttgctgcagtcctgaaacggacagcgtatttgttcaatggtacctctactgaaaattgctggtttcctgttggggttgcccagatggattcttgggtaaccatgaattacgacggacaagtgcatgaccagctgcagtctatcagatcaaagatcaaagatttaggaagcaggatcgacggatactctgacgtagaaagctgcccctactgctcttcgccggtccatttcgagtcgcctgacgtagccatctgtggggaaaggcacacactgccgcggtgcagggcgtccatgatcctgtgctccgttgtgcagcctttgtggcactgcgtgtgctgcggaggcacggtcaacaagctgttgccggagtcgttcttcaccatgcaggcgtccaccatgcatgatgaaggatcgctcgatctgtcagcagcctccgtcccactttgccccttctgtggcatcctcctgcagaggtcgatgccggcgttcctgctctccacctcgccggcatagaggctctctgtggatgctagtaggcatccaccaggtgtagcatgcagtagcaatgtagtactagtaaagtttgttctagtcgatgctgcttacactcagttactcttaccaagtatggctggcagagtgtcggttactggtcattttttaggtcccttttgaatgaatacgatgagttcttttgtttggtttcttttggaccctgacggtggcagattaccaggccaagttcagctatctcgaattgtctcattcgattgttgcggacatgcagttctggcagttccaattggttgttgcggacatgcagtcctgtcagttgactcagttccaagtgtacgtattttgcttcgaggctttcccagagcagagcacgtgtcgatggatgtagcggccggagaacgtgaacgaggcaaaacaac

SEQ ID NO: 11632 - DNA, 3795 bp, Zea Mays
aagcagtcgagcagggcagctcccatctgacggagttctatcttaattgtactgctagatatgcttggacattagtgccatggctcctcaataccaagctgcgaccttgattgcctctccatcttatccaagtgccattgcttggtcaagcgacaatcttgtggctgttgcatctggtcatattgtaactattctgaatccatctgcgcttgatggaccccgtggattggttggactttgtcgcagtgacccttttcctataggactggttaatagagaagatctcttggagccatgtttattgtccacttccttagcgcgtgagactgaaccatgtgcccgatcgatttcatggtctcaacaaggatttgcacctaactctgggtgtttgctggctgtttgcactatggatggtcatgtgaagctttacaggtcaccaatttgggagctatgtgatgaatgggttgagaagaatacaaatactggggagacagaggttttaggatctgcttatgaattgcaagaatctctttatttcaggtgtcctggacagagaaaactaaagcgatcaagagttgatggttttatttatgacgtcaatgaagttgatttagatgcatcaaaggatgcagacttctcgatcgaaccatgttctaaatcaaagaagaaatatttgaaaaaggtagagatttttacacatttatgctgaagttttggtttattcttttaatttgtaataaaagggaaacttcgttgtttcataacgaaaaggaagaacgcgaaaggacttctagctgagttggttagatggtctgagtagcactcctcaggtcctgagttcgactccccataggagcgaattttaggttgtggctaaaaaaccccccttgtttgtcctacgccaaagcacaagtctaagccccccagttgcggtcgttctcacatgggctacggtaccactgtgtatgcgtgaggcagaggttcgagagttttctcgacctgcatgagaaagtcttctttttaatataatgtccagggttgtcttacccctgcaggtcaagtttcttttaataaaagaaagaaccaattatttcctctgtttttaaatgacaccgttgactttttaaatccatttggcttttggagtattagtctttccaaaatatttgtgctaatagacagacatacaaggcatgcttaaagtactttgaatgacatatctagtgacactcttctcactttccttagctactaagtaattgaataaatattgctggtcgaagtctgagaaaaaaattgtgtttaaaacagagggagtatcatgctaaaggtgtttcatagcatagtaatgactgttttgtgttttctatttaacattactgtgtttgtgattccagactgtaaaacccaggcatgaagtagttgctgtaaatgaacgaaacaacacaggaaatattaaaggatcattgtcctccaatggagaaaacaaatcccttcctcttatcacggcaaaacagtatgcttgtcgtgctgcacatttgtcttcccttgtagtttcatggtctccagttgtgtcatcaagtgataaaacatcttgtttattgaggcattggtgcattattgctgttggctctaaatccggaaatctttctttttggaaactacctaagccagaatattacacaatagatgctggcgtggttaccagtgatccaatgctcatcggggttttgcaagctcacaaatcatgtgtcagtgtcatagcttggcaagttctttctgcgggctcttcaaaatcctcgttgcttttagctactggatgctcagatggaagtgttaagatatggttagggaatattgaagggttaaatcaatgtgcaagtggagaagtgccatttgcgttagttgctgtggtcgccactgatttatcatctccagtgtcatcaatctcattagccatacctgcccagtctcaacacgaggtcagtttggcaattggaagagtatctgggtcactagaaatatggatatggaatgcatctagcaacaaaattgagattttcagtgcatggcatgcacatgatcaagtggtttacaatgggctatggatggctattgtttattcagctgcagtcaggacaattctgcacgttgttggatctctcacgaaaaccaccttgaagaaatttttatgcattcaaattttccagagctaagggagtcagcagacctatcagaactctctgatcgatgctatggtcttacactagcacctggagaacagatgattgctgtggtccgcagtttggatctgaaccttctgaaccagatgtatcaagtcaggacacaaaaggcggtggttgagttcatttggattggtggccaatttgttggtattccactagacaggagcattgatatttgcagttcacagtccacagacttatcctcaagtaatctcatgtggtggggatccaacattttgtggtcgctgaagaaatacgaaaatgtagaaaagaggcttgtgatatgggatgttgtagctgtgctgcaggagttgaagaaatccgcacctgcctttctggagactctagtgcatagttgggtctcagtgttactttcgggcgacccccagtgtgtttctatcgatgctccatcacgttcaatgcatgacatgatgccctatgtcagcacgcggaagctacacttactgaacataatgtgcagaaaagtaatggtcagcattcacacacatcatggtcctggtgctgaaaacggcaatgaggaaacaactgatttctggagcactcttttggtgaggagcgaaacagagctgcgagagaggctggttggcttcacctttgctgcagtcctgaaacggacagcgtatttgttcaatggtacctctactgaaaattgctggtttcctgttggggttgcccagatggattcttgggtaaccatgaattacgacggacaagtgcatgaccagctgcagtctatcagatcaaagatcaaagatttaggaagcaggatcgacggatactctgacgtagaaagctgcccctactgctcttcgccggtccatttcgagtcgcctgacgtagccatctgtggggaaaggcacacactgccgcggtgcagggcgtccatgatcctgtgctccgttgtgcagcctttgtggcactgcgtgtgctgcggaggcacggtcaacaagctgttgccggagtcgttcttcaccatgcaggcgtccaccatgcatgatgaaggatcgctcgatctgtcagcagcctccgtcccactttgccccttctgtggcatcctcctgcagaggtcgatgccggcgttcctgctctccacctcgccggcatagaggctctctgtggatgctagtaggcatccaccaggtgtagcatgcagtagcaatgtagtactagtaaagtttgttctagtcgatgctgcttacactcagttactcttaccaagtatggctggcagagtgtcggttactggtcattttttaggtcccttttgaatgaatacgatgagttcttttgtttggtttcttttggaccctgacggtggcagattaccaggccaagttcagctatctcgaattgtctcattcgattgttgcggacatgcagttctggcagttccaattggttgttgcggacatgcagtcctgtcagttgactcagttccaagtgtacgtattttgcttcgaggctttcccagagcagagcacgtgtcgatggatgtagcggccggagaacgtgaacgaggcaaaacaac

SEQ ID NO: 11633 - DNA, 2786 bp, Zea Mays
aagcagtcgagcagggcagctcccatctgacggagttctatcttaattgtactgctagatatgcttggacattagtgccatggctcctcaataccaagctgcgaccttgattgcctctccatcttatccaagtgccattgcttggtcaagcgacaatcttgtggctgttgcatctggtcatattgtaactattctgaatccatctgcgcttgatggaccccgtggattggttggactttgtcgcagtgacccttttcctataggactggttaatagagaagatctcttggagccatgtttattgtccacttccttagcgcgtgagactgaaccatgtgcccgatcgatttcatggtctcaacaaggatttgcacctaactctgggtgtttgctggctgtttgcactatggatggtcatgtgaagctttacaggtcaccaatttgggagctatgtgatgaatgggttgaggtcgcagatatatcacagttgctgtttaactactataaacttataaactttggagaggataatggttctcatttgacttctctgaatacaaatactggggagacagaggttttaggatctgcttatgaattgcaagaatctctttatttcaggtgtcctggacagagaaaactaaagcgatcaagccagaatattacacaatagatgctggcgtggttaccagtgatccaatgctcatcggggttttgcaagctcacaaatcatgtgtcagtgtcatagcttggcaagttctttctgcgggctcttcaaaatcctcgttgcttttagctactggatgctcagatggaagtgttaagatatggttagggaatattgaagggttaaatcaatgtgcaagtggagaagtgccatttgcgttagttgctgtggtcgccactgatttatcatctccagtgtcatcaatctcattagccatacctgcccagtctcaacacgaggtcagtttggcaattggaagagtatctgggtcactagaaatatggatatggaatgcatctagcaacaaaattgagattttcagtgcatggcatgcacatgatcaagtggtaacaggtttacaatgggctatggatggctattgtttattcagctgcagtcaggacaattctgcacgttgttggatctctcacgaaaaccaccttgaagaaatttttatgcattcaaattttccagagctaagggagtcagcagacctatcagaactctctgatcgatgctatggtcttacactagcacctggagaacagatgattgctgtggtccgcagtttggatctgaaccttctgaaccagatgtatcaagtcaggacacaaaaggcggtggttgagttcatttggattggtggccaatttgttggtattccactagacaggagcattgatatttgcagttcacagtccacagacttatcctcaagtaatctcatgtggtggggatccaacattttgtggtcgctgaagaaatacgaaaatgtagaaaagaggcttgtgatatgggatgttgtagctgtgctgcaggagttgaagaaatccgcacctgcctttctggagactctagtgcatagttgggtctcagtgttactttcgggcgacccccagtgtgtttctatcgatgctccatcacgttcaatgcatgacatgatgccctatgtcagcacgcggaagctacacttactgaacataatgtgcagaaaagtaatggtcagcattcacacacatcatggtcctggtgctgaaaacggcaatgaggaaacaactgatttctggagcactcttttggtgaggagcgaaacagagctgcgagagaggctggttggcttcacctttgctgcagtcctgaaacggacagcgtatttgttcaatggtacctctactgaaaattgctggtttcctgttggggttgcccagatggattcttgggtaaccatgaattacgacggacaagtgcatgaccagctgcagtctatcagatcaaagatcaaagatttaggaagcaggatcgacggatactctgacgtagaaagctgcccctactgctcttcgccggtccatttcgagtcgcctgacgtagccatctgtggggaaaggcacacactgccgcggtgcagggcgtccatgatcctgtgctccgttgtgcagcctttgtggcactgcgtgtgctgcggaggcacggtcaacaagctgttgccggagtcgttcttcaccatgcaggcgtccaccatgcatgatgaaggatcgctcgatctgtcagcagcctccgtcccactttgccccttctgtggcatcctcctgcagaggtcgatgccggcgttcctgctctccacctcgccggcatagaggctctctgtggatgctagtaggcatccaccaggtgtagcatgcagtagcaatgtagtactagtaaagtttgttctagtcgatgctgcttacactcagttactcttaccaagtatggctggcagagtgtcggttactggtcattttttaggtcccttttgaatgaatacgatgagttcttttgtttggtttcttttggaccctgacggtggcagattaccaggccaagttcagctatctcgaattgtctcattcgattgttgcggacatgcagttctggcagttccaattggttgttgcggacatgcagtcctgtcagttgactcagttccaagtgtacgtattttgcttcgaggctttcccagagcagagcacgtgtcgatggatgtagcggccggagaacgtgaacgaggcaaaacaac

SEQ ID NO: 11634 - DNA, 3162 bp, Zea Mays
agtaaaagcagtcgagcagggcagctcccatctgacggagttctatcttaattgtactgctagatatgcttggacattagtgccatggctcctcaataccaagctgcgaccttgattgcctctccatcttatccaagtgccattgcttggtcaagcgacaatcttgtggctgttgcatctggtcatattgtaactattctgaatccatctgcgcttgatggaccccgtggattggttggactttgtcgcagtgacccttttcctataggactggttaatagagaagatctcttggagccatgtttattgtccacttccttagcgcgtgagactgaaccatgtgcccgatcgatttcatggtctcaacaaggatttgcacctaactctgggtgtttgctggctgtttgcactatggatggtcatgtgaagctttacaggtcaccaatttgggagctatgtgatgaatgggttgagatatatcacagttgctgtttaactactataaacttataaactttggagaggataatggttctcatttgacttctctgaagaatacaaatactggggagacagaggttttaggatctgcttatgaattgcaagaatctctttatttcaggtgtcctggacagagaaaactaaagcgatcaagagttgatggttttatttatgacgtcaatgaagttgatttagatgcatcaaaggatgcagacttctcgatcgaaccatgttctaaatcaaagaagaaatatttgaaaaagactgtaaaacccaggcatgaagtagttgctgtaaatgaacgaaacaacacaggaaatattaaaggatcattgtcctccaatggagaaaacaaatcccttcctcttatcacggcaaaacagtatgcttgtcgtgctgcacatttgtcttcccttgtagtttcatggtctccagttgtgtcatcaagtgataaaacatcttgtttattgaggcattggtgcattattgctgttggctctaaatccggaaatctttctttttggaaactacctaagccagaatattacacaatagatgctggcgtggttaccagtgatccaatgctcatcggggttttgcaagctcacaaatcatgtgtcagtgtcatagcttggcaagttctttctgcgggctcttcaaaatcctcgttgcttttagctactggatgctcagatggaagtgttaagatatggttagggaatattgaagggttaaatcaatgtgcaagtggagaagtgccatttgcgttagttgctgtggtcgccactgatttatcatctccagtgtcatcaatctcattagccatacctgcccagtctcaacacgaggtcagtttggcaattggaagagtatctgggtcactagaaatatggatatggaatgcatctagcaacaaaattgagattttcagtgcatggcatgcacatgatcaagtggtttacaatgggctatggatggctattgtttattcagctgcagtcaggacaattctgcacgttgttggatctctcacgaaaaccaccttgaagaaatttttatgcattcaaattttccagagctaagggagtcagcagacctatcagaactctctgatcgatgctatggtcttacactagcacctggagaacagatgattgctgtggtccgcagtttggatctgaaccttctgaaccagatgtatcaagtcaggacacaaaaggcggtggttgagttcatttggattggtggccaatttgttggtattccactagacaggagcattgatatttgcagttcacagtccacagacttatcctcaagtaatctcatgtggtggggatccaacattttgtggtcgctgaagaaatacgaaaatgtagaaaagaggcttgtgatatgggatgttgtagctgtgctgcaggagttgaagaaatccgcacctgcctttctggagactctagtgcatagttgggtctcagtgttactttcgggcgacccccagtgtgtttctatcgatgctccatcacgttcaatgcatgacatgatgccctatgtcagcacgcggaagctacacttactgaacataatgtgcagaaaagtaatggtcagcattcacacacatcatggtcctggtgctgaaaacggcaatgaggaaacaactgatttctggagcactcttttggtgaggagcgaaacagagctgcgagagaggctggttggcttcacctttgctgcagtcctgaaacggacagcgtatttgttcaatggtacctctactgaaaattgctggtttcctgttggggttgcccagatggattcttgggtaaccatgaattacgacggacaagtgcatgaccagctgcagtctatcagatcaaagatcaaagatttaggaagcaggatcgacggatactctgacgtagaaagctgcccctactgctcttcgccggtccatttcgagtcgcctgacgtagccatctgtggggaaaggcacacactgccgcggtgcagggcgtccatgatcctgtgctccgttgtgcagcctttgtggcactgcgtgtgctgcggaggcacggtcaacaagctgttgccggagtcgttcttcaccatgcaggcgtccaccatgcatgatgaaggatcgctcgatctgtcagcagcctccgtcccactttgccccttctgtggcatcctcctgcagaggtcgatgccggcgttcctgctctccacctcgccggcatagaggctctctgtggatgctagtaggcatccaccaggtgtagcatgcagtagcaatgtagtactagtaaagtttgttctagtcgatgctgcttacactcagttactcttaccaagtatggctggcagagtgtcggttactggtcattttttaggtcccttttgaatgaatacgatgagttcttttgtttggtttcttttggaccctgacggtggcagattaccaggccaagttcagctatctcgaattgtctcattcgattgttgcggacatgcagttctggcagttccaattggttgttgcggacatgcagtcctgtcagttgactcagttccaagtgtacgtattttgcttcgaggctttcccagagcagagcacgtgtcgatggatgtagcggccggagaacgtgaacgaggcaaaacaac

SEQ ID NO: 11635 - DNA, 2917 bp, Zea Mays
atagacgcccgactcctgagtaaaagcagtcgagcagggcagctcccatctgacggagttctatcttaattgtactgctagatatgcttggacattagtgccatggctcctcaataccaagctgcgaccttgattgcctctccatcttatccaagtgccattgcttggtcaagcgacaatcttgtggctgttgcatctggtcatattgtaactattctgaatccatctgcgcttgatggaccccgtggattggttggactttgtcgcagtgacccttttcctataggactggttaatagagaagatctcttggagccatgtttattgtccacttccttagcgcgtgagactgaaccatgtgcccgatcgatttcatggtctcaacaaggatttgcacctaactctgggtgtttgctggctgtttgcactatggatggtcatgtgaagctttacaggtcaccaatttgggagctatgtgatgaatgggttgaggtcgcagatatatcacagttgctgtttaactactataaacttataaactttggagaggataatggttctcatttgacttctctgaatacaaatactggggagacagaggttttaggatctgcttatgaattgcaagaatctctttatttcaggtgtcctggacagagaaaactaaagcgatcaagactgtaaaacccaggcatgaagtagttgctgtaaatgaacgaaacaacacaggaaatattaaaggatcattgtcctccaatggagaaaacaaatcccttcctcttatcacggcaaaacaaatattacacaatagatgctggcgtggttaccagtgatccaatgctcatcggggttttgcaagctcacaaatcatgtgtcagtgtcatagcttggcaagttctttctgcgggctcttcaaaatcctcgttgcttttagctactggatgctcagatggaagtgttaagatatggttagggaatattgaagggttaaatcaatgtgcaagtggagaagtgccatttgcgttagttgctgtggtcgccactgatttatcatctccagtgtcatcaatctcattagccatacctgcccagtctcaacacgaggtcagtttggcaattggaagagtatctgggtcactagaaatatggatatggaatgcatctagcaacaaaattgagattttcagtgcatggcatgcacatgatcaagtggtttacaatgggctatggatggctattgtttattcagctgcagtcaggacaattctgcacgttgttggatctctcacgaaaaccaccttgaagaaatttttatgcattcaaattttccagagctaagggagtcagcagacctatcagaactctctgatcgatgctatggtcttacactagcacctggagaacagatgattgctgtggtccgcagtttggatctgaaccttctgaaccagatgtatcaagtcaggacacaaaaggcggtggttgagttcatttggattggtggccaatttgttggtattccactagacaggagcattgatatttgcagttcacagtccacagacttatcctcaagtaatctcatgtggtggggatccaacattttgtggtcgctgaagaaatacgaaaatgtagaaaagaggcttgtgatatgggatgttgtagctgtgctgcaggagttgaagaaatccgcacctgcctttctggagactctagtgcatagttgggtctcagtgttactttcgggcgacccccagtgtgtttctatcgatgctccatcacgttcaatgcatgacatgatgccctatgtcagcacgcggaagctacacttactgaacataatgtgcagaaaagtaatggtcagcattcacacacatcatggtcctggtgctgaaaacggcaatgaggaaacaactgatttctggagcactcttttggtgaggagcgaaacagagctgcgagagaggctggttggcttcacctttgctgcagtcctgaaacggacagcgtatttgttcaatggtacctctactgaaaattgctggtttcctgttggggttgcccagatggattcttgggtaaccatgaattacgacggacaagtgcatgaccagctgcagtctatcagatcaaagatcaaagatttaggaagcaggatcgacggatactctgacgtagaaagctgcccctactgctcttcgccggtccatttcgagtcgcctgacgtagccatctgtggggaaaggcacacactgccgcggtgcagggcgtccatgatcctgtgctccgttgtgcagcctttgtggcactgcgtgtgctgcggaggcacggtcaacaagctgttgccggagtcgttcttcaccatgcaggcgtccaccatgcatgatgaaggatcgctcgatctgtcagcagcctccgtcccactttgccccttctgtggcatcctcctgcagaggtcgatgccggcgttcctgctctccacctcgccggcatagaggctctctgtggatgctagtaggcatccaccaggtgtagcatgcagtagcaatgtagtactagtaaagtttgttctagtcgatgctgcttacactcagttactcttaccaagtatggctggcagagtgtcggttactggtcattttttaggtcccttttgaatgaatacgatgagttcttttgtttggtttcttttggaccctgacggtggcagattaccaggccaagttcagctatctcgaattgtctcattcgattgttgcggacatgcagttctggcagttccaattggttgttgcggacatgcagtcctgtcagttgactcagttccaagtgtacgtattttgcttcgaggctttcccagagcagagcacgtgtcgatggatgtagcggccggagaacgtgaacgaggcaaaacaac

SEQ ID NO: 11636 - DNA, 3218 bp, Zea Mays
ccacctgcttgcccaggcacggcggcacggccgcatagacgcccgactcctgagtaaaagcagtcgagcagggcagctcccatctgacggagttctatcttaattgtactgctagatatgcttggacattagtgccatggctcctcaataccaagctgcgaccttgattgcctctccatcttatccaagtgccattgcttggtcaagcgacaatcttgtggctgttgcatctggtcatattgtaactattctgaatccatctgcgcttgatggaccccgtggattggttggactttgtcgcagtgacccttttcctataggactggttaatagagaagatctcttggagccatgtttattgtccacttccttagcgcgtgagactgaaccatgtgcccgatcgatttcatggtctcaacaaggatttgcacctaactctgggtgtttgctggctgtttgcactatggatggtcatgtgaagctttacaggtcaccaatttgggagctatgtgatgaatgggttgaggtcgcagatatatcacagttgctgtttaactactataaacttataaactttggagaggataatggttctcatttgacttctctgaatacaaatactggggagacagaggttttaggatctgcttatgaattgcaagaatctctttatttcaggtgtcctggacagagaaaactaaagcgatcaagagttgatggttttatttatgacgtcaatgaagttgatttagatgcatcaaaggatgcagacttctcgatcgaaccatgttctaaatcaaagaagaaatatttgaaaaagactgtaaaacccaggcatgaagtagttgctgtaaatgaacgaaacaacacaggaaatattaaaggatcattgtcctccaatggagaaaacaaatcccttcctcttatcacggcaaaacagtatgcttgtcgtgctgcacatttgtcttcccttgtagtttcatggtctccagttgtgtcatcaagtgataaaacatcttgtttattgaggcattggtgcattattgctgttggctctaaatccggaaatctttctttttggaaactacctaagccagaatattacacaatagatgctggcgtggttaccagtgatccaatgctcatcggggttttgcaagctcacaaatcatgtgtcagtgtcatagcttggcaagttctttctgcgggctcttcaaaatcctcgttgcttttagctactggatgctcagatggaagtgttaagatatggttagggaatattgaagggttaaatcaatgtgcaagtggagaagtgccatttgcgttagttgctgtggtcgccactgatttatcatctccagtgtcatcaatctcattagccatacctgcccagtctcaacacgaggtcagtttggcaattggaagagtatctgggtcactagaaatatggatatggaatgcatctagcaacaaaattgagattttcagtgcatggcatgcacatgatcaagtggtttacaatgggctatggatggctattgtttattcagctgcagtcaggacaattctgcacgttgttggatctctcacgaaaaccaccttgaagaaatttttatgcattcaaattttccagagctaagggagtcagcagacctatcagaactctctgatcgatgctatggtcttacactagcacctggagaacagatgattgctgtggtccgcagtttggatctgaaccttctgaaccagatgtatcaagtcaggacacaaaaggcggtggttgagttcatttggattggtggccaatttgttggtattccactagacaggagcattgatatttgcagttcacagtccacagacttatcctcaagtaatctcatgtggtggggatccaacattttgtggtcgctgaagaaatacgaaaatgtagaaaagaggcttgtgatatgggatgttgtagctgtgctgcaggagttgaagaaatccgcacctgcctttctggagactctagtgcatagttgggtctcagtgttactttcgggcgacccccagtgtgtttctatcgatgctccatcacgttcaatgcatgacatgatgccctatgtcagcacgcggaagctacacttactgaacataatgtgcagaaaagtaatggtcagcattcacacacatcatggtcctggtgctgaaaacggcaatgaggaaacaactgatttctggagcactcttttggtgaggagcgaaacagagctgcgagagaggctggttggcttcacctttgctgcagtcctgaaacggacagcgtatttgttcaatggtacctctactgaaaattgctggtttcctgttggggttgcccagatggattcttgggtaaccatgaattacgacggacaagtgcatgaccagctgcagtctatcagatcaaagatcaaagatttaggaagcaggatcgacggatactctgacgtagaaagctgcccctactgctcttcgccggtccatttcgagtcgcctgacgtagccatctgtggggaaaggcacacactgccgcggtgcagggcgtccatgatcctgtgctccgttgtgcagcctttgtggcactgcgtgtgctgcggaggcacggtcaacaagctgttgccggagtcgttcttcaccatgcaggcgtccaccatgcatgatgaaggatcgctcgatctgtcagcagcctccgtcccactttgccccttctgtggcatcctcctgcagaggtcgatgccggcgttcctgctctccacctcgccggcatagaggctctctgtggatgctagtaggcatccaccaggtgtagcatgcagtagcaatgtagtactagtaaagtttgttctagtcgatgctgcttacactcagttactcttaccaagtatggctggcagagtgtcggttactggtcattttttaggtcccttttgaatgaatacgatgagttcttttgtttggtttcttttggaccctgacggtggcagattaccaggccaagttcagctatctcgaattgtctcattcgattgttgcggacatgcagttctggcagttccaattggttgttgcggacatgcagtcctgtcagttgactcagttccaagtgtacgtattttgcttcgaggctttcccagagcagagcacgtgtcgatggatgtagcggccggagaacgtgaacgaggcaaaacaac

SEQ ID NO: 11637 - DNA, 3145 bp, Zea Mays
cgccacctgcttgcccaggcacggcggcacggccgcatagacgcccgactcctgagtaaaagcagtcgagcagggcagctcccatctgacggagttctatcttaattgtactgctagatatgcttggacattagtgccatggctcctcaataccaagctgcgaccttgattgcctctccatcttatccaagtgccattgcttggtcaagcgacaatcttgtggctgttgcatctggtcatattgtaactattctgatctcttggagccatgtttattgtccacttccttagcgcgtgagactgaaccatgtgcccgatcgatttcatggtctcaacaaggatttgcacctaactctgggtgtttgctggctgtttgcactatggatggtcatgtgaagctttacaggtcaccaatttgggagctatgtgatgaatgggttgaggtcgcagatatatcacagttgctgtttaactactataaacttataaactttggagaggataatggttctcatttgacttctctgaagaatacaaatactggggagacagaggttttaggatctgcttatgaattgcaagaatctctttatttcaggtgtcctggacagagaaaactaaagcgatcaagagttgatggttttatttatgacgtcaatgaagttgatttagatgcatcaaaggatgcagacttctcgatcgaaccatgttctaaatcaaagaagaaatatttgaaaaagactgtaaaacccaggcatgaagtagttgctgtaaatgaacgaaacaacacaggaaatattaaaggatcattgtcctccaatggagaaaacaaatcccttcctcttatcacggcaaaacagtatgcttgtcgtgctgcacatttgtcttcccttgtagtttcatggtctccagttgtgtcatcaagtgataaaacatcttgtttattgaggcattggtgcattattgctgttggctctaaatccggaaatctttctttttggaaactacctaagccagaatattacacaatagatgctggcgtggttaccagtgatccaatgctcatcggggttttgcaagctcacaaatcatgtgtcagtgtcatagcttggcaagttctttctgcgggctcttcaaaatcctcgttgcttttagctactggatgctcagatggaagtgttaagatatggttagggaatattgaagggttaaatcaatgtgcaagtggagaagtgccatttgcgttagttgctgtggtcgccactgatttatcatctccagtgtcatcaatctcattagccatacctgcccagtctcaacacgaggtcagtttggcaattggaagagtatctgggtcactagaaatatggatatggaatgcatctagcaacaaaattgagattttcagtgcatggcatgcacatgatcaagtggtaacaggtttacaatgggctatggatggctattgtttattcagctgcagtcaggacaattctgcacgttgttggatctctcacgaaaaccaccttgaagaaatttttatgcattcaaattttccagagctaagggagtcagcagacctatcagaactctctgatcgatgctatggtcttacactagcacctggagaacagatgattgctgtggtccgcagtttggatctgaaccttctgaaccagatgtatcaagtcaggacacaaaaggcggtggttgagttcatttggattggtggccaatttgttggtattccactagacaggagcattgatatttgcagttcacagtccacagacttatcctcaagtaatctcatgtggtggggatccaacattttgtggtcgctgaagaaatacgaaaatgtagaaaagaggcttgtgatatgggatgttgtagctgtgctgcaggagttgaagaaatccgcacctgcctttctggagactctagtgcatagttgggtctcagtgttactttcgggcgacccccagtgtgtttctatcgatgctccatcacgttcaatgcatgacatgatgccctatgtcagcacgcggaagctacacttactgaacataatgtgcagaaaagtaatggtcagcattcacacacatcatggtcctggtgctgaaaacggcaatgaggaaacaactgatttctggagcactcttttggtgaggagcgaaacagagctgcgagagaggctggttggcttcacctttgctgcagtcctgaaacggacagcgtatttgttcaatggtacctctactgaaaattgctggtttcctgttggggttgcccagatggattcttgggtaaccatgaattacgacggacaagtgcatgaccagctgcagtctatcagatcaaagatcaaagatttaggaagcaggatcgacggatactctgacgtagaaagctgcccctactgctcttcgccggtccatttcgagtcgcctgacgtagccatctgtggggaaaggcacacactgccgcggtgcagggcgtccatgatcctgtgctccgttgtgcagcctttgtggcactgcgtgtgctgcggaggcacggtcaacaagctgttgccggagtcgttcttcaccatgcaggcgtccaccatgcatgatgaaggatcgctcgatctgtcagcagcctccgtcccactttgccccttctgtggcatcctcctgcagaggtcgatgccggcgttcctgctctccacctcgccggcatagaggctctctgtggatgctagtaggcatccaccaggtgtagcatgcagtagcaatgtagtactagtaaagtttgttctagtcgatgctgcttacactcagttactcttaccaagtatggctggcagagtgtcggttactggtcattttttaggtcccttttgaatgaatacgatgagttcttttgtttggtttcttttggaccctgacggtggcagattaccaggccaagttcagctatctcgaattgtctcattcgattgttgcggacatgcagttctggcagttccaattggttgttgcggacatgcagtcctgtcagttgactcagttccaagtgtacgtattttgcttcgaggctttcccagagcagagcacgtgtcgatggatgtagcggccggagaacgtgaacgaggcaaaacaac

SEQ ID NO: 11638 - DNA, 2948 bp, Zea Mays
ggccgctgtccgccacctgcttgcccaggcacggcggcacggccgcatagacgcccgactcctgagtaaaagcagtcgagcagggcagctcccatctgacggagttctatcttaattgtactgctagatatgcttggacattagtgccatggctcctcaataccaagctgcgaccttgattgcctctccatcttatccaagtgccattgcttggtcaagcgacaatcttgtggctgttgcatctggtcatattgtaactattctgaatccatctgcgcttgatggaccccgtggattggttggactttgtcgcagtgacccttttcctataggactggttaatagagaagatctcttggagccatgtttattgtccacttccttagcgcgtgagactgaaccatgtgcccgatcgatttcatggtctcaacaaggatttgcacctaactctgggtgtttgctggctgtttgcactatggatggtcatgtgaagctttacaggtcaccaatttgggagctatgtgatgaatgggttgaggtcgcagatatatcacagttgctgtttaactactataaacttataaactttggagaggataatggttctcatttgacttctctgaagaatacaaatactggggagacagaggttttaggatctgcttatgaattgcaagaatctctttatttcaggtgtcctggacagagaaaactaaagcgatcaagagttgatggttttatttatgacgtcaatgaagttgatttagatgcatcaaaggatgcagacttctcgatcgaaccatgttctaaatcaaagaagaaatatttgaaaaagatgctggcgtggttaccagtgatccaatgctcatcggggttttgcaagctcacaaatcatgtgtcagtgtcatagcttggcaagttctttctgcgggctcttcaaaatcctcgttgcttttagctactggatgctcagatggaagtgttaagatatggttagggaatattgaagggttaaatcaatgtgcaagtggagaagtgccatttgcgttagttgctgtggtcgccactgatttatcatctccagtgtcatcaatctcattagccatacctgcccagtctcaacacgaggtcagtttggcaattggaagagtatctgggtcactagaaatatggatatggaatgcatctagcaacaaaattgagattttcagtgcatggcatgcacatgatcaagtggtaacaggtttacaatgggctatggatggctattgtttattcagctgcagtcaggacaattctgcacgttgttggatctctcacgaaaaccaccttgaagaaatttttatgcattcaaattttccagagctaagggagtcagcagacctatcagaactctctgatcgatgctatggtcttacactagcacctggagaacagatgattgctgtggtccgcagtttggatctgaaccttctgaaccagatgtatcaagtcaggacacaaaaggcggtggttgagttcatttggattggtggccaatttgttggtattccactagacaggagcattgatatttgcagttcacagtccacagacttatcctcaagtaatctcatgtggtggggatccaacattttgtggtcgctgaagaaatacgaaaatgtagaaaagaggcttgtgatatgggatgttgtagctgtgctgcaggagttgaagaaatccgcacctgcctttctggagactctagtgcatagttgggtctcagtgttactttcgggcgacccccagtgtgtttctatcgatgctccatcacgttcaatgcatgacatgatgccctatgtcagcacgcggaagctacacttactgaacataatgtgcagaaaagtaatggtcagcattcacacacatcatggtcctggtgctgaaaacggcaatgaggaaacaactgatttctggagcactcttttggtgaggagcgaaacagagctgcgagagaggctggttggcttcacctttgctgcagtcctgaaacggacagcgtatttgttcaatggtacctctactgaaaattgctggtttcctgttggggttgcccagatggattcttgggtaaccatgaattacgacggacaagtgcatgaccagctgcagtctatcagatcaaagatcaaagatttaggaagcaggatcgacggatactctgacgtagaaagctgcccctactgctcttcgccggtccatttcgagtcgcctgacgtagccatctgtggggaaaggcacacactgccgcggtgcagggcgtccatgatcctgtgctccgttgtgcagcctttgtggcactgcgtgtgctgcggaggcacggtcaacaagctgttgccggagtcgttcttcaccatgcaggcgtccaccatgcatgatgaaggatcgctcgatctgtcagcagcctccgtcccactttgccccttctgtggcatcctcctgcagaggtcgatgccggcgttcctgctctccacctcgccggcatagaggctctctgtggatgctagtaggcatccaccaggtgtagcatgcagtagcaatgtagtactagtaaagtttgttctagtcgatgctgcttacactcagttactcttaccaagtatggctggcagagtgtcggttactggtcattttttaggtcccttttgaatgaatacgatgagttcttttgtttggtttcttttggaccctgacggtggcagattaccaggccaagttcagctatctcgaattgtctcattcgattgttgcggacatgcagttctggcagttccaattggttgttgcggacatgcagtcctgtcagttgactcagttccaagtgtacgtattttgcttcgaggctttcccagagcagagcacgtgtcgatggatgtagcggccggagaacgtgaacgaggcaaaacaac

SEQ ID NO: 11639 - DNA, 3006 bp, Zea Mays
tggccaggccgctgtccgccacctgcttgcccaggcacggcggcacggccgcatagacgcccgactcctgagtaaaagcagtcgagcagggcagctcccatctgacggagttctatcttaattgtactgctagatatgcttggacattagtgccatggctcctcaataccaagctgcgaccttgattgcctctccatcttatccaagtgccattgcttggtcaagcgacaatcttgtggctgttgcatctggtcatattgtaactattctgatctcttggagccatgtttattgtccacttccttagcgcgtgtttgctggctgtttgcactatggatggtcatgtgaagctttacaggtcaccaatttgggagctatgtgatgaatgggttgagaagaatacaaatactggggagacagaggttttaggatctgcttatgaattgcaagaatctctttatttcaggtgtcctggacagagaaaactaaagcgatcaagagttgatggttttatttatgacgtcaatgaagttgatttagatgcatcaaaggatgcagacttctcgatcgaaccatgttctaaatcaaagaagaaatatttgaaaaagactgtaaaacccaggcatgaagtagttgctgtaaatgaacgaaacaacacaggaaatattaaaggatcattgtcctccaatggagaaaacaaatcccttcctcttatcacggcaaaacagtatgcttgtcgtgctgcacatttgtcttcccttgtagtttcatggtctccagttgtgtcatcaagtgataaaacatcttgtttattgaggcattggtgcattattgctgttggctctaaatccggaaatctttctttttggaaactacctaagccagaatattacacaatagatgctggcgtggttaccagtgatccaatgctcatcggggttttgcaagctcacaaatcatgtgtcagtgtcatagcttggcaagttctttctgcgggctcttcaaaatcctcgttgcttttagctactggatgctcagatggaagtgttaagatatggttagggaatattgaagggttaaatcaatgtgcaagtggagaagtgccatttgcgttagttgctgtggtcgccactgatttatcatctccagtgtcatcaatctcattagccatacctgcccagtctcaacacgaggtcagtttggcaattggaagagtatctgggtcactagaaatatggatatggaatgcatctagcaacaaaattgagattttcagtgcatggcatgcacatgatcaagtggtttacaatgggctatggatggctattgtttattcagctgcagtcaggacaattctgcacgttgttggatctctcacgaaaaccaccttgaagaaatttttatgcattcaaattttccagagctaagggagtcagcagacctatcagaactctctgatcgatgctatggtcttacactagcacctggagaacagatgattgctgtggtccgcagtttggatctgaaccttctgaaccagatgtatcaagtcaggacacaaaaggcggtggttgagttcatttggattggtggccaatttgttggtattccactagacaggagcattgatatttgcagttcacagtccacagacttatcctcaagtaatctcatgtggtggggatccaacattttgtggtcgctgaagaaatacgaaaatgtagaaaagaggcttgtgatatgggatgttgtagctgtgctgcaggagttgaagaaatccgcacctgcctttctggagactctagtgcatagttgggtctcagtgttactttcgggcgacccccagtgtgtttctatcgatgctccatcacgttcaatgcatgacatgatgccctatgtcagcacgcggaagctacacttactgaacataatgtgcagaaaagtaatggtcagcattcacacacatcatggtcctggtgctgaaaacggcaatgaggaaacaactgatttctggagcactcttttggtgaggagcgaaacagagctgcgagagaggctggttggcttcacctttgctgcagtcctgaaacggacagcgtatttgttcaatggtacctctactgaaaattgctggtttcctgttggggttgcccagatggattcttgggtaaccatgaattacgacggacaagtgcatgaccagctgcagtctatcagatcaaagatcaaagatttaggaagcaggatcgacggatactctgacgtagaaagctgcccctactgctcttcgccggtccatttcgagtcgcctgacgtagccatctgtggggaaaggcacacactgccgcggtgcagggcgtccatgatcctgtgctccgttgtgcagcctttgtggcactgcgtgtgctgcggaggcacggtcaacaagctgttgccggagtcgttcttcaccatgcaggcgtccaccatgcatgatgaaggatcgctcgatctgtcagcagcctccgtcccactttgccccttctgtggcatcctcctgcagaggtcgatgccggcgttcctgctctccacctcgccggcatagaggctctctgtggatgctagtaggcatccaccaggtgtagcatgcagtagcaatgtagtactagtaaagtttgttctagtcgatgctgcttacactcagttactcttaccaagtatggctggcagagtgtcggttactggtcattttttaggtcccttttgaatgaatacgatgagttcttttgtttggtttcttttggaccctgacggtggcagattaccaggccaagttcagctatctcgaattgtctcattcgattgttgcggacatgcagttctggcagttccaattggttgttgcggacatgcagtcctgtcagttgactcagttccaagtgtacgtattttgcttcgaggctttcccagagcagagcacgtgtcgatggatgtagcggccggagaacgtgaacgaggcaaaacaac

SEQ ID NO: 11640 - DNA, 3175 bp, Zea Mays
gcgaaggcgcctacaccgcttggccaggccgctgtccgccacctgcttgcccaggcacggcggcacggccgcatagacgcccgactcctgagtaaaagcagtcgagcagggcagctcccatctgacggagttctatcttaattgtactgctagatatgcttggacattagtgccatggctcctcaataccaagctgcgaccttgattgcctctccatcttatccaagtgccattgcttggtcaagcgacaatcttgtggctgttgcatctggtcatattgtaactattctgaatccatctgcgcttgatggaccccgtggattggttggactttgtcgcagtgacccttttcctataggactggttaatagagaagatctcttggagccatgtttattgtccacttccttagcgcgtgagactgaaccatgtgcccgatcgatttcatggtctcaacaaggatttgcacctaactctgggtgtttgctggctgtttgcactatggatggtcatgtgaagctttacaggtcaccaatttgggagctatgtgatgaatgggttgagaagaatacaaatactggggagacagaggttttaggatctgcttatgaattgcaagaatctctttatttcaggtgtcctggacagagaaaactaaagcgatcaagagttgatggttttatttatgacgtcaatgaagttgatttagatgcatcaaaggatgcagacttctcgatcgaaccatgttctaaatcaaagaagaaatatttgaaaaagactgtaaaacccaggcatgaagtagttgctgtaaatgaacgaaacaacacaggaaatattaaaggatcattgtcctccaatggagaaaacaaatcccttcctcttatcacggcaaaacagtatgcttgtcgtgctgcacatttgtcttcccttgtagtttcatggtctccagttgtgtcatcaagtgataaaacatcttgtttattgaggcattggtgcattattgctgttggctctaaatccggaaatctttctttttggaaactacctaagccagaatattacacaatagatgctggcgtggttaccagtgatccaatgctcatcggggttttgcaagctcacaaatcatgtgtcagtgtcatagcttggcaagttctttctgcgggctcttcaaaatcctcgttgcttttagctactggatgctcagatggaagtgttaagatatggttagggaatattgaagggttaaatcaatgtgcaagtggagaagtgccatttgcgttagttgctgtggtcgccactgatttatcatctccagtgtcatcaatctcattagccatacctgcccagtctcaacacgaggtcagtttggcaattggaagagtatctgggtcactagaaatatggatatggaatgcatctagcaacaaaattgagattttcagtgcatggcatgcacatgatcaagtggtttacaatgggctatggatggctattgtttattcagctgcagtcaggacaattctgcacgttgttggatctctcacgaaaaccaccttgaagaaatttttatgcattcaaattttccagagctaagggagtcagcagacctatcagaactctctgatcgatgctatggtcttacactagcacctggagaacagatgattgctgtggtccgcagtttggatctgaaccttctgaaccagatgtatcaagtcaggacacaaaaggcggtggttgagttcatttggattggtggccaatttgttggtattccactagacaggagcattgatatttgcagttcacagtccacagacttatcctcaagtaatctcatgtggtggggatccaacattttgtggtcgctgaagaaatacgaaaatgtagaaaagaggcttgtgatatgggatgttgtagctgtgctgcaggagttgaagaaatccgcacctgcctttctggagactctagtgcatagttgggtctcagtgttactttcgggcgacccccagtgtgtttctatcgatgctccatcacgttcaatgcatgacatgatgccctatgtcagcacgcggaagctacacttactgaacataatgtgcagaaaagtaatggtcagcattcacacacatcatggtcctggtgctgaaaacggcaatgaggaaacaactgatttctggagcactcttttggtgaggagcgaaacagagctgcgagagaggctggttggcttcacctttgctgcagtcctgaaacggacagcgtatttgttcaatggtacctctactgaaaattgctggtttcctgttggggttgcccagatggattcttgggtaaccatgaattacgacggacaagtgcatgaccagctgcagtctatcagatcaaagatcaaagatttaggaagcaggatcgacggatactctgacgtagaaagctgcccctactgctcttcgccggtccatttcgagtcgcctgacgtagccatctgtggggaaaggcacacactgccgcggtgcagggcgtccatgatcctgtgctccgttgtgcagcctttgtggcactgcgtgtgctgcggaggcacggtcaacaagctgttgccggagtcgttcttcaccatgcaggcgtccaccatgcatgatgaaggatcgctcgatctgtcagcagcctccgtcccactttgccccttctgtggcatcctcctgcagaggtcgatgccggcgttcctgctctccacctcgccggcatagaggctctctgtggatgctagtaggcatccaccaggtgtagcatgcagtagcaatgtagtactagtaaagtttgttctagtcgatgctgcttacactcagttactcttaccaagtatggctggcagagtgtcggttactggtcattttttaggtcccttttgaatgaatacgatgagttcttttgtttggtttcttttggaccctgacggtggcagattaccaggccaagttcagctatctcgaattgtctcattcgattgttgcggacatgcagttctggcagttccaattggttgttgcggacatgcagtcctgtcagttgactcagttccaagtgtacgtattttgcttcgaggctttcccagagcagagcacgtgtcgatggatgtagcggccggagaacgtgaacgaggcaaaacaac

SEQ ID NO: 11641 - DNA, 3263 bp, Zea Mays
gcgaaggcgcctacaccgcttggccaggccgctgtccgccacctgcttgcccaggcacggcggcacggccgcatagacgcccgactcctgagtaaaagcagtcgagcagggcagctcccatctgacggagttctatcttaattgtactgctagatatgcttggacattagtgccatggctcctcaataccaagctgcgaccttgattgcctctccatcttatccaagtgccattgcttggtcaagcgacaatcttgtggctgttgcatctggtcatattgtaactattctgaatccatctgcgcttgatggaccccgtggattggttggactttgtcgcagtgacccttttcctataggactggttaatagagaagatctcttggagccatgtttattgtccacttccttagcgcgtgagactgaaccatgtgcccgatcgatttcatggtctcaacaaggatttgcacctaactctgggtgtttgctggctgtttgcactatggatggtcatgtgaagctttacaggtcaccaatttgggagctatgtgatgaatgggttgaggtcgcagatatatcacagttgctgtttaactactataaacttataaactttggagaggataatggttctcatttgacttctctgaatacaaatactggggagacagaggttttaggatctgcttatgaattgcaagaatctctttatttcaggtgtcctggacagagaaaactaaagcgatcaagagttgatggttttatttatgacgtcaatgaagttgatttagatgcatcaaaggatgcagacttctcgatcgaaccatgttctaaatcaaagaagaaatatttgaaaaagactgtaaaacccaggcatgaagtagttgctgtaaatgaacgaaacaacacaggaaatattaaaggatcattgtcctccaatggagaaaacaaatcccttcctcttatcacggcaaaacagtatgcttgtcgtgctgcacatttgtcttcccttgtagtttcatggtctccagttgtgtcatcaagtgataaaacatcttgtttattgaggcattggtgcattattgctgttggctctaaatccggaaatctttctttttggaaactacctaagccagaatattacacaatagatgctggcgtggttaccagtgatccaatgctcatcggggttttgcaagctcacaaatcatgtgtcagtgtcatagcttggcaagttctttctgcgggctcttcaaaatcctcgttgcttttagctactggatgctcagatggaagtgttaagatatggttagggaatattgaagggttaaatcaatgtgcaagtggagaagtgccatttgcgttagttgctgtggtcgccactgatttatcatctccagtgtcatcaatctcattagccatacctgcccagtctcaacacgaggtcagtttggcaattggaagagtatctgggtcactagaaatatggatatggaatgcatctagcaacaaaattgagattttcagtgcatggcatgcacatgatcaagtggtaacaggtttacaatgggctatggatggctattgtttattcagctgcagtcaggacaattctgcacgttgttggatctctcacgaaaaccaccttgaagaaatttttatgcattcaaattttccagagctaagggagtcagcagacctatcagaactctctgatcgatgctatggtcttacactagcacctggagaacagatgattgctgtggtccgcagtttggatctgaaccttctgaaccagatgtatcaagtcaggacacaaaaggcggtggttgagttcatttggattggtggccaatttgttggtattccactagacaggagcattgatatttgcagttcacagtccacagacttatcctcaagtaatctcatgtggtggggatccaacattttgtggtcgctgaagaaatacgaaaatgtagaaaagaggcttgtgatatgggatgttgtagctgtgctgcaggagttgaagaaatccgcacctgcctttctggagactctagtgcatagttgggtctcagtgttactttcgggcgacccccagtgtgtttctatcgatgctccatcacgttcaatgcatgacatgatgccctatgtcagcacgcggaagctacacttactgaacataatgtgcagaaaagtaatggtcagcattcacacacatcatggtcctggtgctgaaaacggcaatgaggaaacaactgatttctggagcactcttttggtgaggagcgaaacagagctgcgagagaggctggttggcttcacctttgctgcagtcctgaaacggacagcgtatttgttcaatggtacctctactgaaaattgctggtttcctgttggggttgcccagatggattcttgggtaaccatgaattacgacggacaagtgcatgaccagctgcagtctatcagatcaaagatcaaagatttaggaagcaggatcgacggatactctgacgtagaaagctgcccctactgctcttcgccggtccatttcgagtcgcctgacgtagccatctgtggggaaaggcacacactgccgcggtgcagggcgtccatgatcctgtgctccgttgtgcagcctttgtggcactgcgtgtgctgcggaggcacggtcaacaagctgttgccggagtcgttcttcaccatgcaggcgtccaccatgcatgatgaaggatcgctcgatctgtcagcagcctccgtcccactttgccccttctgtggcatcctcctgcagaggtcgatgccggcgttcctgctctccacctcgccggcatagaggctctctgtggatgctagtaggcatccaccaggtgtagcatgcagtagcaatgtagtactagtaaagtttgttctagtcgatgctgcttacactcagttactcttaccaagtatggctggcagagtgtcggttactggtcattttttaggtcccttttgaatgaatacgatgagttcttttgtttggtttcttttggaccctgacggtggcagattaccaggccaagttcagctatctcgaattgtctcattcgattgttgcggacatgcagttctggcagttccaattggttgttgcggacatgcagtcctgtcagttgactcagttccaagtgtacgtattttgcttcgaggctttcccagagcagagcacgtgtcgatggatgtagcggccggagaacgtgaacgaggcaaaacaac

SEQ ID NO: 11642 - DNA, 3304 bp, Zea Mays
cgcgaaggcgcctacaccgcttggccaggccgctgtccgccacctgcttgcccaggcacggcggcacggccgcatagacgcccgactcctgagtaaaagcagtcgagcagggcagctcccatctgacggagttctatcttaattgtactgctagatatgcttggacattagtgccatggctcctcaataccaagctgcgaccttgattgcctctccatcttatccaagtgccattgcttggtcaagcgacaatcttgtggctgttgcatctggtcatattgtaactattctgaatccatctgcgcttgatggaccccgtggattggttggactttgtcgcagtgacccttttcctataggactggttaatagagaagatctcttggagccatgtttattgtccacttccttagcgcgtgagactgaaccatgtgcccgatcgatttcatggtctcaacaaggatttgcacctaactctggctttacaggtcaccaatttgggagctatgtgatgaatgggttgaggtcgcagatatatcacagttgctgtttaactactataaacttataaactttggagaggataatggttctcatttgacttctctgaagaatacaaatactggggagacagaggttttaggatctgcttatgaattgcaagaatctctttatttcaggtgtcctggacagagaaaactaaagcgatcaagagttgatggttttatttatgacgtcaatgaagttgatttagatgcatcaaaggatgcagacttctcgatcgaaccatgttctaaatcaaagaagaaatatttgaaaaagactgtaaaacccaggcatgaagtagttgctgtaaatgaacgaaacaacacaggaaatattaaaggatcattgtcctccaatggagaaaacaaatcccttcctcttatcacggcaaaacagtatgcttgtcgtgctgcacatttgtcttcccttgtagtttcatggtctccagttgtgtcatcaagtgataaaacatcttgtttattgaggcattggtgcattattgctgttggctctaaatccggaaatctttctttttggaaactacctaagccagaatattacacaatagatgctggcgtggttaccagtgatccaatgctcatcggggttttgcaagctcacaaatcatgtgtcagtgtcatagcttggcaagttctttctgcgggctcttcaaaatcctcgttgcttttagctactggatgctcagatggaagtgttaagatatggttagggaatattgaagggttaaatcaatgtgcaagtggagaagtgccatttgcgttagttgctgtggtcgccactgatttatcatctccagtgtcatcaatctcattagccatacctgcccagtctcaacacgaggtcagtttggcaattggaagagtatctgggtcactagaaatatggatatggaatgcatctagcaacaaaattgagattttcagtgcatggcatgcacatgatcaagtggtttacaatgggctatggatggctattgtttattcagctgcagtcaggacaattctgcacgttgttggatctctcacgaaaaccaccttgaagaaatttttatgcattcaaattttccagagctaagggagtcagcagacgtaaaactagtagatacttaaatgtttgttatccttgatgtccattttctttctcatataattgggttttcaatgtgcatgcagctatcagaactctctgatcgatgctatggtcttacactagcacctggagaacagatgattgctgtggtccgcagtttggatctgaaccttctgaaccagatgtatcaagtcaggacacaaaaggcggtggttgagttcatttggattggtggccaatttgttggtattccactagacaggagcattgatatttgcagttcacagtccacagacttatcctcaagtaatctcatgtggtggggatccaacattttgtggtcgctgaagaaatacgaaaatgtagaaaagaggcttgtgatatgggatgttgtagctgtgctgcaggagttgaagaaatccgcacctgcctttctggagactctagtgcatagttgggtctcagtgttactttcgggcgacccccagtgtgtttctatcgatgctccatcacgttcaatgcatgacatgatgccctatgtcagcacgcggaagctacacttactgaacataatgtgcagaaaagtaatggtcagcattcacacacatcatggtcctggtgctgaaaacggcaatgaggaaacaactgatttctggagcactcttttggtgaggagcgaaacagagctgcgagagaggctggttggcttcacctttgctgcagtcctgaaacggacagcgtatttgttcaatggtacctctactgaaaattgctggtttcctgttggggttgcccagatggattcttgggtaaccatgaattacgacggacaagtgcatgaccagctgcagtctatcagatcaaagatcaaagatttaggaagcaggatcgacggatactctgacgtagaaagctgcccctactgctcttcgccggtccatttcgagtcgcctgacgtagccatctgtggggaaaggcacacactgccgcggtgcagggcgtccatgatcctgtgctccgttgtgcagcctttgtggcactgcgtgtgctgcggaggcacggtcaacaagctgttgccggagtcgttcttcaccatgcaggcgtccaccatgcatgatgaaggatcgctcgatctgtcagcagcctccgtcccactttgccccttctgtggcatcctcctgcagaggtcgatgccggcgttcctgctctccacctcgccggcatagaggctctctgtggatgctagtaggcatccaccaggtgtagcatgcagtagcaatgtagtactagtaaagtttgttctagtcgatgctgcttacactcagttactcttaccaagtatggctggcagagtgtcggttactggtcattttttaggtcccttttgaatgaatacgatgagttcttttgtttggtttcttttggaccctgacggtggcagattaccaggccaagttcagctatctcgaattgtctcattcgattgttgcggacatgcagttctggcagttccaattggttgttgcggacatgcagtcctgtcagttgactcagttccaagtgtacgtattttgcttcgaggctttcccagagcagagcacgtgtcgatggatgtagcggccggagaacgtgaacgaggcaaaacaac

SEQ ID NO: 11643 - DNA, 3220 bp, Zea Mays
gctcgctggtccgatcgaccacgccgtcgcccgcgaaggcgcctacaccgcttggccaggccgctgtccgccacctgcttgcccaggcacggcggcacggccgcatagacgcccgactcctgagtaaaagcagtcgagcagggcagctcccatctgacggagttctatcttaattgtactgctagatatgcttggacattagtgccatggctcctcaataccaagctgcgaccttgattgcctctccatcttatccaagtgccattgcttggtcaagcgacaatcttgtggctgttgcatctggtcatattgtaactattctgaatccatctgcgcttgatggaccccgtggattggttggactttgtcgcagtgacccttttcctataggactggttaatagagaagatctcttggagccatgtttattgtccacttccttagcgcgtgagactgaaccatgtgcccgatcgatttcatggtctcaacaaggatttgcacctaactctgggtgtttgctggctgtttgcactatggatggtcatgtgaagctttacaggtcaccaatttgggagctatgtgatgaatgggttgagatatatcacagttgctgtttaactactataaacttataaactttggagaggataatggttctcatttgacttctctggtgtcctggacagagaaaactaaagcgatcaagagttgatggttttatttatgacgtcaatgaagttgatttagatgcatcaaaggatgcagacttctcgatcgaaccatgttctaaatcaaagaagaaatatttgaaaaagactgtaaaacccaggcatgaagtagttgctgtaaatgaacgaaacaacacaggaaatattaaaggatcattgtcctccaatggagaaaacaaatcccttcctcttatcacggcaaaacagtatgcttgtcgtgctgcacatttgtcttcccttgtagtttcatggtctccagttgtgtcatcaagtgataaaacatcttgtttattgaggcattggtgcattattgctgttggctctaaatccggaaatctttctttttggaaactacctaagccagaatattacacaatagatgctggcgtggttaccagtgatccaatgctcatcggggttttgcaagctcacaaatcatgtgtcagtgtcatagcttggcaagttctttctgcgggctcttcaaaatcctcgttgcttttagctactggatgctcagatggaagtgttaagatatggttagggaatattgaagggttaaatcaatgtgcaagtggagaagtgccatttgcgttagttgctgtggtcgccactgatttatcatctccagtgtcatcaatctcattagccatacctgcccagtctcaacacgaggtcagtttggcaattggaagagtatctgggtcactagaaatatggatatggaatgcatctagcaacaaaattgagattttcagtgcatggcatgcacatgatcaagtggtaacaggtttacaatgggctatggatggctattgtttattcagctgcagtcaggacaattctgcacgttgttggatctctcacgaaaaccaccttgaagaaatttttatgcattcaaattttccagagctaagggagtcagcagacctatcagaactctctgatcgatgctatggtcttacactagcacctggagaacagatgattgctgtggtccgcagtttggatctgaaccttctgaaccagatgtatcaagtcaggacacaaaaggcggtggttgagttcatttggattggtggccaatttgttggtattccactagacaggagcattgatatttgcagttcacagtccacagacttatcctcaagtaatctcatgtggtggggatccaacattttgtggtcgctgaagaaatacgaaaatgtagaaaagaggcttgtgatatgggatgttgtagctgtgctgcaggagttgaagaaatccgcacctgcctttctggagactctagtgcatagttgggtctcagtgttactttcgggcgacccccagtgtgtttctatcgatgctccatcacgttcaatgcatgacatgatgccctatgtcagcacgcggaagctacacttactgaacataatgtgcagaaaagtaatggtcagcattcacacacatcatggtcctggtgctgaaaacggcaatgaggaaacaactgatttctggagcactcttttggtgaggagcgaaacagagctgcgagagaggctggttggcttcacctttgctgcagtcctgaaacggacagcgtatttgttcaatggtacctctactgaaaattgctggtttcctgttggggttgcccagatggattcttgggtaaccatgaattacgacggacaagtgcatgaccagctgcagtctatcagatcaaagatcaaagatttaggaagcaggatcgacggatactctgacgtagaaagctgcccctactgctcttcgccggtccatttcgagtcgcctgacgtagccatctgtggggaaaggcacacactgccgcggtgcagggcgtccatgatcctgtgctccgttgtgcagcctttgtggcactgcgtgtgctgcggaggcacggtcaacaagctgttgccggagtcgttcttcaccatgcaggcgtccaccatgcatgatgaaggatcgctcgatctgtcagcagcctccgtcccactttgccccttctgtggcatcctcctgcagaggtcgatgccggcgttcctgctctccacctcgccggcatagaggctctctgtggatgctagtaggcatccaccaggtgtagcatgcagtagcaatgtagtactagtaaagtttgttctagtcgatgctgcttacactcagttactcttaccaagtatggctggcagagtgtcggttactggtcattttttaggtcccttttgaatgaatacgatgagttcttttgtttggtttcttttggaccctgacggtggcagattaccaggccaagttcagctatctcgaattgtctcattcgattgttgcggacatgcagttctggcagttccaattggttgttgcggacatgcagtcctgtcagttgactcagttccaagtgtacgtattttgcttcgaggctttcccagagcagagcacgtgtcgatggatgtagcggccggagaacgtgaacgaggcaaaacaac

SEQ ID NO: 11644 - DNA, 3420 bp, Zea Mays
cacgctcgctggtccgatcgaccacgccgtcgcccgcgaaggcgcctacaccgcttggccaggccgctgtccgccacctgcttgcccaggcacggcggcacggccgcatagacgcccgactcctgagtaaaagcagtcgagcagggcagctcccatctgacggagttctatcttaattgtactgctagatatgcttggacattagtgccatggctcctcaataccaagctgcgaccttgattgcctctccatcttatccaagtgccattgcttggtcaagcgacaatcttgtggctgttgcatctggtcatattgtaactattctgaatccatctgcgcttgatggaccccgtggattggttggactttgtcgcagtgacccttttcctataggactggttaatagagaagatctcttggagccatgtttattgtccacttccttagcgcgtgagactgaaccatgtgcccgatcgatttcatggtctcaacaaggatttgcacctaactctgggtgtttgctggctgtttgcactatggatggtcatgtgaagctttacaggtcaccaatttgggagctatgtgatgaatgggttgaggtcgcagatatatcacagttgctgtttaactactataaacttataaactttggagaggataatggttctcatttgacttctctgaagaatacaaatactggggagacagaggttttaggatctgcttatgaattgcaagaatctctttatttcaggtgtcctggacagagaaaactaaagcgatcaaggtgaatttcgtttctacttcacatttgccaccgagaaaagtttccacatttgaaataataagatgatctaagggagcaccatttagccatcatgtaggatgtcaagtgctgatatgcaaacactttagttgatggttttatttatgacgtcaatgaagttgatttagatgcatcaaaggatgcagacttctcgatcgaaccatgttctaaatcaaagaagaaatatttgaaaaagactgtaaaacccaggcatgaagtagttgctgtaaatgaacgaaacaacacaggaaatattaaaggatcattgtcctccaatggagaaaacaaatcccttcctcttatcacggcaaaacagtatgcttgtcgtgctgcacatttgtcttcccttgtagtttcatggtctccagttgtgtcatcaagtgataaaacatcttgtttattgaggcattggtgcattattgctgttggctctaaatccggaaatctttctttttggaaactacctaagccagaatattacacaatagatgctggcgtggttaccagtgatccaatgctcatcggggttttgcaagctcacaaatcatgtgtcagtgtcatagcttggcaagttctttctgcgggctcttcaaaatcctcgttgcttttagctactggatgctcagatggaagtgttaagatatggttagggaatattgaagggttaaatcaatgtgcaagtggagaagtgccatttgcgttagttgctgtggtcgccactgatttatcatctccagtgtcatcaatctcattagccatacctgcccagtctcaacacgaggtcagtttggcaattggaagagtatctgggtcactagaaatatggatatggaatgcatctagcaacaaaattgagattttcagtgcatggcatgcacatgatcaagtggtttacaatgggctatggatggctattgtttattcagctgcagtcaggacaattctgcacgttgttggatctctcacgaaaaccaccttgaagaaatttttatgcattcaaattttccagagctaagggagtcagcagacctatcagaactctctgatcgatgctatggtcttacactagcacctggagaacagatgattgctgtggtccgcagtttggatctgaaccttctgaaccagatgtatcaagtcaggacacaaaaggcggtggttgagttcatttggattggtggccaatttgttggtattccactagacaggagcattgatatttgcagttcacagtccacagacttatcctcaagtaatctcatgtggtggggatccaacattttgtggtcgctgaagaaatacgaaaatgtagaaaagaggcttgtgatatgggatgttgtagctgtgctgcaggagttgaagaaatccgcacctgcctttctggagactctagtgcatagttgggtctcagtgttactttcgggcgacccccagtgtgtttctatcgatgctccatcacgttcaatgcatgacatgatgccctatgtcagcacgcggaagctacacttactgaacataatgtgcagaaaagtaatggtcagcattcacacacatcatggtcctggtgctgaaaacggcaatgaggaaacaactgatttctggagcactcttttggtgaggagcgaaacagagctgcgagagaggctggttggcttcacctttgctgcagtcctgaaacggacagcgtatttgttcaatggtacctctactgaaaattgctggtttcctgttggggttgcccagatggattcttgggtaaccatgaattacgacggacaagtgcatgaccagctgcagtctatcagatcaaagatcaaagatttaggaagcaggatcgacggatactctgacgtagaaagctgcccctactgctcttcgccggtccatttcgagtcgcctgacgtagccatctgtggggaaaggcacacactgccgcggtgcagggcgtccatgatcctgtgctccgttgtgcagcctttgtggcactgcgtgtgctgcggaggcacggtcaacaagctgttgccggagtcgttcttcaccatgcaggcgtccaccatgcatgatgaaggatcgctcgatctgtcagcagcctccgtcccactttgccccttctgtggcatcctcctgcagaggtcgatgccggcgttcctgctctccacctcgccggcatagaggctctctgtggatgctagtaggcatccaccaggtgtagcatgcagtagcaatgtagtactagtaaagtttgttctagtcgatgctgcttacactcagttactcttaccaagtatggctggcagagtgtcggttactggtcattttttaggtcccttttgaatgaatacgatgagttcttttgtttggtttcttttggaccctgacggtggcagattaccaggccaagttcagctatctcgaattgtctcattcgattgttgcggacatgcagttctggcagttccaattggttgttgcggacatgcagtcctgtcagttgactcagttccaagtgtacgtattttgcttcgaggctttcccagagcagagcacgtgtcgatggatgtagcggccggagaacgtgaacgaggcaaaacaac

SEQ ID NO: 11645 - DNA, 3274 bp, Zea Mays
caggagcccccaccacgctcgctggtccgatcgaccacgccgtcgcccgcgaaggcgcctacaccgcttggccaggccgctgtccgccacctgcttgcccaggcacggcggcacggccgcatagacgcccgactcctgagtaaaagcagtcgagcagggcagctcccatctgacggagttctatcttaattgtactgctagatatgcttggacattagtgccatggctcctcaataccaagctgcgaccttgattgcctctccatcttatccaagtgccattgcttggtcaagcgacaatcttgtggctgttgcatctggtcatattgtaactattctgaatccatctgcgcttgatggaccccgtggattggttggactttgtcgcagtgacccttttcctataggactggttaatagagaagatctcttggagccatgtttattgtccacttccttagcgcgtgagactgaaccatgtgcccgatcgatttcatggtctcaacaaggatttgcacctaactctggctttacaggtcaccaatttgggagctatgtgatgaatgggttgaggtcgcagatatatcacagttgctgtttaactactataaacttataaactttggagaggataatggttctcatttgacttctctgaagaatacaaatactggggagacagaggttttaggatctgcttatgaattgcaagaatctctttatttcaggtgtcctggacagagaaaactaaagcgatcaagagttgatggttttatttatgacgtcaatgaagttgatttagatgcatcaaaggatgcagacttctcgatcgaaccatgttctaaatcaaagaagaaatatttgaaaaagactgtaaaacccaggcatgaagtagttgctgtaaatgaacgaaacaacacaggaaatattaaaggatcattgtcctccaatggagaaaacaaatcccttcctcttatcacggcaaaacagtatgcttgtcgtgctgcacatttgtcttcccttgtagtttcatggtctccagttgtgtcatcaagtgataaaacatcttgtttattgaggcattggtgcattattgctgttggctctaaatccggaaatctttctttttggaaactacctaagccagaatattacacaatagatgctggcgtggttaccagtgatccaatgctcatcggggttttgcaagctcacaaatcatgtgtcagtgtcatagcttggcaagttctttctgcgggctcttcaaaatcctcgttgcttttagctactggatgctcagatggaagtgttaagatatggttagggaatattgaagggttaaatcaatgtgcaagtggagaagtgccatttgcgttagttgctgtggtcgccactgatttatcatctccagtgtcatcaatctcattagccatacctgcccagtctcaacacgaggtcagtttggcaattggaagagtatctgggtcactagaaatatggatatggaatgcatctagcaacaaaattgagattttcagtgcatggcatgcacatgatcaagtggtaacaggtttacaatgggctatggatggctattgtttattcagctgcagtcaggacaattctgcacgttgttggatctctcacgaaaaccaccttgaagaaatttttatgcattcaaattttccagagctaagggagtcagcagacctatcagaactctctgatcgatgctatggtcttacactagcacctggagaacagatgattgctgtggtccgcagtttggatctgaaccttctgaaccagatgtatcaagtcaggacacaaaaggcggtggttgagttcatttggattggtggccaatttgttggtattccactagacaggagcattgatatttgcagttcacagtccacagacttatcctcaagtaatctcatgtggtggggatccaacattttgtggtcgctgaagaaatacgaaaatgtagaaaagaggcttgtgatatgggatgttgtagctgtgctgcaggagttgaagaaatccgcacctgcctttctggagactctagtgcatagttgggtctcagtgttactttcgggcgacccccagtgtgtttctatcgatgctccatcacgttcaatgcatgacatgatgccctatgtcagcacgcggaagctacacttactgaacataatgtgcagaaaagtaatggtcagcattcacacacatcatggtcctggtgctgaaaacggcaatgaggaaacaactgatttctggagcactcttttggtgaggagcgaaacagagctgcgagagaggctggttggcttcacctttgctgcagtcctgaaacggacagcgtatttgttcaatggtacctctactgaaaattgctggtttcctgttggggttgcccagatggattcttgggtaaccatgaattacgacggacaagtgcatgaccagctgcagtctatcagatcaaagatcaaagatttaggaagcaggatcgacggatactctgacgtagaaagctgcccctactgctcttcgccggtccatttcgagtcgcctgacgtagccatctgtggggaaaggcacacactgccgcggtgcagggcgtccatgatcctgtgctccgttgtgcagcctttgtggcactgcgtgtgctgcggaggcacggtcaacaagctgttgccggagtcgttcttcaccatgcaggcgtccaccatgcatgatgaaggatcgctcgatctgtcagcagcctccgtcccactttgccccttctgtggcatcctcctgcagaggtcgatgccggcgttcctgctctccacctcgccggcatagaggctctctgtggatgctagtaggcatccaccaggtgtagcatgcagtagcaatgtagtactagtaaagtttgttctagtcgatgctgcttacactcagttactcttaccaagtatggctggcagagtgtcggttactggtcattttttaggtcccttttgaatgaatacgatgagttcttttgtttggtttcttttggaccctgacggtggcagattaccaggccaagttcagctatctcgaattgtctcattcgattgttgcggacatgcagttctggcagttccaattggttgttgcggacatgcagtcctgtcagttgactcagttccaagtgtacgtattttgcttcgaggctttcccagagcagagcacgtgtcgatggatgtagcggccggagaacgtgaacgaggcaaaacaac

SEQ ID NO: 11646 - DNA, 3704 bp, Zea Mays
ctgtctctctcgctcccgtctcgctctccgacgactgctggccgccgccgccgtgctgaggtcttcgtcgatcactttgccggcgtcgagcacacaccagatactcaccttctccctctctgctttcctcgaagcaaacgcaccgtcgttctctgttcctgtcgcgctcgcccacagccacgctcagacgcgccgccgcttgctgatccgcttgaccgccaaggcgtcgacccgctcggctgcgccgtcgcccgctgcccgccacgctcggccacgccgcttgctatctgctcaaccaccaaggccgacccgctcggctgcgccgtcgcccgcagccgctgccaggagcccccaccacgctcgctggtccgatcgaccacgccgtcgcccgcgaaggcgcctacaccgcttggccaggccgctgtccgccacctgcttgcccaggcacggcggcacggccgcatagacgcccgactcctgagtaaaagcagtcgagcagggcagctcccatctgacggagttctatcttaattgtactgctagatatgcttggacattagtgccatggctcctcaataccaagctgcgaccttgattgcctctccatcttatccaagtgccattgcttggtcaagcgacaatcttgtggctgttgcatctggtcatattgtaactattctgaatccatctgcgcttgatggaccccgtggattggttggactttgtcgcagtgacccttttcctataggactggttaatagagaagatctcttggagccatgtttattgtccacttccttagcgcgtgagactgaaccatgtgcccgatcgatttcatggtctcaacaaggatttgcacctaactctgggtgtttgctggctgtttgcactatggatggtcatgtgaagctttacaggtcaccaatttgggagctatgtgatgaatgggttgaggtcgcagatatatcacagttgctgtttaactactataaacttataaactttggagaggataatggttctcatttgacttctctggtgtcctggacagagaaaactaaagcgatcaaggtgaatttcgtttctacttcacatttgccaccgagaaaagtttccacatttgaaataataagatgatctaagggagcaccatttagccatcatgtaggatgtcaagtgctgatatgcaaacactttagttgatggttttatttatgacgtcaatgaagttgatttagatgcatcaaaggatgcagacttctcgatcgaaccatgttctaaatcaaagaagaaatatttgaaaaagactgtaaaacccaggcatgaagtagttgctgtaaatgaacgaaacaacacaggaaatattaaaggatcattgtcctccaatggagaaaacaaatcccttcctcttatcacggcaaaacagtatgcttgtcgtgctgcacatttgtcttcccttgtagtttcatggtctccagttgtgtcatcaagtgataaaacatcttgtttattgaggcattggtgcattattgctgttggctctaaatccggaaatctttctttttggaaactacctaagccagaatattacacaatagatgctggcgtggttaccagtgatccaatgctcatcggggttttgcaagctcacaaatcatgtgtcagtgtcatagcttggcaagttctttctgcgggctcttcaaaatcctcgttgcttttagctactggatgctcagatggaagtgttaagatatggttagggaatattgaagggttaaatcaatgtgcaagtggagaagtgccatttgcgttagttgctgtggtcgccactgatttatcatctccagtgtcatcaatctcattagccatacctgcccagtctcaacacgaggtcagtttggcaattggaagagtatctgggtcactagaaatatggatatggaatgcatctagcaacaaaattgagattttcagtgcatggcatgcacatgatcaagtggtttacaatgggctatggatggctattgtttattcagctgcagtcaggacaattctgcacgttgttggatctctcacgaaaaccaccttgaagaaatttttatgcattcaaattttccagagctaagggagtcagcagacctatcagaactctctgatcgatgctatggtcttacactagcacctggagaacagatgattgctgtggtccgcagtttggatctgaaccttctgaaccagatgtatcaagtcaggacacaaaaggcggtggttgagttcatttggattggtggccaatttgttggtattccactagacaggagcattgatatttgcagttcacagtccacagacttatcctcaagtaatctcatgtggtggggatccaacattttgtggtcgctgaagaaatacgaaaatgtagaaaagaggcttgtgatatgggatgttgtagctgtgctgcaggagttgaagaaatccgcacctgcctttctggagactctagtgcatagttgggtctcagtgttactttcgggcgacccccagtgtgtttctatcgatgctccatcacgttcaatgcatgacatgatgccctatgtcagcacgcggaagctacacttactgaacataatgtgcagaaaagtaatggtcagcattcacacacatcatggtcctggtgctgaaaacggcaatgaggaaacaactgatttctggagcactcttttggtgaggagcgaaacagagctgcgagagaggctggttggcttcacctttgctgcagtcctgaaacggacagcgtatttgttcaatggtacctctactgaaaattgctggtttcctgttggggttgcccagatggattcttgggtaaccatgaattacgacggacaagtgcatgaccagctgcagtctatcagatcaaagatcaaagatttaggaagcaggatcgacggatactctgacgtagaaagctgcccctactgctcttcgccggtccatttcgagtcgcctgacgtagccatctgtggggaaaggcacacactgccgcggtgcagggcgtccatgatcctgtgctccgttgtgcagcctttgtggcactgcgtgtgctgcggaggcacggtcaacaagctgttgccggagtcgttcttcaccatgcaggcgtccaccatgcatgatgaaggatcgctcgatctgtcagcagcctccgtcccactttgccccttctgtggcatcctcctgcagaggtcgatgccggcgttcctgctctccacctcgccggcatagaggctctctgtggatgctagtaggcatccaccaggtgtagcatgcagtagcaatgtagtactagtaaagtttgttctagtcgatgctgcttacactcagttactcttaccaagtatggctggcagagtgtcggttactggtcattttttaggtcccttttgaatgaatacgatgagttcttttgtttggtttcttttggaccctgacggtggcagattaccaggccaagttcagctatctcgaattgtctcattcgattgttgcggacatgcagttctggcagttccaattggttgttgcggacatgcagtcctgtcagttgactcagttccaagtgtacgtattttgcttcgaggctttcccagagcagagcacgtgtcgatggatgtagcggccggagaacgtgaacgaggcaaaacaac

SEQ ID NO: 11647 - DNA, 1519 bp, Zea Mays
cttgcccaggcacggcggcacggccgcatagacgcccgactcctgagtaaaagcagtcgagcagggcagctcccatctgacggagttctatcttaattgtactgctagatatgcttggacattagtgccatggctcctcaataccaagctgcgaccttgattgcctctccatcttatccaagtgccattgcttggtcaagcgacaatcttgtggctgttgcatctggtcatattgtaactattctgaatccatctgcgcttgatggaccccgtggattggttggactttgtcgcagtgacccttttcctataggactggttaatagagaagatctcttggagccatgtttattgtccacttccttagcgcgtgagactgaaccatgtgcccgatcgatttcatggtctcaacaaggatttgcacctaactctgggtgtttgctggctgtttgcactatggatggtcatgtgaagctttacaggtcaccaatttgggagctatgtgatgaatgggttgagaagaatacaaatactggggagacagaggttttaggatctgcttatgaattgcaagaatctctttatttcaggtgtcctggacagagaaaactaaagcgatcaagagttgatggttttatttatgacgtcaatgaagttgatttagatgcatcaaaggatgcagacttctcgatcgaaccatgttctaaatcaaagaagaaatatttgaaaaagactgtaaaacccaggcatgaagtagttgctgtaaatgaacgaaacaacacaggaaatattaaaggatcattgtcctccaatggagaaaacaaatcccttcctcttatcacggcaaaacagtatgcttgtcgtgctgcacatttgtcttcccttgtagtttcatggtctccagttgtgtcatcaagtgataaaacatcttgtttattgaggcattggtgcattattgctgttggctctaaatccggaaatctttctttttggaaactacctaagccagaatattacacaatagatgctggcgtggttaccagtgatccaatgctcatcggggttttgcaagctcacaaatcatgtgtcagtgtcatagcttggcaagttctttctgcgggctcttcaaaatcctcgttgcttttagctactggatgctcagatggaagtgttaagatatggttagggaatattgaagggttaaatcaatgtgcaagtggagaagtgccatttgcgttagttgctgtggtcgccactgatttatcatctccagtgtcatcaatctcattagccatacctgcccagtctcaacacgaggtcagtttggcaattggaagagtatctgggtcactagaaatatggatatggaatgcatctagcaacaaaattgagattttcagtgcatggcatgcacatgatcaagtggtaacaggtttacaatgggctatggatggctattgtttattcagctgcagtcagattaatttgctaactcaacatgggggagagaggatctcct

SEQ ID NO: 11648 - DNA, 2021 bp, Zea Mays
gagcagggcagctcccatctgacggagttctatcttaattgtactgctagatatgcttggacattagtgccatggctcctcaataccaagctgcgaccttgattgcctctccatcttatccaagtgccattgcttggtcaagcgacaatcttgtggctgttgcatctggtcatattgtaactattctgaatccatctgcgcttgatggaccccgtggattggttggactttgtcgcagtgacccttttcctataggactggttaatagagaagatctcttggagccatgtttattgtccacttccttagcgcgtgagactgaaccatgtgcccgatcgatttcatggtctcaacaaggatttgcacctaactctgggtgtttgctggctgtttgcactatggatggtcatgtgaagctttacaggtcaccaatttgggagctatgtgatgaatgggttgaggtcgcagatatatcacagttgctgtttaactactataaacttataaactttggagaggataatggttctcatttgacttctctgaagaatacaaatactggggagacagaggttttaggatctgcttatgaattgcaagaatctctttatttcaggtgtcctggacagagaaaactaaagcgatcaaggtgaatttcgtttctacttcacatttgccaccgagaaaagtttccacatttgaaataataagatgatctaagggagcaccatttagccatcatgtaggatgtcaagtgctgatatgcaaacactttgtacgaattcatccatgaatgtcacgaatttttcattttaatttattttgttgcaagaaggcaacattcttagcaatctttctgacatccatatactgtacctgaatttgttttcattgattttttattgaatatagagttgatggttttatttatgacgtcaatgaagttgatttagatgcatcaaaggatgcagacttctcgatcgaaccatgttctaaatcaaagaagaaatatttgaaaaagactgtaaaacccaggcatgaagtagttgctgtaaatgaacgaaacaacacaggaaatattaaaggatcattgtcctccaatggagaaaacaaatcccttcctcttatcacggcaaaacagtatgcttgtcgtgctgcacatttgtcttcccttgtagtttcatggtctccagttgtgtcatcaagtgataaaacatcttgtttattgaggcattggtgcattattgctgttggctctaaatccggaaatctttctttttggaaactacctaagccagaatattacacaatagatgctggcgtggttaccagtgatccaatgctcatcggggttttgcaagctcacaaatcatgtgtcagtgtcatagcttggcaagttctttctgcgggctcttcaaaatcctcgttgcttttagctactggatgctcagatggaagtgttaagatatggttagggaatattgaagggttaaatcaatgtgcaagtggagaagtgccatttgcgttagttgctgtggtcgccactgatttatcatctccagtgtcatcaatctcattagccatacctgcccagtctcaacacgagcatcaaaacttgttcccgaacattgggttgattgaagccattggattgttgaaagttggagagtctaagtaaaacatcaaatagagatgcgggatgtgtggtgaaaaccactctgagatgaagtaagagttgaccactttaggcagctatgctcagccacggatcactaccttcctttctttcatattctttccattatctttttcttgttagacaaccttgtttttttatcgagcacagaagagaactgtgcatcatttctttaagagagaaaaagaacagtaaaaaggaggtagaagacccccccccccccccccacccccaaacaaaaaacacacacacacaagggaaacaaaagagcagagcagatagccttcgcaggtagcatgacctgcaattaagcgacaaagtgcac

SEQ ID NO: 11649 - DNA, 1669 bp, Zea Mays
gcttgcccaggcacggcggcacggccgcatagacgcccgactcctgagtaaaagcagtcgagcagggcagctcccatctgacggagttctatcttaattgtactgctagatatgcttggacattagtgccatggctcctcaataccaagctgcgaccttgattgcctctccatcttatccaagtgccattgcttggtcaagcgacaatcttgtggctgttgcatctggtcatattgtaactattctgaatccatctgcgcttgatggaccccgtggattggttggactttgtcgcagtgacccttttcctataggactggttaatagagaagatctcttggagccatgtttattgtccacttccttagcgcgtgtttgctggctgtttgcactatggatggtcatgtgaagctttacaggtcaccaatttgggagctatgtgatgaatgggttgagaagaatacaaatactggggagacagaggttttaggatctgcttatgaattgcaagaatctctttatttcaggtgtcctggacagagaaaactaaagcgatcaagagttgatggttttatttatgacgtcaatgaagttgatttagatgcatcaaaggatgcagacttctcgatcgaaccatgttctaaatcaaagaagaaatatttgaaaaagactgtaaaacccaggcatgaagtagttgctgtaaatgaacgaaacaacacaggaaatattaaaggatcattgtcctccaatggagaaaacaaatcccttcctcttatcacggcaaaacagtatgcttgtcgtgctgcacatttgtcttcccttgtagtttcatggtctccagttgtgtcatcaagtgataaaacatcttgtttattgaggcattggtgcattattgctgttggctctaaatccggaaatctttctttttggaaactacctaagccagaatattacacaatagatgctggcgtggttaccagtgatccaatgctcatcggggttttgcaagctcacaaatcatgtgtcagtgtcatagcttggcaagttctttctgcgggctcttcaaaatcctcgttgcttttagctactggatgctcagatggaagtgttaagatatggttagggaatattgaagggttaaatcaatgtgcaagtggagaagtgccatttgcgttagttgctgtggtcgccactgatttatcatctccagtgtcatcaatctcattagccatacctgcccagtctcaacacgagcatcaaaacttgttcccgaacattgggttgattgaagccattggattgttgaaagttggagagtctaagtaaaacatcaaatagagatgcgggatgtgtggtgaaaaccactctgagatgaagtaagagttgaccactttaggcagctatgctcagccacggatcactaccttcctttctttcatattctttccattatctttttcttgttagacaaccttgtttttttatcgagcacagaagagaactgtgcatcatttctttaagagagaaaaagaacagtaaaaaggaggtagaagacccccccccccccccccacccccaaacaaaaaacacacacacacaagggaaacaaaagagcagagcagatagccttcgcaggtagcatgacctgcaattaagcgacaaagtgcac

SEQ ID NO: 11650 - DNA, 1770 bp, Zea Mays
tggccaggccgctgtccgccacctgcttgcccaggcacggcggcacggccgcatagacgcccgactcctgagtaaaagcagtcgagcagggcagctcccatctgacggagttctatcttaattgtactgctagatatgcttggacattagtgccatggctcctcaataccaagctgcgaccttgattgcctctccatcttatccaagtgccattgcttggtcaagcgacaatcttgtggctgttgcatctggtcatattgtaactattctgaatccatctgcgcttgatggaccccgtggattggttggactttgtcgcagtgacccttttcctataggactggttaatagagaagatctcttggagccatgtttattgtccacttccttagcgcgtgagactgaaccatgtgcccgatcgatttcatggtctcaacaaggatttgcacctaactctgggtgtttgctggctgtttgcactatggatggtcatgtgaagctttacaggtcaccaatttgggagctatgtgatgaatgggttgaggtcgcagatatatcacagttgctgtttaactactataaacttataaactttggagaggataatggttctcatttgacttctctggtgtcctggacagagaaaactaaagcgatcaagagttgatggttttatttatgacgtcaatgaagttgatttagatgcatcaaaggatgcagacttctcgatcgaaccatgttctaaatcaaagaagaaatatttgaaaaagactgtaaaacccaggcatgaagtagttgctgtaaatgaacgaaacaacacaggaaatattaaaggatcattgtcctccaatggagaaaacaaatcccttcctcttatcacggcaaaacagtatgcttgtcgtgctgcacatttgtcttcccttgtagtttcatggtctccagttgtgtcatcaagtgataaaacatcttgtttattgaggcattggtgcattattgctgttggctctaaatccggaaatctttctttttggaaactacctaagccagaatattacacaatagatgctggcgtggttaccagtgatccaatgctcatcggggttttgcaagctcacaaatcatgtgtcagtgtcatagcttggcaagttctttctgcgggctcttcaaaatcctcgttgcttttagctactggatgctcagatggaagtgttaagatatggttagggaatattgaagggttaaatcaatgtgcaagtggagaagtgccatttgcgttagttgctgtggtcgccactgatttatcatctccagtgtcatcaatctcattagccatacctgcccagtctcaacacgagcatcaaaacttgttcccgaacattgggttgattgaagccattggattgttgaaagttggagagtctaagtaaaacatcaaatagagatgcgggatgtgtggtgaaaaccactctgagatgaagtaagagttgaccactttaggcagctatgctcagccacggatcactaccttcctttctttcatattctttccattatctttttcttgttagacaaccttgtttttttatcgagcacagaagagaactgtgcatcatttctttaagagagaaaaagaacagtaaaaaggaggtagaagacccccccccccccccccacccccaaacaaaaaacacacacacacaagggaaacaaaagagcagagcagatagccttcgcaggtagcatgacctgcaattaagcgacaaagtgcac

SEQ ID NO: 11651 - DNA, 2553 bp, Zea Mays
ggtcacgatccgtgcgtactgagaccgtgcagcagcgtcgagggaggttcgtcggtcgggttgacttgggcgcggatgggcgggaccggcgcgagcagccggcggaggtgggcgcggcggtccttccggacggcgggtggtggaggaggaaggggaaccggtggggttgtcaggcggaccgtcgcggcgtcgacgaccatggctccgcggggtacccaagggtttgctcatgtggacaagcaacagcgtcatgttcatggagtattatcagatttcagatgcaacagtggatcaacagatcatctttctttgtatgtcgaggaatttaagcataagagctcacacagatcatctgttagatgtcttcctagtgcacagggaaatgtaacagaaatcagtcgcatgcaacctgttgcaaggaaagttcaggtagatatgaccttcaatgataaaggattgtgtcgtgctagcagaactgtttcaggaatgcgaattcaacctaaatattatatcagcagtcccaacaacaatttgaagaattctcctactgtgaagagttatagtgggatgagtgatttcaattatcaactggtcagaagtgctaaaaggtcagctttgccaaagatgggtttaaccagcacaaactgttccctttctgagaaaatgtcttttctgcgtcgaccacggcatggtgataatcatcagaaccaaagccgtatcagtgctttgaatcgaagaaacaaaattgtgaatcctaggggagcagctcacctgctaagtaaagataaggttcatgaacaccttaattcctcattggaaagacattcacaggctttgttaagtaatgcattgattcgagaaaagcaactgtgctgttcagatatactcaatcaaaaagaacctgaacagctatggagctctgcttacagtgaatctgagaagatgttatgcttttcctccagtgacagcattgatgatctgcaagtatcgtcttcaagtgacactagtgatagcttcaacttatcatctctgggtgtaatagatggtgatgaatggaatacgaccttcaagagggtatgtactagaatatatgattactaattcactagtgaatcatgataatgtgttttgaagatgcttgaatggtttcttggttttctggaatcggaataattgttcaaacttttattagcatggtgtctagccatctttcaaactgaaccaaatttaattattactgttgtacaacagatggacacgtgtatttagtttgctttcttcaatgtgcatggtaggaaggttaagctcatgctatctttgacaggtgtactaccctcatgctgcatgcctagactctatatctgtcatatacgctaaagaaataggtcaggttagcccaatatctgttcttcagcctctatctgaagattgctcagattctgaaaacatcagacacgagcctgcagatccatatgatctccaactcagacttgagcttggcacatctgcaccaagggagactgctgcagaggcaagtaattttcgcggaactagtgtctgtttaacctccgaagtgcagtcaagcgatgagaaacccatacaactggttgaagacatccttgaagaatttgaagatgatgaggaaagggacttctcttacttgctggatatactgattgcttctggaattcatggaactgccgaggatcaaatgtacaaggtgtgtcagtctctcgaccaccctgctggtgatgacgtatttgagaagctggaaaagaagtacaacaaagttgttcagtggtcaagatcagacaggaagcttctattcgacatggccaacacaatactatcacagatccttgccccgtgcttgaacatgcaaccttgggtctataccactaggaacttggccccactttggggcccagatggtcttctggagaaagtcttgcagatgctagttcagagacgggaacaccttgcacccagtgagactaagccagagaagaaaggatttgatccgaagtggccaggtttagcagactgcatcgacagggcaggaagggacattgagagaatggtaaaagatgacctgttggaagagctggtcgttgagctactgtccagttaggtttccacaattccacggccgtagtaggttttatcatagcagtacagattctttgttcttttgtttagtttttttagtcagttgtagttgttcctttggtccctgtccctgctatcactgctattttttttctcttcgttgttaaagcagtgggggagagttttttttttggtctagtcgccgtgcttccggtggtattatgacgtgaattccattggattagaggatctctgtagggaaaagttcttttctacctctccataaagagtaccttttgaagtgaggtttgtaagaatataaaaatttcctgtcgagctttgtcggctgtgagccctcaaatctgtatatgaggtaaaattataacttaattgtgttatgctttaaaggaaaaggaagatagtggcctatgctttggtcttgtt

SEQ ID NO: 11652 - DNA, 2275 bp, Zea Mays
ggtcacgatccgtgcgtactgagaccgtgcagcagcgtcgagggaggttcgtcggtcgggttgacttgggcgcggatgggcgggaccggcgcgagcagccggcggaggtgggcgcggcggtccttccggacggcgggtggtggaggaggaaggggaaccggtggggttgtcaggcggaccgtcgcggcgtcgacgaccatggctccgcggggtacccaagggtttgctcatgtggacaagcaacagcgtcatgttcatggagtattatcagatttcagatgcaacagtggatcaacagatcatctttctttgtatgtcgaggaatttaagcataagagctcacacagatcatctgttagatgtcttcctagtgcacagggaaatgtaacagaaatcagtcgcatgcaacctgttgcaaggaaagttcaggtagatatgaccttcaatgataaaggattgtgtcgtgctagcagaactgtttcaggaatgcgaattcaacctaaatattatatcagcagtcccaacaacaatttgaagaattctcctactgtgaagagttatagtgggatgagtgatttcaattatcaactggtcagaagtgctaaaaggtcagctttgccaaagatgggtttaaccagcacaaactgttccctttctgagaaaatgtcttttctgcgtcgaccacggcatggtgataatcatcagaaccaaagccgtatcagtgctttgaatcgaagaaacaaaattgtgaatcctaggggagcagctcacctgctaagtaaagataaggttcatgaacaccttaattcctcattggaaagacattcacaggctttgttaagtaatgcattgattcgagaaaagcaactgtgctgttcagatatactcaatcaaaaagaacctgaacagctatggagctctgcttacagtgaatctgagaagatgttatgcttttcctccagtgacagcattgatgatctgcaagtatcgtcttcaagtgacactagtgatagcttcaacttatcatctctgggtgtaatagatggtgatgaatggaatacgaccttcaagaggactctatatctgtcatatacgctaaagaaataggtcaggttagcccaatatctgttcttcagcctctatctgaagattgctcagattctgaaaacatcagacacgagcctgcagatccatatgatctccaactcagacttgagcttggcacatctgcaccaagggagactgctgcagaggcaagtaattttcgcggaactagtgtctgtttaacctccgaagtgcagtcaagcgatgagaaacccatacaactggttgaagacatccttgaagaatttgaagatgatgaggaaagggacttctcttacttgctggatatactgattgcttctggaattcatggaactgccgaggatcaaatgtacaaggtgtgtcagtctctcgaccaccctgctggtgatgacgtatttgagaagctggaaaagaagtacaacaaagttgttcagtggtcaagatcagacaggaagcttctattcgacatggccaacacaatactatcacagatccttgccccgtgcttgaacatgcaaccttgggtctataccactaggaacttggccccactttggggcccagatggtcttctggagaaagtcttgcagatgctagttcagagacgggaacaccttgcacccagtgagactaagccagagaagaaaggatttgatccgaagtggccaggtttagcagactgcatcgacagggcaggaagggacattgagagaatggtaaaagatgacctgttggaagagctggtcgttgagctactgtccagttaggtttccacaattccacggccgtagtaggttttatcatagcagtacagattctttgttcttttgtttagtttttttagtcagttgtagttgttcctttggtccctgtccctgctatcactgctattttttttctcttcgttgttaaagcagtgggggagagttttttttttggtctagtcgccgtgcttccggtggtattatgacgtgaattccattggattagaggatctctgtagggaaaagttcttttctacctctccataaagagtaccttttgaagtgaggtttgtaagaatataaaaatttcctgtcgagctttgtcggctgtgagccctcaaatctgtatatgaggtaaaattataacttaattgtgttatgctttaaaggaaaaggaagatagtggcctatgctttggtcttgtt

SEQ ID NO: 11653 - DNA, 2126 bp, Zea Mays
ggtcacgatccgtgcgtactgagaccgtgcagcagcgtcgagggaggttcgtcggtcgggttgacttgggcgcggatgggcgggaccggcgcgagcagccggcggaggtgggcgcggcggtccttccggacggcgggtggtggaggaggaaggggaaccggtggggttgtcaggcggaccgtcgcggcgtcgacgaccatggctccgcggggtacccaagggtttgctcatgtggacaagcaacagcgtcatgttcatggagtattatcagatttcagatgcaacagtggatcaacagatcatctttctttgtatgtcgaggaatttaagcataagagctcacacagatcatctgttagatgtcttcctagtgcacagggaaatgtaacagaaatcagtcgcatgcaacctgttgcaaggaaagttcagcagtcccaacaacaatttgaagaattctcctactgtgaagagttatagtgggatgagtgatttcaattatcaactggtcagaagtgctaaaaggtcagctttgccaaagatgggtttaaccagcacaaactgttccctttctgagaaaatgtcttttctgcgtcgaccacggcatggtgataatcatcagaaccaaagccgtatcagtgctttgaatcgaagaaacaaaattgtgaatcctaggggagcagctcacctgctaagtaaagataagatatactcaatcaaaaagaacctgaacagctatggagctctgcttacagtgaatctgagaagatgttatgcttttcctccagtgacagcattgatgatctgcaagtatcgtcttcaagtgacactagtgatagcttcaacttatcatctctgggtgtaatagatggtgatgaatggaatacgaccttcaagagggtgtactaccctcatgctgcatgcctagactctatatctgtcatatacgctaaagaaataggtcaggttagcccaatatctgttcttcagcctctatctgaagattgctcagattctgaaaacatcagacacgagcctgcagatccatatgatctccaactcagacttgagcttggcacatctgcaccaagggagactgctgcagaggcaagtaattttcgcggaactagtgtctgtttaacctccgaagtgcagtcaagcgatgagaaacccatacaactggttgaagacatccttgaagaatttgaagatgatgaggaaagggacttctcttacttgctggatatactgattgcttctggaattcatggaactgccgaggatcaaatgtacaaggtgtgtcagtctctcgaccaccctgctggtgatgacgtatttgagaagctggaaaagaagtacaacaaagttgttcagtggtcaagatcagacaggaagcttctattcgacatggccaacacaatactatcacagatccttgccccgtgcttgaacatgcaaccttgggtctataccactaggaacttggccccactttggggcccagatggtcttctggagaaagtcttgcagatgctagttcagagacgggaacaccttgcacccagtgagactaagccagagaagaaaggatttgatccgaagtggccaggtttagcagactgcatcgacagggcaggaagggacattgagagaatggtaaaagatgacctgttggaagagctggtcgttgagctactgtccagttaggtttccacaattccacggccgtagtaggttttatcatagcagtacagattctttgttcttttgtttagtttttttagtcagttgtagttgttcctttggtccctgtccctgctatcactgctattttttttctcttcgttgttaaagcagtgggggagagttttttttttggtctagtcgccgtgcttccggtggtattatgacgtgaattccattggattagaggatctctgtagggaaaagttcttttctacctctccataaagagtaccttttgaagtgaggtttgtaagaatataaaaatttcctgtcgagctttgtcggctgtgagccctcaaatctgtatatgaggtaaaattataacttaattgtgttatgctttaaaggaaaaggaagatagtggcctatgctttggtcttgtt

SEQ ID NO: 11654 - DNA, 2170 bp, Zea Mays
ctcaaataggccgcgcggggtcacgatccgtgcgtactgagaccgtgcagcagcgtcgagggaggttcgtcggtcgggttgacttgggcgcggatgggcgggaccggcgcgagcagccggcggaggtgggcgcggcggtccttccggacggcgggtggtggaggaggaaggggaaccggtggggttgtcaggcggaccgtcgcggcgtcgacgaccatggctccgcggggtacccaagggtttgctcatgtggacaagcaacagcgtcatgttcatggagtattatcagatttcagatgcaacagtggatcaacagatcatctttctttgtatgtcgaggaatttaagcataagagctcacacagatcatctgttagatgtcttcctagtgcacagggaaatgtaacagaaatcagtcgcatgcaacctgttgcaaggaaagttcaggtagatatgaccttcaatgataaaggattgtgtcgtgctagcagaactgtttcaggaatgcgaattcaacctaaatattatatcagcagtcccaacaacaatttgaagaattctcctactgtgaagagttatagtgggatgagtgatttcaattatcaactggtcagaagtgctaaaaggtcagctttgccaaagatgggtttaaccagcacaaactgttccctttctgagaaaatgtcttttctgcgtcgaccacggcatggtgataatcatcagaaccaaagccgtatcagtgctttgaatcgaagaaacaaaattgtgaatcctaggggagcagctcacctgctaagtaaagataaggttcatgaacaccttaattcctcattggaaagacattcacaggctttgttaagtaatgcattgattcgagaaaagcaactgtgctgttcagatatactcaatcaaaaagaacctgaacagctatggagctctgcttacagtgaatctgagaagatgttatgcttttcctccagtgacagcattgatgatctgcaagtatcgtcttcaagtgacactagtgatagcttcaacttatcatctctgggtgtaatagatggtgatgaatggaatacgaccttcaagaggatctccaactcagacttgagcttggcacatctgcaccaagggagactgctgcagaggcaagtaattttcgcggaactagtgtctgtttaacctccgaagtgcagtcaagcgatgagaaacccatacaactggttgaagacatccttgaagaatttgaagatgatgaggaaagggacttctcttacttgctggatatactgattgcttctggaattcatggaactgccgaggatcaaatgtacaaggtgtgtcagtctctcgaccaccctgctggtgatgacgtatttgagaagctggaaaagaagtacaacaaagttgttcagtggtcaagatcagacaggaagcttctattcgacatggccaacacaatactatcacagatccttgccccgtgcttgaacatgcaaccttgggtctataccactaggaacttggccccactttggggcccagatggtcttctggagaaagtcttgcagatgctagttcagagacgggaacaccttgcacccagtgagactaagccagagaagaaaggatttgatccgaagtggccaggtttagcagactgcatcgacagggcaggaagggacattgagagaatggtaaaagatgacctgttggaagagctggtcgttgagctactgtccagttaggtttccacaattccacggccgtagtaggttttatcatagcagtacagattctttgttcttttgtttagtttttttagtcagttgtagttgttcctttggtccctgtccctgctatcactgctattttttttctcttcgttgttaaagcagtgggggagagttttttttttggtctagtcgccgtgcttccggtggtattatgacgtgaattccattggattagaggatctctgtagggaaaagttcttttctacctctccataaagagtaccttttgaagtgaggtttgtaagaatataaaaatttcctgtcgagctttgtcggctgtgagccctcaaatctgtatatgaggtaaaattataacttaattgtgttatgctttaaaggaaaaggaagatagtggcctatgctttggtcttgtt

SEQ ID NO: 11655 - DNA, 453 bp, Zea Mays
atgaagcggctcacgcaggatgaggaccaagagcaggagcaggagccgggtgtcatcctaagcgtggcccagggggtcacgctgctgctcgcgcgcagcggcggcggcggcgagccgcgggcctcgccgcgcgtgttcgagtgcaagacgtgcagccgccggttcccgtcgttccaggcgctgggcgggcaccgcgcgagccacaagcgcccgcgggcggcgccggccaagggccgcccgcacggctgcggggtgtgcggcgtcgagttcgcgctcggccaggcgctgggaggccacatgaggcgccaccaccgcgccgtggccgaggagtgcgaggcgcgggacggcgcggcggctagcgcccacgggatggacgtggacgacgccgaggcgaagccggaggaggaagcgacaggcctgctgcgctttgacctcaacattgccccatcatga

SEQ ID NO: 11656 - DNA, 1030 bp, Zea Mays
caatgtaatgccgatatcagcactgacttgatgagggacaagttttccgccctatctgcaggattttgcatgcaagaactgccggagacctgggcacttcgctaaggagtgtccatctgcacctatgtgcaataactgtaaccttccaggccactttgcagcagaatgcaccttacaaactgtttgctggaactgcaaagagtctgggcacattgccagtgagtgcaagaacgaggccctatgccacgcctgcaacaagacaggtcacttggcacgtgactgccctacttcaggtgctaacgtcaagctatgcaacaaatgctttaaatcaggccacatcgccgttgactgcaccaacgaacgggcctgcaacaactgccgtcagccagggcacatagctcgggagtgcaagaacgacccggtctgcaacctgtgcaatgtctccggccacgtcgcgcgcgtctgcccaaagacgactctggcttcagtgatacagggcggcccgttccgagatatcctgtgccgcatctgcggtcagccggggcacatcagccgcaactgcatggcgaccatcatctgcgacacatgcggtgggagggggcacatgtcttatgagtgcccatcggcaagaatattcgggctccgcaggctctgaagatcttttcgccaagggctccgctttgttctgatggctgagtttcgccaggatgtttcatttgtttctgacagtattggaacagttttccttctgccgttgtagttgaggaatgattctgtaggatgtgttgcgggtgaaaactccttttttcccccttttaatcaggatagccctttgtgggctcaaacattgctgtaacggctcgtgtgaaaattgccaggtcatgatttaactcttgtgctcgtgctctgctgtgtcttttgaacgcttgttttgtgtacttatactgtattgtaacgtcacgtagaactgtgaaatttgtacggtgacgttggtgatttgatcttgacaaagagatgcctgagagttggg

SEQ ID NO: 11657 - DNA, 1460 bp, Zea Mays
cggagttatacggaccaggttcggccgttctgccaatatgctgcaacccaacggtttcttccaacattaacccccagcgggcagcggccgcgcactccctcagtccctccccgctcaccaccagtcaccaacgcccaccgggcctcgtccctcgtggcggcaactgggcggccgtcgctgccgccctacgccaggtgccgaggcgaccttcaggcccttggctggcgacgagcaccagtgcaccaccaatactctgagcctggctgccgaaagtgccttttggggttcttgtaatcttgttacattaggattcatttttgatgacttcatcaagaagcaagagcaagagcagaagtaggagccgcagtcgcagcaggagcaggagccgcagtcctcggcgaagagataggttgcgcagtgaacgtgcaccccaccgcagtcgtagccggagccgcagcccataccgtcgcagagaacgacgtggtcacagggattttgcatgcaagaactgccggagacctgggcacttcgctaaggagtgtccatctgcacctatgtgcaataactgtaaccttccaggccactttgcagcagaatgcaccttacaaactgtttgctggaactgcaaagagtctgggcacattgccagtgagtgcaagaacgaggccctatgccacgcctgcaacaagacaggtcacttggcacgtgactgccctacttcaggtgctaacgtcaagctatgcaacaaatgctttaaatcaggccacatcgccgttgactgcaccaacgaacgggcctgcaacaactgccgtcagccagggcacatagctcgggagtgcaagaacgacccggtctgcaacctgtgcaatgtctccggccacgtcgcgcgcgtctgcccaaagacgactctggcttcagtgatacagggcggcccgttccgagatatcctgtgccgcatctgcggtcagccggggcacatcagccgcaactgcatggcgaccatcatctgcgacacatgcggtgggagggggcacatgtcttatgagtgcccatcggcaagaatattcgggctccgcaggctctgaagatcttttcgccaagggctccgctttgttctgatggctgagtttcgccaggatgtttcatttgtttctgacagtattggaacagttttccttctgccgttgtagttgaggaatgattctgtaggatgtgttgcgggtgaaaactccttttttcccccttttaatcaggatagccctttgtgggctcaaacattgctgtaacggctcgtgtgaaaattgccaggtcatgatttaactcttgtgctcgtgctctgctgtgtcttttgaacgcttgttttgtgtacttatactgtattgtaacgtcacgtagaactgtgaaatttgtacggtgacgttggtgatttgatcttgacaaagagatgcctgagagttggg

SEQ ID NO: 11658 - DNA, 2317 bp, Zea Mays
ctggtatggtatggtcctctgggctaggcccacgccgcagcgcccgcggacgaaccaccacgcccacgcgtagcacgagaagggacacgatcgcacacttttcctctgagccgcgacctgtctctgtctctgtctctgtctctgttcttctgccccgactccgcccacgcatctctttctcctcttcccccgcgcggcggccgcgggagtgttcgtgttcctcacttctcccgcttgcgtccccgacactccctcagatccgcggccgtttcccgatccgaggggcattccagccctaaatagcggccggtgagcaggtctccttccgccggcgcggaccacctggagggagtttatcctggagccgtcttcctcctcgcctccttttgcggcgcggcgcggaggccggagtcgcttggaggcccagctgtgtttgggttgatttcttcgtttgtcgggcctgtcttctgcctctgcttttgcttcgaagcaatggcgaatgcaagcaagcacttgcaaccttcaagtcaagcaggcaatgacaagaagtatcagggcacgctggttgcttcaccagcaaaggccatttcacctaagtgtgtgaaccgcattgtgccatcgaagcaactgatcttgggtgggggttcaataggccatgtggcatcatttctgatcaaggtcgttgctcttgaggcagtgagaagagtttctaaaacaagatgccctttcatatggaattctgttcaagcattgcagatccttgtgtatcctccatttagctggatccaaagatgggcaccgctcggatttctcgtgcagggaattcagaaactatccatgccactgttgtttctgtcagtcacaacaacagtaagtgagctgtcttccaagcatgatgatgaaccagataacaatacagaacattctgagacaccttccgaaacaaatgaattggcgtcaacttctggcacaagcgatgctgctgatggcacaaaggaaatcgtgcaagagaactggcttgtgttacttttcagggagcttgagaagcaaggcatcactttgcctgagaggtttactgaagatgagttacgcagattttatgttgctgcaaatggcgactttcaaagtttactctcttcggttaagaagacaattcattggagggaaacatttcacatacttacattgcaagaacttgatagatggtctcacttagtcttttggcatgggtttgacacgatgcttcggccttgtttagtagttcgtcttggacttgcatgctctagcatacctcctcatgatagaccccgtttcgggcaagcagtagtttctcaaattgaccatggcgttgtaaatttgatcaatgaagaagattcaaggattaccgttttactggattgccatgggatttcgccattcagatttccaatgcaaatgatgaggtcgttcatcactgtggttcaagaaaactacccgaatcgtcttggggtattgtttgtcatccgtcttcctccagttgtcagagttattgcacagacatttcttcaagtcttgaaaccagctacaaagcagaagttgcgttttgagggagattcgtacaagaaggcattggcggagttcctgcaggctgtgccagcgtttctgggcggtaaatgcagctgcccgcgatgtgagagtcctcgtgatgattcagtgatacaggcaggggaagggagcaagaagcagccccgcttggtcagcgttgatgacgggttacctgtcacagacttggacttcgacttggatgaagagatcccatcaccttatagctgcgagaacgccatcagggctgcgataatcggcctgctgatggtgtgcatcttcgtcgcgtttctggctgggatgatcgaccctgcatccgttccagccagtgcctgagagcttgtggaatagagcatgcacgtacatgtgttgctaattaggatgcagggtgctgtatttcttggcaggcttcttgtatgttgtcgtcagaccgccatagagcgctttctcccagtgtgagcgagcgcatgaataatatatatcctctgtgtcaaatgttggttagcagttcaattcgggcctactagatttcactattttcttttttatcttgatcgggcctactgaatttttgctcctctttctcatcatgatcactttgaacttgaacaaatagagcttatatgagctacgctctggccacggcctgggtggaccgcgtcatagatccgcccctgcctgccagttctgcttcacagtgaatccattaacagtgcgtttggatgttggaatttag

SEQ ID NO: 11659 - DNA, 2443 bp, Zea Mays
ctccgctccagcctcggagcatccatccagtaccctacggggtccggcggaacccactccagtggtcgtctggtatggtatggtcctctgggctaggcccacgccgcagcgcccgcggacgaaccaccacgcccacgcgtagcacgagaagggacacgatcgcacacttttcctctgagccgcgacctgtctctgtctctgtctctgtctctgttcttctgccccgactccgcccacgcatctctttctcctcttcccccgcgcggcggccgcgggagtgttcgtgttcctcacttctcccgcttgcgtccccgacactccctcagatccgcggccgtttcccgatccgaggggcattccagccctaaatagcggccggtgagcaggtctccttccgccggcgcggaccacctggagggagtttatcctggagccgtcttcctcctcgcctccttttgcggcgcggcgcggaggccggagtcgcttggaggcccagctgtgtttgggttgatttcttcgtttgtcgtggttagaggcacctggtttgttttttgctgaagctggtggtacatgtgaatagcagggcctgtcttctgcctctgcttttgcttcgaagcaatggcgaatgcaagcaagcacttgcaaccttcaagtcaagcaggcaatgacaagaagtatcagggcacgctggttgcttcaccagcaaaggccatttcacctaagtgtgtgaaccgcattgtgccatcgaagcaactgatcttgggtgggggttcaataggccatgtggcatcatttctgatcaaggtcgttgctcttgaggcagtgagaagagtttctaaaacaagatgccctttcatatggaattctgttcaagcattgcagatccttgtgtatcctccatttagctggatccaaagatgggcaccgctcggatttctcgtgcagggaattcagaaactatccatgccactgttgtttctgtcagtcacaacaacagtaagtgagctgtcttccaagcatgatgatgaaccagataacaatacagaacattctgagacaccttccgaaacaaatgaattggcgtcaacttctggcacaagcgatgctgctgatggcacaaaggaaatcgtgcaagagaactggcttgtgttacttttcagggagcttgagaagcaaggcatcactttgcctgagaggtttactgaagatgagttacgcagattttatgttgctgcaaatggcgactttcaaagtttactctcttcggttaagaagacaattcattggagggaaacatttcacatacttacattgcaagaacttgatagatggtctcacttagtcttttggcatgggtttgacacgatgcttcggccttgtttagtagttcgtcttggacttgcatgctctagcatacctcctcatgatagaccccgtttcgggcaagcagtagtttctcaaattgaccatggcgttgtaaatttgatcaatgaagaagattcaaggattaccgttttactggattgccatgggatttcgccattcagatttccaatgcaaatgatgaggtcgttcatcactgtggttcaagaaaactacccgaatcgtcttggggtattgtttgtcatccgtcttcctccagttgtcagagttattgcacagacatttcttcaagtcttgaaaccagctacaaagcagaagttgcgttttgagggagattcgtacaagaaggcattggcggagttcctgcaggctgtgccagcgtttctgggcggtaaatgcagctgcccgcgatgtgagagtcctcgtgatgattcagtgatacaggcaggggaagggagcaagaagcagccccgcttggtcagcgttgatgacgggttacctgtcacagacttggacttcgacttggatgaagagatcccatcaccttatagctgcgagaacgccatcagggctgcgataatcggcctgctgatggtgtgcatcttcgtcgcgtttctggctgggatgatcgaccctgcatccgttccagccagtgcctgagagcttgtggaatagagcatgcacgtacatgtgttgctaattaggatgcagggtgctgtatttcttggcaggcttcttgtatgttgtcgtcagaccgccatagagcgctttctcccagtgtgagcgagcgcatgaataatatatatcctctgtgtcaaatgttggttagcagttcaattcgggcctactagatttcactattttcttttttatcttgatcgggcctactgaatttttgctcctctttctcatcatgatcactttgaacttgaacaaatagagcttatatgagctacgctctggccacggcctgggtggaccgcgtcatagatccgcccctgcctgccagttctgcttcacagtgaatccattaacagtgcgtttggatgttggaatttag

SEQ ID NO: 11660 - DNA, 2252 bp, Zea Mays
atgggcaactccctcgcctgcttctgctgcgcgggcggcgccgcggggcacgtggcgcccgccgcgctcccctcggaccccgcctacgacgagggcctcggccactccttctgctacgtccggccggataaggtgcccgtgcccttctccgcggacgacgacctggtcgccgacgccaaggcggccgaggacgccaccacgttccgggccatctcgggggccgcgctcagcgccaacgtctccacgccgctctccacgtccctcctcctgctgctgccggacgagtcggcggcctcctcctccggcttcgagagctccgagtcgttcgccgccgtgccgctgcagccggtcccgaggttcccgtcggggcccatctgcgcgcccgccggggccggggccgggttcctctccgggcccatagagagggggttcctctcgggccccctcgacgccgcgctcatgtcgtccggcccgctccctggcgccgccacgtccggccgcatgggaggcgccgtgccctcgctccgccggagcctgtcgcacggcggccgccgcctgcgggatctcacccgcgcgatcctcgcgcggacggagaagcttcagggttcgatggatctcggcctcggcctcggcctcggctcgcccgatggcgccgggctgcagctgcagtgggcgcaggggaaggccggcgaggaccgcgtccacgtcgtggtgtcggaggagcggggctgggtgttcgtcggcatctacgacggcttcaacggccccgacgccacggacttcctcgtctcccatctctacgccgccgtgcaccgcgagctccgcggcctgctctgggaccagcgcgacgcgcaccccgaccagccgaccacgaccagcaccacggcctcagatcaccaggaccgccgccgccgccgcgcccgccgctcgagaccgccgcgcggcgccgacgatgaccagcggcggtggaagtgcgagtgggagcgcgactgctccagcgccctgaagccgccgacccagcgccctcctcggggcagcagccagaacgaccacctcgccgtgcttaaggcgcttgcgcgcgcgcttcgcaagaccgaggaggcctacctggacgtggccgataagatggtcggcgagttcccggagcttgcgcttatgggctcttgcgttctagccatgcttatgaaaggggaggacatgtacctcatgaatgtaggtgacagccgggctgtcctgggaacaatggacagtgtagacgtcgagcaggtcaccagtgatggattggttggggatggcacgccgctcttgtcagctgtgcagcttacatcagaacacagcacgtcggtgcggcaggaagtctgcagaatacggaacgagcaccctgatgacccgtccgcgatctccaaggaccgtgtgaagggctcgctcaaggtgacgagagcgtttggagctggtttcctgaaacagccgaaatggaacgaggcgctgctggagatgttcagaatagactacgtcgggtcatccccgtacgtcacgtgcagcccttcgctctgtcaccgcaggctcagcacgagggacaggttcctgatactgtcctcggacgggctgtaccagtacttcaccagcgaggaggcggttgcccaggtcgagatgttcatcgcgacaacccccgacggcgaccctgcccagcacctggtggaggaggttcttttcaaagccgcgaacaaagcagggatggacttccacgaactgatcgagatcccacacggcgaccggcggcggtaccacgacgacgtatctgtcattgtaatatccttggagggcaggatctggaggtcttgcgtgtaaataggtcggccatactagattagagaaagaaacgtatatatctgtagagatagagagaggttcttgcaggcctattccattactcccagctgctcctgtacaaaatctcaacgaagcaccactgggtgggcttgggatctcggcgcatccaagttgaatcacgatgagaagatgcgtcccctggagcgcagtgccgtataagatgttcatgtaaaagaagatctgttcaactactgataactaaaatagcgaccaattggtcaagtttttttttgacctttttttgggggcatcctctgtgttcataccacaggtaaaactgtacatgtgcgcagtgcgcggcagactgattcaaagtcggacttgtatggttctgaagtactccgtactaaactttatgcaaa

SEQ ID NO: 11661 - DNA, 1523 bp, Zea Mays
gcaaatgccaaatgtgcaacctggccggcccggccgtctgcccgtctgccttcggcgtgcagatctccccaactccaggaccagaaaacccacgcgaagaccagagcagcgggtggactcggcaccggccgtcgggaccgcgacgatggccgccgcctggcctctctccgccatcgccggcatcctgccggcctccctctcgctgaccctcctcctcgccaccctcgtatccatcctggtgctgggcgcagcggcgttcttcttcgagcacatccgcaagataggatgcatgcactcgctggagaggtccgccgtctcggacgccttcttcgaggaccccaactcgctcaagaaggtgccctgcccgtcggttttggatcctcctgagaaatatatttcgttgatagttcctgcctacaatgaggagtatcgactccccgaggctcttacagaaacactcaactacttgaagcggagatcaactgctgacaagtccttttcatatgaggtattgattgtcgatgatggtagcactgatgggacctctaaagtcgctttcagttttgtaaagaaacacaagattgataatgttagagttcttctacttggaagaaatcatgggaaaggtgaagcagtccgaaaacatctaatagggaatgcttcattcacgtggtgaactattactcatgcttgatgctgatggtgcaactaaagtgaccgatttggaaaagcttgaagctcaggttcatgcattggctaagaaagctaagtctagcccagggacatctactagttcatctcagaatctatctgatgttgaagttgctgtttttggttcccgagctcatctagagaagcaggctcttgcgacaaggaaatggtatagaaactttcttatgaaaggtttccatttggtagttttgttgactgctggtcccgggatcaaagatacacagtgtgggtttaagatgttcacacgagcagctgcaaggaagcttttcacaaatatcagattgaagaggtggtgtttcgatgttgaacttgtatacctgtgcaagcgcctcaggatcccaatggtagaagtatccgttaattggaccgagatacctggatccaaagtgcgcatgacgagcatcatgcacatggtattcgagctcctgctgatcaaagtaggttatggactggggatatggaaaatcggctcgtagatccttgacattctatgctgactagtttctgcaactcagtttggaggaatactgtacaattttccgcaaaacctagttggtcgccagcaaatccatttggaggaatactgtacaattttccgagattttcaaatcgagagcatcaattcacatgtaccctagtgtttgatcatagagacgttgacagatgtaggccaaaattgttgtcccagctatatccttttactgatttgttatacaggaactcaaacgtgttgccaatattgttcattctagtttatagttgttccgggcttagtgaagagtagctcccct

SEQ ID NO: 11662 - DNA, 1467 bp, Zea Mays
gcaaatgccaaatgtgcaacctggccggcccggccgtctgcccgtctgccttcggcgtgcagatctccccaactccaggaccagaaaacccacgcgaagaccagagcagcgggtggactcggcaccggccgtcgggaccgcgacgatggccgccgcctggcctctctccgccatcgccggcatcctgccggcctccctctcgctgaccctcctcctcgccaccctcgtatccatcctggtgctgggcgcagcggcgttcttcttcgagcacatccgcaagataggatgcatgcactcgctggagaggtccgccgtctcggacgccttcttcgaggaccccaactcgctcaagaaggtgccctgcccgtcggttttggatcctcctgagaaatatatttcgttgatagttcctgcctacaatgaggagtatcgactccccgaggctcttacagaaacactcaactacttgaagcggagatcaactgctgacaagtccttttcatatgaggtattgattgtcgatgatggtagcactgatgggacctctaaagtcgctttcagttttgtaaagaaacacaagattgataatgttagagttcttctacttggaagaaatcatgggaaaggtgaagcagtccgaaaaggaatgcttcattcacgtggtgaactattactcatgcttgatgctgatggtgcaactaaagtgaccgatttggaaaagcttgaagctcaggttcatgcattggctaagaaagctaagtctagcccagggacatctactagttcatctcagaatctatctgatgttgaagttgctgtttttggttcccgagctcatctagagaagcaggctcttgcgacattttgttgactgctggtcccgggatcaaagatacacagtgtgggtttaagatgttcacacgagcagctgcaaggaagcttttcacaaatatcagattgaagaggtggtgtttcgatgttgaacttgtatacctgtgcaagcgcctcaggatcccaatggtagaagtatccgttaattggaccgagatacctggatccaaagtgcgcatgacgagcatcatgcacatggtattcgagctcctgctgatcaaagtaggttatggactggggatatggaaaatcggctcgtagatccttgacattctatgctgactagtttctgcaactcagtttggaggaatactgtacaattttccgcaaaacctagttggtcgccagcaaatccatttggaggaatactgtacaattttccgagattttcaaatcgagagcatcaattcacatgtaccctagtgtttgatcatagagacgttgacagatgtaggccaaaattgttgtcccagctatatccttttactgatttgttatacaggaactcaaacgtgttgccaatattgttcattctagtttatagttgttccgggcttagtgaagagtagctcccct

SEQ ID NO: 11663 - DNA, 3448 bp, Zea Mays
atcacgggaatggtcaacactctgcagctttgttacgggaatggtctagaaactggctcccggacgtcggcgcagggaattgtctcacgacccgtttagaaacacagcacaccctgacagggacaaagaaagagagagagagagagacaagtcgttgtattgtaaacgaacgaggttaactatccgtgggtcccggcgtcccttcccgtccaaccggcggcatgatcacaggccactgtgcgcgtgacggttttcactcgacagcgccgcggcaaacgccatcgagttgtagtgtgtaccgctgctacttcagacggtcggaatgagacgcatggtcacgatcccatcccacggcatccaattccaatccattatgcatactcctagtaaaaaaagagtacacttaataattatagtaataaatagaaaaagcagtgaaatgaaaggtcccaactgccctccgtttgcgtgacgaggcaggcaagggcagaactagcagcctggcactgtagcagcagcagctgcacacgtaccaccacgccaccggcactcccggcccggcatcagctgctgaatccggcaatcaatcgcgcattctcgtccgcttttcctccccggcccgcgcgccagtatcggctgctctgcctcgtgcctccataaatacgaccccgccctccgccgttcccactcgcccctccccacacctccgctcccggcctgtgccgccgtcgccaccgctcgctcgcccgcctgcctgcctgcctgggcccgcagcaccgactctgacagcgcccgtcctgcttcctgtaccggcaggcgagggagaggactcagggagtgtgatggcggcaatgccggcgccgcttctgcctctgcttctgctggtggtggccgcggcgatgacgctctcccccgccgccgcccgcattcccggcgtgtacgtcggcggcggcggcggctggcagagcgcgcacgccacgttctacggcggcagcgacgcttcgggcaccatgggcggcgcctgcgggtacggcaacctgtacagccaggggtacggcgtgaacaacgcggcgctgagcacggcgctgttcgacgaggggctccgctgcggcgcgtgcttcgagatcaggtgcgaggagcagcccgggtggcggtggtgccggccagggaggccctccatcctggtcacggccaccaacttctgcccgccaaactacgcgctcccctccgacgacggcggctggtgcaacccgccccgcccgcacttcgacctcgccatgcccatgttcctccacatcgccgagtaccgcgccggcatcgtccccgtctcctaccgccggtaagacagacagcacagattcctcgacgcccgctgtggtagtggccttacctgcacgggcatgcccattcattccgcgtcgcttcggttctcgatcacggcgcgggcgggcgggcagttactacaccaaggcctcctttggaatggaggattagtaaaacatagggatggaaaaaatgtaggaatagagttgcatgtcaccttcaattccacaggaaaattttcaagaggttggacctcatgttaaaaaacctccaaaatctcactacaatgctcaattccataggaattttataggatttgttgcaactcaatcctttgttccaaaggaccacataggaaaactttctatagggttttaatcctttaaaattccttcacttttcccttgttccaaaggaggcccaaaatggcgtaaaagcggcaagcctgcaactgcaacccgaaatcctgtggtattactagtatagtacgtgataaaaggcagccaggctggtgtgtgtggtgcagtttcttccatacacgcgcaagcatggtgccagtgccacgttccggcaggtcacatgggatggaagccggggacgggcgggtagggcgtccggtgctagtagtagaagcagcagagcagtaccagtagcccttctctgacgaaagagacggaaggctgctttctatttgtaatttggggcgtctaatccgccgtctctctgcagttttctcgttgcgtgtagcggtagtgcagcagcagtactacgttaaaaaaaaaaaaagaaaccgcgtggtgcatagtggagcacggggtttcgagaaaagaaagacgaccgggccacagggaaaaacgcccagagaagcctcaaaaaaggcaccctactaccttggtggtggtggcagtggtaggaacagtagacgacagcacgctggtactggtagggcagcgcaggctcttgaccttttttcacactttggccgtcggggggcacaccggcaggcagacacccgcacgcacaggaacgtggcatctcccgttctgccccagccgtatagtaggtgccgtgccgcaagtccggcggggtgcggttcaccatcaacggcttccggtacttcaacctggtgctgatcacgaacgtggccggcgcgggggacgtggtgcgcgcgagcgtcaaggcggccagcaccgggtggctgcccatgtccaggaactggggccagaactggcagtccaacgccatcctcgtcggccaggcgctctccttccgcgtcaccgccagcgaccgccgcacctccacctcctggaacgccgccccgagcacctggcagttcggccagaccttcgagggcaagaacttcagggtctgatgcatgggatgggatgcgatgggatgggacttgggagaagaagccaaaactcttttctttctttctttctttcttcttatacgtaattattactactcactcctgctaccgtactactgctactggagtactaagcgcgtgttactgtgttagagggtggtgggtgttgtcaatgcctgttttaaggtcacgccttccgcccgccttaatcccaggtccaggtcctctctgaaaaaatggagtcttttcttctgaacaagatgtgtggatgggattctctagagtttgtcagggtatattgccgtctcttcggtccctagcacttctctatgcatcaagtttgtgcctttggcttgggggtgactggtgggtttctgtgtgagctgctcaagtggctgccgagctgcggctccaatttggtggcagcgcggtgagcgtagcccgcagctgctcgtcatcttctttcgtcccgtcccgtgtctctctgtctgtctccatgacaggaacacacatttgttatctatctcgttctacatcatggttcattgccagtaagaaagttagttgatgtgctcgcgtttctgccccgttccctttttgcgtgaatgctgctggcaagaaagggctccttcctccgtttgtgtgccgagatcgaagtccgtgaaagggataaagcacaaagcgaaagcgcgccgcgggaaccggggggccaagggccttccgctttgctcggttcggtcttgtctatttgct

SEQ ID NO: 11664 - DNA, 2582 bp, Zea Mays
ctcgcgcctcttcttggcttttttgcggcctgtcggatcggcacgaccttctagatgattctcaaacccacttccgggctgccgccgaggttatctacaacaccgagcagcgagaaggggttggtgtccagcacgaattgaatcgtcgccagaagtcatggcggattcggccacttcccgtccaaccgttctcgtcaccggcgccggcggccgcacaggccaaattgtctacaacaaactgaaagagaggtctgagcagttcgtggcaagagggctagtcaggacagaggagagcaagcagaagattggggcagccggtgatgtttacgttgctgacataagagacgcggatcgtctagcacctgctgtacaaggtgtggatgcgctcataatcctcaccagtgctgccccgaaaatgaaaccgggtttcgaccctagcaaaggtggacggcccgagttctactacgaagacggaatgtaccctgaacaggtggattgggttggccaaaagaatcagatcgatgctgctaaagctgctggagtgaagcatattgtgctggtgggatctatgggaggaacaaatcctaaccatccgctgaacagcatgggtaatggcaatatactggtatggaagcgcaaagcagaacagtatttggcagacagtggaatcccttatacaatcataaggccaggaggtctacaagacaaggacggaggagtgagagagctacttgtggggaaagacgatgaacttctccagactgacacaaagtcgattcctagagccgatgtggctgaggtttgtgtccaggctctgcagtacgaagaggccaagttcaaggcatttgatttggcctcaaagcctgaaggtgtgggcacgccaacaaaggactttagggcactgttctcccagatcactgctcggttttgagcgagctgctgagaagcctactcgagttctagattttatggtgtcacaatccattttatcgtgggcttgtcctggagatacaaccaggtagcttgttggagctgcggtttggtgcaattgcaaccagccattaaaacaagttatttggaaccctgtttgcataaattgttgggaacaatttatccaggcacagttactcacctctgcaacgtcctccaaagttccgatgcatattatgctagtaattcctctacaaattagtgctgaaagctgcagccatcctgatggttctatgaacaaaacaggtatgggcatttccttagtcaattgcgctgggttgatctcatccggactttcagatgatcgagccagatttctcgtgtcttgatcagagaagcaacaactgcattagttatggttttccttcacaccgtgctataaaaataaaaatgaccggcaaatgaaccaaaattcatcctacctcctcatcctaacaactatacatatttgatatgcactagcacggttagtaagagaggttgttgccaccactacaatgacttgacgccagcctcgttggagccctcctcaaagcccaacactctacacatatatcgtcgatcttctctaaccctgaaggtgattcctctatctctcggttctaagtttttcggtaaaagaagatcacacacttctataatggtatcagagtcaggtttaaagcccaaacgttaaccctagatgaccgaaagcctttgattttggaagaacccgagtacaaacacatcaagacttaggttttaggctttagatgccgtttggtttatatatcggtaacgtaataggtaaccgataacgttaaattatgtttgtttaagtccaaccgtaattgatccacattaaaaatggatacccgcttattcaaacttgttaccgccggtattcgagtgtgaatcattaccattaccatttacgttatattccgtgaaccaaacggcacctaaatcttttggggctctcttgtcttcatttggctacactcttgagtgtttctatcacttagataaatatatgtttagtctatccaaccactctaagtcataggtcttcatggttttgatcatctcaactcaattgctcaacttctttcaaacttagctcctgaaacacttttttgcatactgaacattttaatcattttaatgtgtttaaaaatgttcctatgtccttttagaacttaaccaaacactcaaaccactcaaaactccattcttccaaaatatgctctttttcacagagttttcagttgtttctcacactgaatcctttatattcattcttatgaacctgcacccaactacttggcaaaccagttacttcattaagttgtgatggtcatcaaacactaaaccaatattgaaagtcgcctatatgggggtgaataggcaaatctgaaatttataaagtttaagcacaactacaagccgaggttagcgttagaattaagtttgagtccgaaagagagggaaaaacaaatcaacaaagaaataaagcggatgaacacgatgatttgttttaccgaggttcggttcttgcaaacctactccctgttgaggtggtcacaaagaccgggtctctttcaaccctttcc

SEQ ID NO: 11665 - DNA, 2838 bp, Zea Mays
ccgacagctacggcgaggaggggattgctaggtttttagccctcttttcttttcccgtttcccgtctctgagtttagcgcagcgcgggccttgcatgggctgggcctgggctggttcgtgtgggcttactactgcgacaagggtgacgtggacgttctccgagccgcgcgccctcgcgcctcttcttggcttttttgcggcctgtcggatcggcacgaccttctagatgattctcaaacccacttccgggctgccgccgaggttatctacaacaccgagcagcgagaaggggttggtgtccagcacgaattgaatcgtcgccagaagtcatggcggattcggccacttcccgtccaaccgttctcgtcaccggcgccggcggccgcacaggccaaattgtctacaacaaactgaaagagaggtctgagcagttcgtggcaagagggctagtcaggacagaggagagcaagcagaagattggggcagccggtgatgtttacgttgctgacataagagacgcggatcgtctagcacctgctgtacaaggtgtggatgcgctcataatcctcaccagtgctgccccgaaaatgaaaccgggtttcgaccctagcaaaggtggacggcccgagttctactacgaagacggaatgtaccctgaacaggtggattgggttggccaaaagaatcagatcgatgctgctaaagctgctggagtgaagcatattgtgctggtgggatctatgggaggaacaaatcctaaccatccgctgaacagcatgggtaatggcaatatactggtatggaagcgcaaagcagaacagtatttggcagacagtggaatcccttatacaatcataaggaggtctacaagacaaggacggaggagtgagagagctacttgtggggaaagacgatgaacttctccagactgacacaaagtcgattcctagagccgatgtggctgaggtttgtgtccaggctctgcagtacgaagaggccaagttcaaggcatttgatttggcctcaaagcctgaaggtgtgggcacgccaacaaaggactttagggcactgttctcccagatcactgctcggttttgagcgagctgctgagaagcctactcgagttctagattttatggtgtcacaatccattttatcgtgggcttgtcctggagatacaaccaggtagcttgttggagctgcggtttggtgcaattgcaaccaggtagcttgtatcaatccattttatggtgcattgtttgcttgtacactgctgaatgtcgtctggttgccaattgtgtgaactgttgacagccattaaaacaagttatttggaaccctgtttgcataaattgttgggaacaatttatccaggcacagttactcacctctgcaacgtcctccaaagttccgatgcatattatgctagtaattcctctacaaattagtgctgaaagctgcagccatcctgatggttctatgaacaaaacaggtatgggcatttccttagtcaattgcgctgggttgatctcatccggactttcagatgatcgagccagatttctcgtgtcttgatcagagaagcaacaactgcattagttatggttttccttcacaccgtgctataaaaataaaaatgaccggcaaatgaaccaaaattcatcctacctcctcatcctaacaactatacatatttgatatgcactagcacggttagtaagagaggttgttgccaccactacaatgacttgacgccagcctcgttggagccctcctcaaagcccaacactctacacatatatcgtcgatcttctctaaccctgaaggtgattcctctatctctcggttctaagtttttcggtaaaagaagatcacacacttctataatggtatcagagtcaggtttaaagcccaaacgttaaccctagatgaccgaaagcctttgattttggaagaacccgagtacaaacacatcaagacttaggttttaggctttagatgccgtttggtttatatatcggtaacgtaataggtaaccgataacgttaaattatgtttgtttaagtccaaccgtaattgatccacattaaaaatggatacccgcttattcaaacttgttaccgccggtattcgagtgtgaatcattaccattaccatttacgttatattccgtgaaccaaacggcacctaaatcttttggggctctcttgtcttcatttggctacactcttgagtgtttctatcacttagataaatatatgtttagtctatccaaccactctaagtcataggtcttcatggttttgatcatctcaactcaattgctcaacttctttcaaacttagctcctgaaacacttttttgcatactgaacattttaatcattttaatgtgtttaaaaatgttcctatgtccttttagaacttaaccaaacactcaaaccactcaaaactccattcttccaaaatatgctctttttcacagagttttcagttgtttctcacactgaatcctttatattcattcttatgaacctgcacccaactacttggcaaaccagttacttcattaagttgtgatggtcatcaaacactaaaccaatattgaaagtcgcctatatgggggtgaataggcaaatctgaaatttataaagtttaagcacaactacaagccgaggttagcgttagaattaagtttgagtccgaaagagagggaaaaacaaatcaacaaagaaataaagcggatgaacacgatgatttgttttaccgaggttcggttcttgcaaacctactccctgttgaggtggtcacaaagaccgggtctctttcaaccctttcc

SEQ ID NO: 11666 - DNA, 799 bp, Zea Mays
gcgcctcttcttggcttttttgcggcctgtcggatcggcacgaccttctagatgattctcaaacccacttccgggctgccgccgaggttatctacaacaccgagcagcgagaaggggttggtgtccagcacgaattgaatcgtcgccagaagtcatggcggattcggccacttcccgtccaaccgttctcgtcaccggcgccggcggccgcacaggccaaattgtctacaacaaactgaaagagaggtctgagcagttcgtggcaagagggctagtcaggacagaggagagcaagcagaagattggggcagccggtgatgtttacgttgctgacataagagacgcggatcgtctagcacctgctgtacaaggtgtggatgcgctcataatcctcaccagtgctgccccgaaaatgaaaccgggtttcgaccctagcaaaggtggacggcccgagttctactacgaagacggaatgtaccctgaacaggtggattgggttggccaaaagaatcagatcgatgctgctaaagctgctggagtgaagcatattgtgctggtgggatctatgggaggaacaaatcctaaccatccgctgaacagcatgggtaatggcaatatactggtatggaagcgcaaagcagaacagtatttggcagacagtggaatcccttatacaatcataagaagcaaagaggcatttacctggaggactccaagggacaacgtgctgatccttgtttttggacaactgaaaaaaaaaaaacttcctgtacaataatatagtacatttctagtgtaa
